United States Patent Application Publication US 2014/0128277 A1 - sequence listing, part 5

SEQ ID NO: 3904 - DNA, 4689 bp, Homo Sapiens
  NM_015029
gtgatctggaatggcccagatcccttaaatgtcaaatgcaaaagaaagaaaacacgccaagaaaatgagaaaccagcctaccaatgtgactctgtcctctggctttgtggctgacagaggtgtaaagcaccacagtggaggtgaaaaacctttccaagctcaaaaacaagagcctcatcctggaacttcacgacagcggcaaaccagagtcaacccccattctctgcctgaccctgaagtgaatgagcagtcttcctccaaagggatgtttagaaaaaagggaggatggaaagcaggtcccgagggcacgtctcaggagatccccaagtatataactgcttctacttttgctcaagcacgagctgctgaaatcagtgctatgttaaaagctgtgacccagaagtcttcgaattcactggtttttcagactctgccacggcacatgcgacgaagagccatgagccacaacgtcaaacgccttcccagacggttacaggagattgcccagaaagaggcggagaaagccgtacatcagaaaaaagaacattcaaaaaataaatgccataaagctcgaagatgtcacatgaaccggacgctagaatttaaccgtagacaaaagaagaacatttggttagaaactcacatctggcacgccaagcggtttcatatggtcaagaagtggggctactgccttggggagaggccaacagtcaagagccacagagcctgctatcgagccatgacgaaccggtgcctcctgcaggatttatcctattactgttgtttggagttgaaaggcaaagaggaagaaatactaaaggcgctttctggaatgtgtaacatagacacagggctgacgtttgcagcagttcactgcttgtctggaaagcgccaagggagccttgtgctttatcgggtgaataaatatcccagagaaatgcttgggcctgttacgtttatctggaagtcccagaggaccccgggtgacccttctgagagcaggcagctgtggatctggctgcatccaacccttaaacaggatatcttagaggaaataaaagcagcgtgccagtgtgtggaacccatcaaatcagctgtctgcatcgctgacccacttccaacaccatcccaagaaaaaagccaaactgaattgcctgacgagaaaattggcaagaaaagaaaaaggaaagatgatggagaaaatgctaaaccaattaaaaaaattatcggtgatggaactagagatccatgtctaccatactcttggatctctccaaccacaggcattataatcagcgatttgacgatggagatgaacagattccggctgattgggccactttcccactccatcctaactgaagcaataaaagctgcttctgtccacactgtgggagaggacacagaggagacacctcaccgctggtggatagaaacctgtaagaaacctgacagcgtttcccttcattgcagacaagaagccattttcgagttgttgggaggaataacatcaccagcagaaattccggcaggtactattctgggactgacagttggggatcctcgaataaatttgccccaaaagaagtccaaagctttgcccaatccagaaaaatgccaagataatgagaaagttagacagctgcttctggagggtgtgcctgtggaatgtacgcatagctttatctggaaccaagatatctgtaagagtgtcacagagaataaaatctcggatcaggatttaaaccggatgaggagtgaattgctggtgcctgggtcacagcttattttaggtccccatgaatccaagatacctatacttttgattcagcagccaggaaaagtgactggtgaagatcgactaggctggggaagtggctgggatgtcctactcccaaagggctggggcatggctttctggattccatttatttatcgaggtgtgagagtcggagggttgaaagagtctgcagtgcattctcagtataagaggtcgcctaatgtcccaggcgattttccagactgccctgccgggatgctgtttgcggaagagcaagctaagaatcttcttgaaaagtacaaaagacgccctcctgcaaaacggcccaactacgttaagcttggcactctggcacctttctgctgtccctgggagcagttaactcaagactgggagtcaagagtccaggcttacgaagaaccttctgtagcttcatctccaaatggtaaggagagtgacctaagaagatctgaggtgccttgtgctcccatgcctaaaaaaactcatcagccatctgatgaagtgggcacatccatagagcaccccagggaggcagaggaggtaatggatgcagggtgtcaagaatcggcagggcctgagaggatcacagaccaggaggccagtgaaaaccatgttgctgccacagggagtcacctctgcgttctcaggagtagaaaattactgaagcaactgtcagcctggtgtgggcccagttctgaggatagtcggggaggccggcgagctcccggcagaggccagcaaggattgaccagagaggcttgcctgtccatcttgggccacttccccagggccctggtttgggtcagcctgtccctgctcagcaagggcagccccgagcctcacaccatgatctgtgtcccagccaaggaggacttcctccagctccatgaggactggcattactgtgggccccaggaatccaaacacagtgacccattcaggagcaagatcctgaaacagaaagagaagaagaaaagggagaagaggcagaagccaggacgtgcctcttctgatggcccggcgggggaagagcccgtggctgggcaggaagctctgactctagggctgtggtcaggccctctgccgcgtgtgacgttgcactgctccagaactctcctaggctttgtgactcagggagatttttccatggctgttggctgtggagaagccctggggtttgttagcttgacaggcttgctggatatgctgtccagccagcctgcagcgcagaggggcttagtgctactgaggcctcccgcctctctgcagtatcgatttgcgaggattgctattgaggtgtgaatgcgtgcttgtatcccagcagggcatagataatacgttattattgtctgccaagttctacatgtggagaatctgcttctgctttaaaatatcatgtgaaactccctggaaacaagaataaaaaattatgtattatgcagatgatgaaatgtttacatcattccagtaatgtcattgattttcatctttccctgtccttgctgtaatacttttaaattatttggccaaaagctttgtattatgatctcttggtctgtgtagttgtggctgaaaataatgagaagctctacgagttatcatcccctttttttgttagaaacaaagggcttgtcaggtctatttgaaaaacctcatagtcatgtgataagcaacaatagatgtttaatgatttcactgttatagcagaagacaagagaagacgcttggcctctgtacatgaaatatgggctcctgatggacctcattcaattctgtactgtgatttccatgccgaacaactcaagccttaaagagagaaatcatggacaactgatttctgcctgttttcaggcaggcacagtttatggcgtcagtgctaggctggaattagaaagtgggggtctatgacgtggacttcctgactctttgatctctttgttgttgaccaacacttgatcctactagttacttaatttttttaagtaaaaaattattattattttgtttctgcaaagattttctcaaagccatagaggagcatttctcagaatatgttctatgatatgtgtcacctaaaaaagtaagagattccaaggtcaggttgatatggaaactctaggttaaataaagttaagcatttctttatgaaagaacttctggaaacttccatgtgataatgtgcattgcggatctctaggaaggaaatgatagtgtatagtattttctaaatacttgtgattcctaaagttctcttacaaggagccctttgtaggaccagtgttcttagtagcgcgctttgggcagtgtggctgtgtagtgcatagctacctctgcaaggtgataactaagccggcaagctgcctttcaacactcatgcagtcacgttgtccacctgagattctcaacagggtataaaaggaaggtctcatcttgcctcacaggaagagtgggctcagtgtggcttttttccaactatggagaaactcagtgctcatctactttaagtttccacatatggcttgctcatagccttggtccttacctttcctgccataactttctagaagagcttaatgggattttttttctaaaaaatgtaaatatgcagttaggcattattttatgtaaatgcattgggtttttactgtagcatttggcactaaatggctttgggggtgatgaggtggggaaggatacagcaggtggtacagtagtcaggaagtacctgccaccaatgagatgtctgatgctttgcctcttaccatgcctctgaatgtctttggatccaacccagatgagactgaaaaaaaaaaaacagtgtaactaagtggcatctgtaaacagaataaatgaaaatgtcacctgatgttcaaaaaaaaaaaaaaaaa

SEQ ID NO: 3905 - DNA, 11706 bp, Homo Sapiens
  NM_015030
gaagacctcgcagcacagccgggcgcccgtcgggctctgggagagagcgagagagaaatccggttaaaatcagagtcggagggaggtttaaccacagatcggttccgatcggattattccttaaaggggacgcgccattgtcaagagaacggagccaggggcccgagggcggggaccggcggcgctggaggagcgaggcagctgtactaggactgggaacggcctagaacattccatattctgcttcacacacggtgactcactcactactgctttgtaccagtgtgcccactcgagtgcctgtaaagtacaagctccagatcaaaaaagcttctagatggatcctttccaaacttggtgtcttttctacaaactctgtgcctcaacaaccatttctaagtgagctgaagccatttattggtatcttggatggttaacatctaaatgcttaattcctgaaaccactcaagagtcataggattagatgatccaagtcaccaagaaattactgtctcaagtgatacgcttcagcgccagtcagcaaagtaaataaatactgtgcttcttccaactttcattccacttggggaaaaaaaaatatcatcatgtcaaacattacgattgacccagatgtcaaacctggtgaatatgtcatcaagagcctctttgcagaatttgctgttcaagctgaaaagaaaattgaagttgtaatggccgaacccttggagaagctattgtccagatctcttcagaggggtgaagatcttcagtttgatcagttgataagctctatgagctcagtagcagagcactgtctcccttccttacttcgcaccttgtttgactggtacagacgccaaaatggaacggaagatgaatcttatgaatataggcctcggtctagcacaaagtctaagggggatgaacagcaacgtgaaagagattatcttcttgaaaggagggacttagcagtagacttcattttttgtttagttttagttgaagttctaaagcagattcctgttcatcctgtacccgatcccttagttcatgaagttctaaacttagcttttaagcactttaaacataaggaaggatattcaggaaccaacactgggaatgtgcatattattgctgatttatatgcagaggtgataggggttcttgcccaatcaaagtttcaggctgtaaggaagaagtttgtgacagaattaaaagaactgcgacaaaaggaacaaagcccacatgtggtacaaagtgtcatcagcttaataatgggaatgaaattttttcgagtaaaaatgtatcctgtagaagattttgaagcatcatttcaatttatgcaggaatgtgctcagtatttcttagaagtgaaagataaagatataaaacatgcacttgctggtttatttgtggagattcttatccctgtagctgctgctgttaaaaatgaagtgaatgttccctgtttgaaaaattttgtggagatgctttatcagactacttttgaactgagctcgagaaagaagcattcattggctttatatccactaattacctgccttttatgtgtcagtcagaaacaattttttttaaataactggcatattttcctacagaactgtttgtcacatttaaagaataaagatccgaaaatgtctcgagttgcactggaatctttgtatagattattgtgggtttatgtaattagaataaaatgtgaaagcaacactgtaactcaaagtcgtcttatgagcatagtgtcagcactttttccaaaaggctcacgaagtgtggttcctcgtgacacacctctcaatatatttgtgaagattattcagttcattgctcaggaacgcttggattttgcaatgaaagaaataatatttgatcttctcagtgttggaaaatctactaaaactttcaccattaatccagagagaatgaacataggtctcagagtcttccttgtaatagcagacagtttgcagcagaaagatggtgaaccacccatgccaacaacaggagttattcttccctcaggaaatactcttcgtgtaaagaaaatatttctcaataaaaccttgacagatgaagaagcaaaagtcataggaatgtcagtttactatcctcaagtaagaaaagcattagatagcatcctcagacatttggacaaagaagttgggagaccaatgtgtatgaccagtgtgcagatgtctaataaggagcctgaagacatgattacgggggaaagaaaacccaagattgatttgtttagaacttgtattgctgcgattccaaggttgattcctgacggtatgagcagaactgacctgattgaattgttagcaaggctcacaattcatatggatgaagaactgcgtgctctggctttcaatactctgcaggcactaatgcttgattttccagattggcgggaggatgttctttcaggatttgtttattttattgttcgtgaagtgactgatgtccatcccacacttcttgataatgccgtaaagatgttggtacaattaataaatcagtggaaacaagcagcccaaatgcataataaaaaccaggacactcagcatggtgtagctaatggagcttctcatccccctcctctggaaaggagcccatattccaatgtattccatgtggttgaaggctttgcgcttgtcattctctgtagcagtcgacctgccactaggagactagccgtcagtgtccttagagaaatacgggctttatttgcacttctggaaatacctaagggtgatgatgaattagccatagatgtgatggacaggctaagcccatccattcttgagagcttcatacatctcactggggctgatcagactactttgctctattgccctagctcgatagatttacaaactttagcagaatggaactcttctcctattagccaccagtttgatgtgattagtccatcacatatatggatatttgcacatgtgacccaaggccaagacccatggattataagtctctccagttttttaaagcaagaaaatcttcctaaacactgctctacagctgtgagctatgcttggatgtttgcatacacaagacttcagttgttgtcccctcaggtcgatataaatagccccatcaatgctaagaaagtaaataccaccacaagcagtgactcatacattggcctgtggagaaactatctgatcctttgctgcagtgcagcaacatcgtcatcttccacatctgcaggttctgtgagatgttctcctcctgagacgctggcgtctaccccagatagcggctatagcattgattctaaaattattggcatcccatccccttcatccttgtttaagcacatagttccaatgatgcgttctgagagcatggaaatcacagaatcccttgttctaggtcttggcaggaccaacccaggagcttttagggaactaatagaggaattacatcccataattaaagaagcactcgaaagaaggccagagaatatgaaacggcgcaggcgtcgagacattttacgagtacaactggtacgaatatttgaactgctggcagatgctggtgtcattagtcacagtgcaagtggtggccttgataatgaaacacattttctcaacaacactttattggaatatgtagatttaactagacaactcctggaagcagaaaatgaaaaagactctgacacactgaaggatatacgatgccattttagtgccttagtggcgaatattattcagaatgttccagtgcaccagagaagaagtatttttcctcaacagagccttcgtcacagtctatttatgctgttcagtcactgggcaggtccttttagcatcatgtttacgcccttggacagatacagtgatagaaatatgcaaattaatagacatcaatactgtgcgttaaaggctatgtctgctgtactgtgttgtggccctgttgcagataatgtaggactttcatcagatggctatttgtacaaatggttggataacattttggattctctggacaaaaaggttcaccagctgggctgtgaagcagttacgttgttactggagctgaaccctgatcagagcaacctgatgtactgggctgtggaccgctgctacacgggctccgggagggtggcggccggctgctttaaagccattgctaatgttttccagaacagggattatcaatgtgacacagtgatgcttctaaatctgatactgtttaaagcagctgattcttctagaagtatctatgaagttgctatgcaacttttacagattctggaaccgaagatgtttcgctatgctcacaaattggaggttcagagaacagatggagtactcagccagctgtctcctctaccacatctctattctgtttcatattatcagttgtccgaggaactagcaagggcgtatcctgagctaactctcgccatattctcagagataagccagagaatccagacagctcaccctgctgggcggcaggtgatgctgcactacctgctaccatggatgaacaacatcgagctggtggacttaaaacctctccccacagcaaggcgacatgatgaagatgaagatgattccttaaaagaccgagaacttatggtgactagtaggcgctggttacggggagaaggatggggatctccacaagccactgcaatggttttgaacaatctgatgtatatgacagcaaagtatggcgatgaactggcctggtcggaggtggagaatgtgtggaccacacttgcagatggctggcccaaaaacctgaaaataattttgcactttttgatcagcatttgtggggtgaatagcgaaccaagcctcttgccttacgtgaagaaggtcattgtatatttaggtagagataaaacaatgcagttgctagaagagctggtgagtgagcttcagctgaccgatcctgtcagttcaggggtcactcacatggataatcccccgtattatcgcatcacttccagctataaaatcccttctgtcacctcaggaactacttccagtagcaatacaatggtagctcccacagatggcaatcctgataataagcccattaaagagaatattgaagagagctatgtgcacctggacatttacagtggactaaacagtcatttgaatcggcaacatcacagactagaatcccgatacagtagcagctctggaggatcttatgaagaagaaaaaagtgattcaatgccactttattctaattggcgactgaaagtgatggagcataaccaaggagagccactgcccttcccaccagctggaggctgctggtcaccactggtggattacgtgcctgaaacgtcatcacctggattacctcttcacaggtgtaacatagcagtgatccttttgactgatctcatcattgatcatagtgtgaaggtggaatggggaagctacctccatcttcttcttcatgcaatttttatagggtttgaccactgccaccctgaggtgtatgaacattgtaaacgcctgcttctgcacttattaatagtaatgggacccaatagtaacatccgaactgttgcttctgtccttctcaggaacaaggagtttaatgagcccagggtgcttacagtcaaacaagttgcacacttagattataatttcacagcaggcattaacgattttatacctgattaccagccctcccctatgactgactcagggcttagctcaagttctacctcttctagtatcagcttaggaaataacagtgctgccatttcacatctgcacaccactatcctcaatgaggttgacatctcagtggagcaggatggaaaagtcaaaaccctcatggaattcattacctcaagaaaaagagggcccctttggaaccatgaggatgtttctgccaagaatcctagcataaagagtgctgaacagttaactacatttttgaaacatgtggtttctgtttttaagcagtcaagctcagaaggaattcatctggaacatcatcttagtgaagttgctctgcaaacagcactttcctgttcttctcgacactatgctgggagatcctttcagattttcagggccctaaagcagcctctcactgcaactacactttctgatgttctctccagacttgtagaaactgtaggggatccaggagaagatgcacagggatttgtgattgagcttcttctcacattggaatctgcaattgatactttggctgaaaccatgaagcattatgatcttctttctgccctttctcaaacctcatatcatgatcctataatgggaaacaagtatgcagctaacaggaaaagcactggacaactcaatctaagcacaagtcccattaatagtagcagttatttgggatataacagtaatgcaagaagtaactctttgagattaagtttgattggtgaccgacgaggtgaccggcggcggagtaacacactggatataatggatggacggataaaccatagcagtagtttagcaaggactagaagcctttcctctctaagagagaaaggaatgtatgacgtgcagtccactactgagcctaccaacttgatggccaccattttttggatagcagcatctttattagaatcagattatgaatatgaatacctcctggctctcaggcttctcaacaaactgcttatccatttgcctttggataaatcagagagtcgagagaagattgaaaatgtacaaagcaaattgaaatggactaattttccaggacttcagcagctcttccttaagggttttacctcagcatctacacaagaaatgaccgtgcacctcctcagtaaactcatttctgtctccaaacatacattggtggatccttcccaattgtcaggctttcctcttaacatcctttgcttattgcctcacttaatccagcattttgacagcccaactcagttttgcaaagaaacagctagtcgaatagcaaaggtttgtgcagaagaaaaatgcccaacacttgtcaatctggcacacatgatgagtttgtacagtacacacacgtattccagagactgttctaactggatcaatgtcgtgtgcagatacctgcatgactccttctcagatacaacatttaatcttgtgacttatcttgcagagctgttagagaaaggattgtccagtatgcagcaatcattactacagattatttatagtctattgagtcatattgacctgtctgcagccccagccaagcagtttaatctggagatcataaagattattggcaaatatgtacagagtccttactggaaggaagcccttaacatattaaagctggtggtgtcacgctctgcgagtcttgtcgtacccagtgatatccccaagacctatggaggagatacaggttctcctgaaatatccttcactaaaatttttaataatgtttctaaggagttgcctgggaagaccttagattttcattttgatatatctgagacaccaattattggaaacaaatatggtgatcagcacagtgcggctggaagaaatgggaaaccaaaagttattgctgtcactagaagtacttcctcaacttcttctggttctaattctaatgccttggttcctgttagttggaaaaggccacagttatcacagcgaagaacaagagaaaagctaatgaatgtgctttctctctgtggtccagaatctggcctcccaaagaacccatcagttgtattttcttctaatgaggatttggaagtcggtgaccaacagactagcctaatttctacaacagaagacataaatcaagaggaagaagtagctgtggaagataatagcagtgaacaacagtttggtgtttttaaggattttgactttttagatgttgaattggaagatgcagagggtgaaagtatggacaatttcaactggggagttcgcaggcgctcactggacagtattgacaaaggggacactccatccctccaggagtaccagtgctctagtagcacccccagcctgaacctcaccaatcaggaggatacagatgagtcctcggaagaagaagcggcacttacagcaagccagatactctcacgcacacagatgttaaacagtgattctgccactgatgaaacaataccagaccatcctgacttacttctccagtctgaagattccactggcagcatcacaacagaggaagtgcttcaaatcagggatgagaccccaactttggaggcttctctagataatgctaacagccggctgcctgaggatacaacttcagtattaaaggaggaacatgttacaacctttgaagatgaaggatcctatataattcaagaacagcaggaatctcttgtgtgtcaaggaattcttgatttagaagaaactgaaatgccagagcctctagctcctgaaagttaccccgagtcagtctgtgaagaggatgttaccttagctctgaaagagctagatgaaagatgtgaagaagaagaagcggatttctccggactgtctagtcaagatgaagaagagcaagatggttttccagaagtacagacgtcgcctctgccgtcaccatttctttctgccatcatagccgcctttcagcccgtggcatatgatgatgaagaggaagcctggcgctgccacgtcaatcagatgctgtctgacaccgacgggtcctctgcagtgtttacttttcatgtgttttctaggctgtttcagacaattcaaagaaagtttggagaaataactaatgaggcagtcagctttcttggtgatagtctgcaacgcattggtaccaaatttaaaagttccttggaagtgatgatgctgtgttcagaatgcccaacagtctttgtggatgctgaaacactgatgtcatgtggtttgctggaaacactcaagtttggtgttttggagttgcaagaacacctggatacatacaatgtgaaaagagaagccgctgagcagtggctagatgattgtaagaggacatttggtgccaaagaagacatgtataggataaacacagatgcacaacaaatggaaatactagcagaattggagctctgccgaagattatacaaattgcattttcaattgctgcttctgttccaggcctactgtaaacttatcaaccaagtaaatacgataaaaaatgaagcagaggtcatcaacatgtcagaggaacttgcccaactggaaagtatcctcaaagaagctgagtccgcttccgaaaacgaagaaattgacatttccaaagctgcacaaactactatagaaactgccattcattctttaattgaaactttgaaaaataaagaatttatatcagctgtagcacaagtcaaagctttcagatctctctggcccagtgatatctttggcagttgtgaagatgaccctgtacagacactgttacatatatatttccatcatcagacgctgggccagacaggaagctttgcagttataggctctaacctggacatgtcagaagccaactacaaactgatggaacttaatctggaaataagagagtctctacgcatggtgcaatcataccaacttctagcacaggccaaaccaatgggaaatatggtgagcactggattctgagacacttcaggcctttaggaaagaaactaaactgaagatgatgaagaatattaaccaagcaccttttatggacccttgcattcactgataactttctggcagcatctactttttagtgtaactaatgtcaaactgtatcatcaaaaacaaagatctgaaagaaaaaaacatctgatattttaacagctgccaatatctcccacaataactgcgtgaagaaggaattttttaattacttaacctacgtgaaaagaaaagggctaaaagtgatgcctacaaatacattactttctggggaaagaaaagaattccaagaatgtttgcaataatggcctccaatactgaaacaaccaaaagcaggtgaaatgaggctgaaatcaaggctgtttcattttagctgaagacctgcaaagctgcttggatttctagcagttgaaaacctaacctgcaattgatgcttaatcatccatccacatgaacatgcagtcagctatacgcatcaagactcgtttgcaaaaaccattgatttttcagtatgtgggataagggtttgggtttttttgttttttggtctgtataaggaattatgtgtgtgtgagttgggatgtatggatatgtgatagtcatattttcaaggtatggatgtttggtgataacgtctcagagcatgcctaaaagagcactgcaagattatttttgaagaaatgttattttattagatctaactcttcatagtatgtaaatgttagaacattttaataatattttaaaactgggctttcccagtatttcaaaaagaaataatatatctgttaacgttattggaatgctgctcagttctctgatcagtgcttatgttatgattgttgataactaaccaaagtagatgcctgcagagactttaaaatgtaaaataaagatgtatgctgcctgtcagctattctcattagaaaagttttaacttattttactccatatagaaactgtagagactaaaaccagttattttcttgtacatttgtgccatgcactgttgttatacaagaataggtgtacaaagctaaagaaaaattgtggtcattgatgatggaatatatgacttgcaggctttgaagtctgcagaattcaagaaaagagctgcaaatgcatttttgtatctttattcaggactcacatgctttaccctaaagaaacctggggctaggggaaatgaaaggaagcctgaagactgactaccaaaacatgcaatatacttattcactgtctaagtctgtagtataacatgaactggagtctctatccttttctaaaatcgcattttgtaagaaaagaaagaaaaaaaaaaaaaaagaatgtagtcccacaactcctgatttgaaagaaacaccttgtattttttatatacatctcttatccactgtgacttttcttttaaactgggctctgtgattccagagtttagaatgtagaaatgaaatgcttagctttaccttttcttggggggtgtggaccctgccagaaatgtaattacgtatgctcaagtgcattaattgaaggcactgtgcacaccattggactgctgaccacagttaaacatttccagtaaaatttcgtaactggtcacagctcattcataatcactgtattttttgaccctgataaagacaattattttgatggtgttctggtactgtaattggtatcctttaaattatttaaaacttttgggtgtggggcaggcagagagggatggtgtccagagatacatcacactttacatcctatcttactgtcctctgtttttcttaccctccttacatcctttttgttaaaaataaaaagcattgtagctgttggtttgtgttgtattttaacaaagaatgaatgattacagtgtgcatcatttagaaacctttcaaatgttaccttcttgaattgccctagaaaagaacaaaattagttgactacccaaccaaacctttcagttgatatttgctttttgtgtttatttatatgtaactaagtctattaatataataaaaatgaatatacctgcagc

SEQ ID NO: 3906 - DNA, 5457 bp, Homo Sapiens
  NM_015033
cggccgcggctgctgcttcctcgggccattttgctgtggagcggcggggaggaggagccgccgaggagaccccgggcgaggagctgcgagccggaggaggccgcgcggactccgggctttccgccgtcgcggggatctcggggggcaaagggatcgccggggagggggaccagagagccgcgcccgccgcgcggagcgccccttcgcgtcccctgcaccatgagctggggcaccgagctctgggatcagtttgacaacttagaaaaacacacacagtggggaattgatattcttgagaaatatatcaagtttgtgaaagaaaggacagagattgaactcagctatgcaaagcaactcaggaatctttcaaagaagtaccaacctaaaaagaactcgaaggaggaagaagaatacaagtatacgtcatgtaaagctttcatttccaacctgaacgaaatgaatgattacgcagggcagcatgaagttatctccgagaacatggcatcacagatcattgtggacttggcacgctatgttcaggaactgaaacaggagaggaaatcaaactttcacgatggccgtaaagcacagcagcacatcgagacttgctggaagcagcttgaatctagtaaaaggcgatttgaacgcgattgcaaagaggcggacagggcgcagcagtactttgagaaaatggacgctgacatcaatgtcacaaaagcggatgttgaaaaggcccgacaacaagctcaaatacgtcaccaaatggcagaggacagcaaagcagattactcatccattctccagaaattcaaccatgagcagcatgaatattaccatactcacatccccaacatcttccagaaaatacaagagatggaggaaaggaggattgtgagaatgggagagtccatgaagacatatgcagaggttgatcggcaggtgatcccaatcattgggaagtgcctggatggaatagtaaaagcagccgaatcaattgatcagaaaaatgattcacagctggtaatagaagcttataaatcagggtttgagcctcctggagacattgaatttgaggattacactcagccaatgaagcgcactgtgtcagataacagcctttcaaattccagaggagaaggcaaaccagacctcaaatttggtggcaaatccaaaggaaagttatggccgttcatcaaaaaaaataagcttatgtcccttttaacatccccccatcagcctccccctccccctcctgcctctgcctcaccctctgctgttcccaacggcccccagtctcccaagcagcaaaaggaacccctctcccatcgcttcaacgagttcatgacctccaaacccaaaatccactgcttcaggagcctaaagcgtgggctttctctcaagctgggtgcaacaccggaggatttcagcaacctcccacctgaacaaagaaggaaaaagctgcagcagaaagtcgatgagttaaataaagaaattcagaaggagatggatcaaagagatgccataacaaaaatgaaagatgtctacctaaagaatcctcagatgggagacccagccagtttggatcacaaattagcagaagtcagccaaaatatagagaaactgcgagtagagacccagaaatttgaggcctggctggctgaggttgaaggccggctcccagcacgcagcgagcaggcgcgccggcagagcggactgtacgacagccagaacccacccacagtcaacaactgcgcccaggaccgtgagagcccagatggcagttacacagaggagcagagtcaggagagtgagatgaaggtgctggccacggattttgacgacgagtttgatgatgaggagcccctccctgccatagggacgtgcaaagctctctacacatttgaaggtcagaatgaaggaacgatttccgtagttgaaggagaaacattgtatgtcatagaggaagacaaaggcgatggctggacccgcattcggagaaatgaagatgaagagggttatgtccccacttcatatgtcgaagtctgtttggacaaaaatgccaaagattcctagaggggagtgcctgcgagcctcgggtgagccttcctggaggagcctccgtctgcttgttcccacaggcctccagcgccctgccctgtggacagcccacccctccgcagccccatccctgcggggcggtctctctctctctccagcatgctccctgcggccctgccctcccgcccagcccgggccacctcgtgggggacaagtctcgccagcgcccacccccatggctcgggtcagtcctcatcgctccccctccccaccccgcgcaggccactgagacggtgggacacacgcccctacctgctccttcctgggccctcagtccacccgggctcgtcctggcagcccttccgcgcttcacacagtgccttttgtgaaagtgtcatcacgggtcccctgaggagacaaggcaggtccagcgcacatcaggcggactgagcactcgatgtcatccgtgtcgatgtcatccgtgtgtcccagactgtctgctgtagaaaacacttcctcctctcctgagtctgtgaagtcctcagtggtcctttttggattctaggcttgcacctcatactaaacattgaccctttcactatgccctcaacctgggagcatctggcaggcaggggggcaggtacacacacacccacaggcacacccaccagtacacacgcgtgcgcatacacacattttggtttgacgccctgttttcagtggcctggggaggtccacactggaagtcgaattccagctcgccttgttgactcgcctgtgtccaccggccatgaggagcccacgcctgtcctccccatcactttcctgtccctgagaactgtagatcatgcgcttgtgagcgaggccctcccctctgcaccagctcattgcaaagcgaacatcctctcctttccaggagccccaggattagcatctgaaaagggtagcacttccttttttgttgttgttttttttttttttttgagacgggagtctcgctctattgttcagactggagtgcagtggcatgatctcggctcactacaacctccacctcctgggttccagcgattctcctgcctcagcctcccaaatagctgtgattacaggcgtgcaccaccacgcccggctaatgtttgtatttttagtagagacagggtttcaccgtgttggtcaggctggtctcaaactcctgacctcaggtgatccgcccgcctcagcctcccaaagtgctgagattacaggtgtgagctaccgcaccccgccgaggttagcactttcatcaccaaagaccccgtgcctctcgtggtcctttgagggatcccgccgccaccacccttgtattttatcacgtgctcttcagggcatgtggaattcgttgagtttgcttttagagccaagtttctttccctgtgtgggtttttgaggaaaacctgaggtcccctaatctgtggccaccaccccccccccccgccacgccttagagcagagcagcccctcctctcatttggtgcagaaacagtcaagaggaaccattggcctagagctcctgtgaccgagagcgccacggaagcctggggatgacgtcgggcagctttattctttgcttggctttggtaactaggtggtcccctcaagcatcctcagttcctcttgctgtttatgaatctaagacaaggaagtcctatagaagccaaagggacagggacggaaaggacaggtcccaagggatggggctgtctttacttgtggaaaccaggaaattgctcctctcagccaaccaaggttgaccacacaccacccttccggagcagctcagtcagccctcggggacgagaaaccacaagcgcagagacgctgaggcccaggcaggtgaagaggaagtggctttgggtttttaaagtaggtgagcgtgagcctctctgactgcttcttccccgggggggactgcaaaccgctcagggttgcggcagagccatggacttccggtccctgcaacgggtgacctaagcgtggtgcacccatcagtcacgcaggaggactgacttgacagacgaaagacaagcccggatgacacagggtgagaagagtcagggccgcacctctgtccctgcaaaccaacaggtgcatggtgagtgtggcagtccccacagctccacaatgggctcccccgccaacggggacgacagggatcttcaggaacttctgacctcaccaagtcaagtggaccactctccactccacgaggatgtgaaacggttctttaaaatgggattttagagcctcgggaatgcatgtgcgtcacatctttcatattatgggtcaggatagattcatttcttgcaacatagtggaaaagatataagctgcagtaatttgctctttgaatgaccgtcacccccagtataggatatgcttgtatccccccgtcactcctccgcctgttttttaaacttttccaccacctgcgtccaaaaagaatgttatagcgagtgctcttaaatgttgaacctgggtgttgcttccgggccagtctgcgtggctccatgaaaagctcactgctgccccagccgggcttcttagaggaggtcagttgtcctatgtatcatcatttactctgggaatcctactgtgaaatcatgtctgtatttttctggagcagttcacatagagtagaatgtggaatttcccgtgaacgtctccttcctcccccgtatctgccgcctgtcacttcgccaccgtgctagaatactgttgtgttgtaagatgactaattttaaaagaacctgccctgaaaagttcttagaaacgcagtgaaagggaggaacttgtcctttacccagtttttcctttgtaggatgggaaagtataaaaaggcacagaaggttgtcatgggctgttccttgggggtttttatcctgctcaccgtggagataagcctgcggcttgtctaaccagcgcagcgcaaaggtctcgatgccttttggtaacatccgtcattgcagaagaaagtttacacgacgtcaaaaagtgacgttcatgctaagtgtttttccagaaatattggtttcatgtttcttattggctctgcctcctgtgcttatatcatccaaaaactttttaaaaaggtccagaattctattttaacctgatgttgagcacctttaaaatgttcgtatgtgtgttgcactaattctaaactttggaggcattttgctgtgtgaggccgatcgccactgtaaaggtcctagagttgcctgtttgtctctggagatggaattaaaccaaataaagagcttccactggaggcttgtattgaccttgtaactatatgttaatctcgtgttaaaataaaatataacttgtgaaaaaaaaaaaaaaaaaaaaaaaaaaaaaaaa

SEQ ID NO: 3907 - DNA, 1681 bp, Homo Sapiens
  NM_015041
gccgtccaagggtccattggttgccatagagatcgtcgagcgctgggcctgtgatcgctgaggggcgagcagttgcgaccctgggctcctggggacctgagcgttatgtctttccgcgacctccgcaatttcacagagatgatgagagccctgggataccctcgacatatttctatggaaaatttccgtacacccaattttggacttgtatctgaagtgcttctctggcttgtgaaaagatatgagccccagactgacatcccgcctgacgtggatactgaacaggaccgagttttcttcattaaggcaattgcccagttcatggccaccaaggcacatataaaactcaacactaagaagctttatcaagcagatgggtatgcggtaaaagagctgctgaagatcacatctgtcctttataatgctatgaagaccaaggggatggagggctctgaaatagtagaggaagatgtcaacaagttcaagtttgatcttggctcaaagattgcagatttgaaggcagccaggcagcttgcgtctgaaatcacctccaaaggagcatctctgtatgacttgctcggcatggaagtagagttgagggaaatgagaacagaagccattgccagacctctggaaataaacgagactgaaaaagtgatgagaattgcaataaaagagattttgacacaggttcagaagactaaagacctgctcaataatgtggcctctgatgaagctaatttagaagccaaaatcgaaaagagaaaattagaactggaaagaaatcggaagcgactagagactctgcagagtgtcaggccatgttttatggatgagtatgagaagactgaggaagaattacaaaagcagtatgacacttatctggagaaatttcaaaatctgacttatctggaacaacagcttgaagaccatcataggatggagcaagaaaggtttgaggaagctaaaaacactctctgcctgatacagaacaagctcaaggaggaagagaagcgcctgctcaagagtggaagtaacgatgactcggacatagacatccaggaggacgatgaatccgacagtgagttggaagaaaggcggctgcccaagccacagacagccatggagatgctcatgcaaggaagacctggcaaacgcattgtgggcacgatgcaaggtggagactccgatgacaatgaggactcggaggagagtgaaattgacatggaagatgatgatgacgaggatgacgatttggaagacgagagcatttctctctcaccaaccaagcccaatcgaagggtccggaaatctgaacccctggatgagagtgacaatgacttctgacccttttgccaagggaccctggcagattaaaaccctcagacttgtaggtaaatgggaacttagaaggttaggaaggtaacccctgttttgtttactaagctggctggactcatgatcactgaagcaatacttatttctgctttagcctcctatgtttgcattccatgaagcttaaataagaattgaagcaaatccctaagatttatttttttccaccttatttatcttctaaaacttgaggaatgcatgtgttcttagtgattcacatccacgggacaaaaactcaagaagaaataagagctgacgccacacaaaaaaaaaaaaaaaaaaaaaa

SEQ ID NO: 3908 - DNA, 8618 bp, Homo Sapiens
  NM_015042
atgtccttgagcagtggagcctccggagggaaaggagtggatgcaaacccggttgagacatacgacagtggggatgaatgggacattggagtagggaatctcatcattgacctggacgccgatctggaaaaggaccagcagaaactggaaatgtcaggctcaaaggaggtggggataccggctcccaatgctgtggccacactaccagacaacatcaagtttgtgaccccagtgccaggtcctcaagggaaggaaggcaaatcaaaatccaaaaggagtaagagtggcaaagacactagcaaacccactccagggacttccctgttcactccaagtgagggggcagctagcaagaaagaggtgcaggggcgctcaggagatggtgccaatgctggaggcctggttgctgctattgctcccaagggctcagagaaggcggctaaggcatcccgcagtgtagccggttccaaaaaggagaaggagaacagctcatctaagagcaagaaggagagaagcgaaggagtggggacttgttcagaaaaggatcctggggtcctccagccagttcccttgggaggacggggtggtcagtatgatggaagtgcaggggtggatacaggagctgtggagccacttgggagtatagctattgagcctggggcagcgctcaatcctttgggaactaaaccggagccagaggaaggggagaatgagtgtcgcctgctaaagaaagtcaagtctgaaaagatggagtcccctgtttccacaccagcagtgctgccaatacaccttttggtgccagtggtcaacaatgacatctcatctccttgtgagcagatcatggttcgtacccgatcagttggggtcaacacatgtgatgtggctctggccacagagcctgagtgcttgggcccctgtgaacctggaactagcgtcaaccttgaaggcatcgtgtggcaggaaacagaagatgggatgttggtggtaaatgtaacgtggaggaacaagacatatgtaggtacactccttgactgcacacgacatgattgggcacccccaaggttctgtgactccccgaccagtgacctggaaatgcgcaatggccggggtagaggcaaacgcatgcgtcccaacagtaatacacctgtcaatgagacagccacagcctctgacagcaaagggaccagtaacagcagcaaaacccgggcaggagccaatagcaaaggccgtcggggcagccagaattcttcagagcaccgcccacctgccagcagcacttctgaggatgtcaaggccagcccttcctcagctaataagcggaaaaacaaacccctttcagacatggagctgaattctagctcagaggactccaaagggagcaagcgtgtccgtactaattccatgggctcagccactggcccccttcctgggacaaaggtagaacccactgttctggacagaaactgcccctcccccgtcctaattgactgtccccacccaaactgcaacaagaagtacaagcacatcaatggacttaagtaccaccaagctcatgcccatacagatgatgacagcaagccggaagcggatggggacagtgagtacggagaggaacctattctccatgcagatcttgggagctgcaacggtgcatctgtctcacaaaaaggttccttgtcccctgcccgctcagctacccccaaagttcgacttgtagagccccatagcccttctccttcaagcaaattcagcacaaaaggcctctgtaagaaaaagttgagtggggaaggggacacagaccttggggccttatccaatgatggctctgatgatggaccctcagtgatggatgaaacaagcaatgatgcctttgattctttagaaaggaagtgtatggaaaaagaaaaatgtaaaaaaccctctagtttaaaacctgaaaagattccttccaagagcctaaagtcagcccgtcccattgcccctgccatccccccacagcaaatctacaccttccagacagccaccttcacagcagcgagcccaggctcttcctcaggcttgaccgccacagtggcacaagccatgcccaacagtccccaactcaagcccattcagcccaagcccactgttatgggagaacctttcacagtcaaccctgccttgactccagccaaggacaagaaaaagaaagacaaaaaaaagaaggaatcttcaaaggaacttgaaagtcctctgacccctgggaaggtgtgtcgagcagaggaaggcaaaagcccattcagggaatcttcaggagatgggatgaaaatggaggggctcctaaatggctcatcagacccccaccaaagccgactggctagcatcaaggctgaagccgacaagatctacagtttcacggacaatgcccccagcccttccattggaggcagtagccgccttgaaaacactacccctactcagcccctgactcccttacatgtggtgacccagaatggagctgaagccagctcagtcaaaaccaacagccctgcatactctgacatctctgatgctggggaggatggggagggcaaggtagacagtgtcaaatcaaaggacgccgaacagttggttaaagaaggggctaagaaaactctttttccccctcagcctcagagcaaagactcaccatattaccaaggctttgagagttactattctccaagttatgcacagtccagccctggggctctgaaccccagcagccaggcaggagtggagagccaggccctgaagacaaaaagggatgaggaacctgagagcatagaagggaaagtgaagaacgatatctgtgaagaaaagaagcccgagctgagcagttccagtcagcagccctcggtcatccagcagcgtcccaatatgtacatgcagtccctgtactacaaccagtatgcctatgtacccccctatggctacagcgaccagagttaccacacccaccttctgagcactaacacggcttaccggcagcagtacgaagaacagcagaaacgccagagcttagagcagcagcagcggggagtggacaagaaggcagagatgggcctgaaggagcgggaggcagcactcaaggaagagtggaagcaaaagccgtcaattccaccaactctcaccaaggcccccagcctgacagacctggtgaaatcaggacctggcaaggccaaggagccaggggctgacccagccaaatcagtcatcattcccaagttagatgactcttcaaaactcccgggccaggcccctgaaggccttaaagtgaagctgagtgatgccagccacctaagcaaggaggcctctgaggccaagacaggtgctgagtgtggtcgacaggcagagatggatccaatactctggtaccgacaggaggcagagccccggatgtggacatatgtttatcctgccaagtactcagacatcaagtcagaggatgagcggtggaaggaggagcgggaccgcaaattgaaggaggaaaggagtcggagtaaggactctgtccccaaggaagatgggaaggaaagcacaagtagtgactgcaagctgcccacgtcagaggagtctcgccttgggagcaaggagccccggccaagtgtccatgtgcctgtgtcctccccacttacccagcaccagtcctacatcccctacatgcacggctattcctacagtcagtcctacgaccccaaccaccccagctaccggagcatgcctgctgtgatgatgcagaactacccaggttcctacctgccttccagctactctttttccccatatggcagcaaggtctcaggtggtgaagatgctgacaaggcacgagccagccccagtgtgacttgtaaatccagctcagagtccaaagccctggacatcttgcagcagcatgccagtcactacaagagcaagtctcccacgataagtgataaaacttctcaggagagagatcgaggaggctgtggggtggttgggggtggtggcagctgtagcagcgtcgggggagcaagtgggggtgaacggagtgttgaccggccccgcacctctccttcccagcgcctgatgtccacacaccaccaccaccaccacttggggtactcattgctcccagcacagtacaacttaccctatgcagcagggctttcttctacagccattgttgccagccaacaaggctcaactccctcactctacccaccccccaggaggtgagaatgacaccaagtgcccggataaagtcagcttcacgggcccggactggcttacccaaggaggtgctgaaggtgccgtttagacatcagttaaatggtgttgatcatcctgtttgccgtttccaccatgactgaaggcagacccttggctatctcacctccaccagacctccggactacctgaccctacctcttcctcaggagctggagagctggtacttagcaaaaatatttattctctcagccacagttatgactattgtggcctctgtggagatgaaggcacgggaagcaaccaggggaacatggcctcagcccagagaagccactgctctgttccccaagcccttggtctgctgctggagcagtaccagcccccccgcccaccagggagggacccccacccccaagcactgggtaaggtctgaagacagcacagcagccatacccctcaccatcattaccaccatcaccagattctgcatctccctagtgctttgcaccctgggaattggcagcatgtggaggaactagaatctcaggaaagaaattgggggttgttttctacataattgtgaaaacaaggtcttcaaatgtggagacttctccccatttacatgagcacatataaacgctcacaacctagcctggaaaggaagaccaaggcatctgccccaacatggccttgagctgcctgtgaggcagggggcaggggttccaacaccagcacagggctccccagggacactgggagcaagctggtgctggagcatgaatgacgtctgtgaagtagaacctgcgtccccactaagtcctgctgcttcttattccccaactccttgcccttttcccttccctcctaaccccttggtgcctttcccagggggatccccacactggtcttgcctcttcttttccactgcttggctcttaagcctcaggcagataaactagtattccccccagcttggggaaccttggagtctgccaggtcaccttagggcaaggcccagaaggcagcccctgggagcacccagcagttcttggagatgtcctgtcatctagccatctgatatcttcctcatttgaggccacagatatatacagcccaattcctctgtctacaagtacatgattttatatagctcagtctataacctccatgtgggccaatataagctgtgtttcttggtaacacatattttgtttgaggggccactggccatgggaggttatttgttccttagaccctggaataacacatccaagccattacttattagagtctcagaatgtactcagtggagctgtgctttgaggcagccaacatttctctgctctccttagaaatgcagtctcccaatggaagctttatactctttgtactgggaaagtgaggatgatttggtagctttattggggtcatgtcttccccaaggtgtggggagcttagcttacttggcttttgaggtatcatccctctgttctcccctcctatctttccatgaccctctggattgagagagagagataaagactgacagacaccagtgtaggctggaaaagggagtgtgtgaccagagtgccaaaagtgactaggagcaggaacttggctccgactcagtttggaaaatgggaaataggggacagtaagcacaatgcccagtagtagttgatttccaaggaccctggaaccctacacttgagaggcttagggtcaccatctgctcaagaggatcccctctgatctacaggccttttccctaggtttctgcctcctcgtttttgttcaagttgggttctgagtcctccccaaaaaccattgttttagacctcttggcagggccccaaaacagcctccctcatacccatcattccctctgccttctgctgccctcatgggcagtgctctgagcagtgacctccctttcctccgtggaagtagctagtgcagacaccgtcatcccaccccacctgagtcaccccaaccaagagggtgactgaatttcagcctgattatgccctcctggggctcctgtgaggtggagccaaggttccctctctgttcctgtttgtttttaaatattgttgtgtgttttgtatctgtggcactggcctgcagcatactctgtatatattgtaaagaaaccgttaggagtaattttcttttgcattgggcaggcatggccctgcattcctgccctttccactcattctgtaacacagaggacgaacttctgtattagctgggcagccttgggttctccagaagagaacaggtttttcttttcctttttaatttttcttcttaaacatttggctctttgatcctcatatccaagtctcccctgaagagtaggagctgctcagaagagcaggtgaaagccaccatggcagatcctgatgcctgccgggcctagtcttccctctgaaataacatgaagcagcagctgtggagattcttgacaagtgctgagtgaaagatttgctgcccacctctacatggggaggagaaacacaggtgggagctacctgtggcatccatgacctagtcagagggatgagatgctcagcaggggtccccatcctatcccaccccacaaacaaaggctggaaaaatttgctaccaagggccaagaccaccagaccaagcctgtttatgagccacccctgcccaggccctcacagacattgctcacggggcttcccatagaggagaagctaaagagggagggggcctcatccccagatagatcaggcaaggcttggagagctgctctttaggatccacatcaactacttcctcattttaaggtatggcagttcccttcatccccttttcctgccttgtacatgtacatgtatgaaatttccttctcttaccgaactctctccacacatcacaaggtcaaagaaccacacgcttagaagggtaagagggcaccctatgaaatgaaatggtgatttcttgagtctcttttttccacgtttaaggggccatggcaggacttagagttgcgagttaagactgcagagggctagagaattatttcatacaggctttgaggccacccatgtcacttatcccgtataccctctcaccatccccttgtctactctgatgcccccaagatgcaactgggcagctagttggccccataattctgggcctttgttgtttgttttaattacttgggcatcccaggaagctttccagtgatctcctaccatgggcccccctcctgggatcaagcccctcccaggccctgtccccagcccctcctgccccagcccacccgcttgccttggtgctcagccctcccattgggagcaggttggggcgagctggaggcccgggctggaggggcagtgttgctgttcatagattttgttccattggcgttgctctgttgaatttaatttcagtcttcctgattcttcccttctgtaaagtgtacattaccaagttccttgtttttttatatatatatataaatatatatatatacaaactgtactctttttgcctttgtacattcaggcaagaagagaaaataaatctttttaagagacaatcacaaatctgtgagggctgctggttatttctcctggagtttgctgctgagctgcctcttccttcctcccaattttcctgttctccctcagctctcctgatcttcctggccctgctccatatgcatcctcagcttcactttccctggctgatggcaagctgttgaatccagtgtccagactacctgccttgtaacccttttctgcccagcattgttttctggcttggccactggcttagcccaggagctttactctgtgccctggcctcccctctcttcacctttagatttccattcaccgaagtggctttggacccctgggtactctgggacctgtttcctggaggccctggcttgggacactcacctgtgaaactatgcagctgggagctctctgcctaagagtttgcactatttaaacctgcctgggagttaggacggatggttttaggaatgaccggaaaactacccctaaaactcccccgacattccagcctctagaatgctctgatccagagctcagtggatgattcccagctggtggactcctgtggctaccccatcagaacaagggctaagggtttatgggtcaagagtatttgatcagaattttaaagggtggtatactctgaaacacagcccaaccaaaccattgtttggccgctttctcttttcctctaccttcctcatccccacttttttccctttctctctacttcctcttcttaattggctttggaattgaaatatatttttaaattatttgttgtatttattgaataaagtttttaatgtccctgttcttaaa

SEQ ID NO: 3909 - DNA, 5138 bp, Homo Sapiens
  NM_015043
gcctcgcgggcctcggcccggtgcgagcggctccgcgatgtggctgagcccggaggaggtgctggtggccaatgcgctgtgggtgacggagcgggccaaccccttcttcgtgctgcagcgacgccggggccacggcaggggcggcggccttacgggtcttctcgtgggcaccctggacgtggtgctggactccagtgcccgcgtggccccttaccgcatcctgcaccagacccaggactcccaggtctactggacagtggcgtgtggttcttcccgcaaagagatcacaaaacactgggaatggctggaaaataacttgctccagacactgtccatcttcgacagtgaggaagatatcaccaccttcgtcaagggcaagatacacggaatcatcgcagaagagaacaagaacctgcagccccagggagacgaggaccccgggaagttcaaggaggctgagctgaagatgcggaagcagtttgggatgcctgagggcgagaagctggtgaattactactcctgcagctactggaagggccgcgtgccccggcagggctggctgtacctgacggtcaaccacctgtgcttctactccttcctgctggggaaggaagtgagcctcgtggtgcagtgggtggacataacgcgtctggagaagaacgccaccctgctcttccccgagagcatccgtgtggacacccgcgaccaggagctcttcttctccatgttcctcaacatcggcgagaccttcaagctcatggagcagttggccaacctggccatgcggcagctgctggacagcgagggcttcctggaggacaaggccctgcctaggcccatccggccacacaggaacatctcagccctgaagcgagacctggacgcccgagccaagaatgagtgctaccgagccacgttccggctgcccagggatgagcggctagacggccacacaagctgcaccctgtggacgccgttcaacaagctgcacatccctggccagatgttcatctccaacaactacatctgcttcgccagcaaggaggaggacgcttgccacctcatcatacccctgagggaggtgaccattgtcgaaaaagctgacagctccagcgtgctgcccagccccctgtccatcagcaccaaaagcaaaatgacattcctgtttgccaacctgaaagaccgtgatttcttggtgcagaggatctctgacttcctccagaaaacaccatccaagcagccaggcagtatcgggagcaggaaagccagtgttgtggaccctagcacagagtcttccccagctcctcaggaggggtcggagcagcccgccagcccagcctctcccctcagcagccgccagagcttctgtgcgcaggaggcgccaaccgcatcccagggcctgctgaagctcttccagaaaaactcgcccatggaggaccttggagccaagggggccaaggagaagatgaaagaggagtcatggcacatccacttcttcgagtacgggcgtggcgtgtgcatgtaccgcacagccaagacgcgggcactggtcctgaagggtatccctgagagcctccggggagagctgtggctcctcttctccggggcctggaatgagatggtgactcaccccgggtactatgctgagctggtggagaagtccaccgggaagtacagcctggccacagaggagatcgagcgagacctgcaccgctccatgcccgagcaccctgccttccagaacgagctggggattgctgccctccggcgggtgctgactgcctatgccttccgaaaccccaccatcggctactgccaggcaatgaacatcgtgacctcggtgctcctgctctatggcagtgaggaggaggccttctggctcctggtggccctgtgcgagcgcatgctgcccgactactacaacaccagggtggtgggagccctggtggaccaaggcatcttcgaagagctcacgagagacttcctgccgcagctctcggagaagatgcaggacctgggggtgatctccagcatctcgctgtcctggttcctgaccctcttcctcagcgtcatgcccttcgagagcgccgtggtcatcgtcgactgctttttctatgagggcatcaaggtgatcctgcaggtggccctggccgtcctggacgccaacatggagcagctgctgggctgcagcgacgagggcgaggccatgaccatgctgggcagatacctggataatgtggtcaacaagcagagtgtctctcctcctatcccgcacctccgtgccttgctgagcagcagcgatgacccccctgcagaggtggacatctttgagctcctgaaagtgtcctatgagaaattcagcagcctgagggccgaagacattgagcagatgcggtttaaacagaggctgaaagtgatccagtccttggaggacacggccaagaggagtgtggtccgagctatacctgtggacattggtttctccattgaagagctggaggacctttacatggtgtttaaggccaagcacctggctagccagtactgggggtgcagccgcacaatggccggccgtcgggaccccagcctgccctacctggagcagtaccggattgatgccagccagttccgggaactctttgccagcctgacaccctgggcctgtggctcccacacacctctgctggcagggcgcatgttcaggctcctggacgaaaacaaggactcgctgatcaacttcaaggagttcgtgacagggatgagcgggatgtaccacggggacctgacagagaagctcaaggtgctctacaagctacaccttcccccagctctgagcccagaggaagccgagtcagccctggaggcggcccattatttcacagaggacagctcctcagaagaagcactaccacaggaagagcaagaaggaagtggaagtgaggagagaggagaggagaaggggaccagctctccggactatcggcactaccttcgaatgtgggccaaggagaaagaggctcagaaggagacgattaaggatcttcccaagatgaaccaggagcagttcattgagctgtgcaagacgctttacaacatgttcagtgaagaccccatggagcaggacctgtaccacgccatcgccaccgtggccagcctcctgctccgcatcggagaggtggggaagaagttctcagcccgcacaggcaggaagcccagggactgtgccactgaggaggacgagccaccagcacccgaactgcatcaggacgcagccagggagcttcagcccccagctgcaggagacccccaagccaaagcaggcggagacacacacctcggaaaagccccacaggagagccaggtggtggtggaggggggcagcggcgagggacagggctcaccctcccagctgctgtctgacgatgaaaccaaagacgacatgtccatgtcctcctactcggtggtcagcacgggctccctgcaatgtgaagaccttgcagacgacacggtgctggtgggcggggaggcctgcagccccacagcgcgcatcggcggcaccgtcgacaccgactggtgcatctcctttgagcagatcctggcctccatcctgacggagtccgtgctggtgaacttctttgagaagagagtggacattggactcaagatcaaggaccaaaagaaagtggagagacagttcagcaccgccagtgaccatgagcagcctggagtttccggctgatgcctgcagctgtgaggcctggcccaaggtgtcatcagtggggctggcctcatctcctcctgcctttcctcccttatcagtttctctttaaaggtgtgcccctcctgctctcccaggagcagtgagttgtgagtggaaagaaggctggtgcagacccagctgccttagacagattccctgggcctgcatctcctggcgccggctgcttctgggcccaggaagaggctgtggctcccaccttccttacacctggtgggagcccgcctcgcaccagctgcacctgcctagcattacaggctctcagatctgcccttgcttgcctcatacctctgtgctccacactgcggccaggccagctgagtccctccatccgtggatgctttcctgcagctatgtggtatgggggtcattcctgcctcttggcaccaggttggggggcatgtgcttgttgggcaccaaagtgatggaaccctcaggtgctctccgggagcctgaacctcctgactgaggaacatgggcagaacatgtttattgcacagagtgggcgctgcgcacaggcgtggctgtacacgtgctctcagctcatcatcctttccagtaactttaaaaaaacatccctcaggtcctgatatatttccttggattcatttcacttggctagaaattacactgtgctcaatgccttaataaatccctgaaagaaataaaaaccactgtgtgcaatgccttgctgtggcccccaaccactgcttaggcctcccaacttctccccaggccaagtatggggccctggctgtgttctggaagttcaagacacttagtcctccacagtgggtggaagagtgcaaggtctgccaggtcagatggagacgcagaacctgctggtgcaagctgggcaggtcctgaccaacctgcatcaggggatgccctgagctccacaggtcttcatgggcaggggttgtgggtcctggtgaaggaagtgcatcctcaggcctgggctgtagcaagctgtctgcccttgggttcaagaaccagactgtggagccaaaggtgaccgcagggggccccagggctggagccacaaggataccctcactttgcatgaggagctgaaactgaccagtgtccagtgttagcccccacatggggctgctcttgcttctactaaaagatacagcagttacccccttatccacaggggatacagtggatatctaaaaccagacccccagtggatgtctaaaaccacagataataacaaaccttatacatactgttttttcctatgcatacatacctgtgattaagtttatgaattaggcaccttaagagattgacaacaataactaataataaaatgtaacggttatactgtaaaaaaaaaaaaaaaaaaaaaaaa

SEQ ID NO: 3910 - DNA, 5973 bp, Homo Sapiens
  NM_015044
gcagtcagcagaggagagcgccaggacgctacagcggctgaagaggcagtggcgcccgcggccgcagcgtcggggctggagcgatggcggcgaccgcggtggcggcggctgtggcgggaaccgagtcggcccagggtcccccgggcccggcagcgtcgctggagctgtggctcaacaaagccacagacccaagcatgtcggaacaggattggtcagctatccagaatttctgtgagcaggtgaacactgaccccaatggccccacacatgcgccctggctactggcccacaagatccagtctccgcaagagaaggaagctctttatgccttaacggtgctggagatgtgcatgaaccactgtggggagaagttccacagcgaggtggccaaatttcgtttcctgaacgaactgatcaaagtgttgtccccaaagtacctggggtcctgggccacaggaaaagttaaaggaagagtcattgaaatactcttcagttggacagtctggtttccggaagacatcaagattcgagacgcttatcagatgctgaagaaacaaggaattataaaacaagaccctaaactaccagtggataaaatcttacccccaccatctccctggcccaagagctccatctttgatgctgatgaagaaaagtccaagcttctgacaaggcttctaaagagcaaccaccccgaggaccttcaggctgcaaaccggttaatcaagaatttggtcaaggaggaacaagaaaaatcggagaaggtgtccaagagggtcagtgcggtggaggaagtgcgaagccatgtgaaggtgctgcaggagatgctgagcatgtaccgcaggccagggcaggccccgcccgaccaggaggccctgcaggtcgtgtatgagaggtgtgaaaagctgcggcccacgctgttccggttggcgagtgacaccactgatgacgatgatgcactcgcggaaattctccaggcaaatgacctcctcacccaaggagttctgctgtacaaacaggtgatggagggccgggtcacctttggaaacagagtgaccagctcattgggagacatccctgtctccagagtctttcagaatccagcaggctgcatgaagacctgccccctgattgacttggaggtggacaatggacctgcgcagatggggactgtggtgccatctttgcttcatcaggacctggcagccttgggaatcagtgatgctcctgttacaggcatggtttctggtcagaattgctgtgaggaaaagaggaatccctcctccagcacgctgccaggcggtggtgttcagaacccttctgcagacaggaatttgctggacctcctctcagcacagccagctccgtgccctctgaattatgtttcgcagaaaagtgtccccaaggaagtgccaccaggtactaagtcctctccaggttggtcctgggaggctggcccgttggctccttccccatcttcacagaatacacctctggctcaagtgtttgtccctttggagtctgttaagcccagcagcctgccgcctctcattgtgtatgaccggaatggattcagaattctgctccacttctcccagacgggagcccctgggcacccagaggtacaggtgctgctcttgaccatgatgagcacggctccccagcctgtctgggatatcatgtttcaagtggctgtgccaaagtcaatgagagtgaagctgcagccggcatccagctccaagcttcctgcattcagtcctttgatgcctccagctgtgatatctcagatgctgctgcttgacaatccacacaaagaacctatccgcttacggtacaagctgacattcaaccaaggtggacagcctttcagcgaagtaggagaagtgaaagacttcccagacctggctgtcttgggcgcagcctaacttttcacaagatggacccttcatttcaagcttaggctggcgttacttttgctgtctagtcaggactaatcacggtgtttcagtgcggagtgccaagagtcctatcctgacgtcaggctctgggtgtcaacctctgacttattctgcagatgctctgtgtgtgtgtgtgtgtgtgtgtgtgtgtgtgtgtgtgtgtgtgtgttcggggagagggtggtagcacagggcttgggatatcggcagtgtgggaaatgcgaagcatttctcatcatcatcatctctgctacagtcatgtttctgcatgtcagcgagcgacactgtccctgcctcaggttggaggttttatcagccaaagtgtttttttcatgtatcgttcgttccattcatccactctgtgccttgtcagcctttgaaaggcttggttgctcccaggctgctgttctcagggaccttaaaagggacctggttagtcttggggcagagagtatctacttgggcactctcttccaagaaagaccttgtctccattttcattagacaatgcttcttgtgtgtgttctggaagatcttctaaatggaatgcttgttgcactgttcccaggcgagtggctgccatgagacctgaggaccacacttgggggaccaatcatgtccttcaccactgtgccttagaatcgcccctggacagagttcctgggcagaggggaaagcagctcccaggccttactcaggcctcaggtccatgggttgggcagccagtctgggcccttctcaggatcctcatctccatcctcatcctcttccttcacagcatttacttggagctctttgtgacacaccatgtcagtcatgatgaatcggccaacagccagcccttgccagctgacgtcacagtctaagatgggaaactgtggtacagatagacatgaagagagcttagcagtgattgaggtggtgactaaatatacagtcattgaataaataccatgtagcaagtgtactttgtggagtgttgagtaagtggaaaatggaaagccagttgcatttagagatgataggcctaaagggaactgtcttctgtcgagaagtaaaggaaacttcatgaaggatgtagaagcttagctgcctcagagaagagagaacctgaagatctgaggcaagctggacaggagaggtggatatttgttgatggaagaattcaagtttataatcaattcccacttagcacctactgtgtgctaggaacttgaatgtgtatgtttgacaagtcctgcttggcctgatgggtgggagaaggaacctgagcctggctgagatggctaggcggagggctttgaagtccaagcagctgaactggctgggtgggtttctacctttgaaactgcaagacttgtttggagctcttaattacaatatctgatatttttacagtctgatcttttgacttctacatatagtggaaatctgccaatactaattggtggagatgggaactgtaaaagatcaagtatgctaattttaagcaaatgtaaaaactcataaaacaggtaaacagtggggtgatttcatttgccataattcacataagacgaattttaatctaaaagtactttcttgcttgtattctgtgtggcttttttttgttttttgaggccatatctcactctgtcactcaggctggagtgcggtggtataatctcagctcactgcaatctctgcctaccaggttcaagcgattctcgtgcctcagcctctcgagtagctgggactacaggcgtgagccagcacgcccagctaatttttgtatttttagtagagacaggatttcaccatgttggccaggctggtctcgaactcctgacctcaggtgatccgcctgccttggcctcccagagtgctgggattacaggcgtgagccaccgcacccggcctctgtgtagcttttataggctctgttactgttgcgtagtcttgaagaggtacccatcataatgacagcatctccctctgaagggttttggtcaaaatgggtgaatgagacttatacataaagacaggctttctcccctatagttaggaggtgaactcacacatgtgtacctgaacattcttgcttttgaggagacagactcccagtggtactactatgcttaggtgttggacaggataggggtaggaggagaggaggcaggctgctgtcctgaaagtggctgtggtttatggcatcactcccttctaatcagcaagtccagtggccacttagagcccagctcctacctcttcattcacttaacaagtagttattggctgtgcacagtggctcacgcctataatcccagcattttgggaggctgagtgggatgaccgcttgagcccaggatttcaagtccagcctgggctacatagtgagaccgtgtctctgtttttttaaaagctagttgttgaccagctaccctgagccaggcaccaccctgaaggagcttcttttcctctggggagaagcaaattcatgatgtgtgtgctggagatctggcactcatggccagtgctttccagtatcttgaactcttcgggggtcctgttgacccatttcgtgacctacctccgtgactgctctttttcctctgtctcttaagtgtgatggttttccagagtccaatcctcaggactttcccgtccacacacaggcctggtagtcaggtggctctaaaccattaggtgggttgtagacctctctcaagctgccacctccttgctgtcgccagatcgtatttcagtctgtcaggggttatctgtatctggaggttccactgttgcttcagtctcagttacttagaatggaacccagagtcctgcccctttccacctacatgctcttacttgaaagcacctgagacttattgggtccctgattcctgcttcgtctgtatccgcagagtagttgcatgtcatttggcctgttttctaaataatcccacatcatgtcctccctgcacttacattgccactgctctgatttgggcttttttttttttgggacaatgcctctgtcccaattctgagtaacagctctggttcttgccactaccagagttctctagcaaatctgagcatctgacagggtgaaaaattctgaatggcttcctgatgcctgactttatgggatcaaattcaagttgcacgctggcactcagtgcccttctggtatcatctgccaagaccagggcctgcttcaccacagccacaataaagtcctttcaagccctgataatgccatgttttgtcctaaccttttgctgcagttaattactcttcctattatcttccatgaacttaagactgggcaaaaatgtttccttatctgtgagccactctgaacacaaacaggtcatgaagatagtgttgaaaacaataaatgacaaccaaaagaaaagtgaatattacctagtacaaatagtgtaaattgagacagaaaatgttaaagctagaaagcaagggcaatattctagaatacaaatagtgcttgcctactacaatattaatcccaaatcctttaaatatacccattatagaagatgcttacccagcgtcaagagtataaaagtgggtttgtttgttttcttgagacagggctttgctctgttgcccaggctggagtgcagtggcgtgattgtagctcaatgcagccttgaattcctgtgttcaggcgatcctccggcttcagcctctggagtagctgggactacaggtgcatgctgccacgcccagctaatgttgcagtttttcgtaaagactggatctctgtgttacccaggctggtctcctgggctcaagcagtcctcctgccttgacctcccaaagtgctgggattacaggcatgagccaccatgtcctgaccccagtttgttttaaagccaagcgatgcaccaagatgtttgtgtgcacatctgacagtggtaatctttgggtcagggaattatagataaattttctttaaattttttctgagctttctaaaatcagctgaaaataaaaccttattttttta

SEQ ID NO: 3911 - DNA, 4253 bp, Homo Sapiens
  NM_015047
ggtgcatgccgggacggcggtgggtggtgcatgcgctcgcatcatggcggctgagtgggcttctcgtttctggctttgggctacgctgctgattcctgcggccgcggtctacgaagaccaagtgggcaagtttgattggagacagcaatatgttgggaaggtcaagtttgcctccttggaattttcccctggatccaagaagttggttgtagccacagagaagaatgtgattgcagcattaaattcccgaactggggagatcttgtggcgccatgttgacaagggcacggcagaaggggctgtggatgccatgctgctgcacggacaggatgtgatcactgtgtccaatggaggccgaatcatgcgttcctgggagactaacatcgggggcctgaactgggagataaccctggacagtggcagtttccaggcacttgggctggttggcctgcaggagtctgtaaggtacatcgcagtcctgaagaagactacacttgccctccatcacctctccagtgggcacctcaagtgggtggaacatctcccagaaagtgacagcatccactaccagatggtgtattcttacggctctggggtggtgtgggccctcggagttgttcccttcagccatgtgaacattgtcaagtttaatgtggaagatggagagattgttcagcaggttagggtttcaactccgtggctgcagcacctgtctggagcctgtggtgtggtggatgaggctgtcctggtgtgtcctgacccgagctcacgttccctccaaactttggctctggagacggaatgggagttgagacagatcccactgcagtctctcgacttagaatttggaagtggattccaaccccgggtcctgcctacccagcccaacccagtggacgcttcccgggcccagttcttcctgcacttgtccccaagccactatgctctgctgcagtaccattatggaacgctgagtttgcttaaaaacttcccacagactgccctagtgagctttgccaccactggggagaagacggtggctgcagtcatggcctgtcggaatgaagtgcagaaaagtagcagttctgaagatgggtcaatggggagcttttcggagaagtctagttcaaaggactctctggcttgcttcaatcagacctacaccattaacctatacctcgtggagacaggtcggcggctgctggacaccacgataacatttagcctggaacagagcggcactcggcctgagcggctgtatatccaggtgttcttgaagaaggatgactcagtgggctaccgggctttggtgcagacagaggatcatctgctacttttcctgcagcagttggcagggaaggtggtgctgtggagccgtgaggagtccctggcagaagtggtgtgcctagagatggtggacctccccctgactggggcacaggccgagctggaaggagaatttggcaaaaaggcagatggcttgctggggatgttcctgaaacgcctctcgtctcagcttatcctgctgcaagcatggacttcccacctctggaaaatgttttatgatgctcggaagccccggagtcagattaagaatgagatcaacattgacaccctggccagagatgaattcaacctccagaagatgatggtgatggtaacagcctcaggcaagctttttggcattgagagcagctctggcaccatcctgtggaaacagtatctacccaatgtcaagccagactcctcctttaaactgatggtccagagaactactgctcatttcccccatcccccacagtgcaccctgctggtgaaggacaaggagtcgggaatgagttctctgtatgtcttcaatcccatttttgggaagtggagtcaggtagctcccccagtgctgaagcgccccatcttgcagtccttgcttctcccagtcatggatcaagactacgccaaggtgttgctgttgatagatgatgaatacaaggtcacagcttttccagccactcggaatgtcttgcgacagctacatgagcttgccccttccatcttcttctatttggtggatgcagagcagggacggctgtgtggatatcggcttcgaaaggatctcaccactgagctgagttgggagctgaccattcccccagaagtacagcggatcgtcaaggtgaaggggaaacgcagcagtgagcacgttcattcccagggccgtgtgatgggggaccgcagtgtgctctacaagagcctgaaccccaacctgctggccgtggtgacagagagcacagacgcgcaccatgagcgcacctttattggcatcttcctcattgatggcgtcactgggcgtatcattcactcctctgtgcagaagaaagccaaaggccctgtccatatcgtgcattcagagaactgggtggtgtaccagtactggaacaccaaggctcggcgcaacgagtttaccgtactggagctctatgagggcactgagcaatacaacgccaccgccttcagctccctggaccgcccccagctgccccaggtcctccagcagtcctatatcttcccgtcctccatcagtgccatggaggccaccatcaccgaacggggcatcaccagccgacacctgctgattggactaccttctggagcaattctttcccttcctaaggctttgctggatccccgccgccccgagatcccaacagaacaaagcagagaggagaacttaatcccgtattctccagatgtacagatacacgcagagcgattcatcaactataaccagacagtttctcgaatgcgaggtatctacacagctccctcgggtctggagtccacttgtttggttgtggcctatggtttggacatttaccaaactcgagtctacccatccaagcagtttgacgttctgaaggatgactatgactacgtgttaatcagcagcgtcctctttggcctggtttttgccaccatgatcactaagagactggcacaggtgaagctcctgaatcgggcctggcgataaagaacaaagactgtgcctaaaagtggagagccaggggagtgtgggtcagataagcagctacagctgcagtttggtggattggtggagtatgtgtgtgtgtcagtgctcagctaagaactgtagggaagatggatgaccttcacgcagaactccttttgggatatacatgatgcagaaaggatcctacatggagagagacagaactctctcagctgacactctcagagattcctgatgggctttctcttgaagtccaaaggcgtctgcattgtttcctttctttgcccatccatgaatgttctgttttgttttttttaataagaattccggctgatttttgtgaggcctgtttaaattgactttactttgccttttgtgtttctcaattttatctagaaatctttctgactttttccatctcttgcttcaaagtaagaggggaactctccttgccgactccaccttataggtacatttggtgttttgcactgggaagaaataggatccatccttagctgaggcttgaggactgatccagcctctcatggcttccctccaaagtaacttagggttgagggatctatatgtgatgtcaaaacttactttaaacctctagtttcgtgctgtcatttattaggctgggccaccaaatctttgtttcaatttatcagaagccaagtgcatactagcgtcttgtttgttgcccattgcctatacttttcacctgagatgtgtgagttggggccttttaaaaactactgaattgtctgagccttgaagacatttccagggagaagagataatctctcatttcacccacaggctggtctaatcataacctagttaaagatgtccttgtttaagaaccccattatttatttttagtttttaatataaattaacatgtgggtcattatatttctccttaaatgaggaaattttaaattttattgatctaacctttgaagctttaaaaaaggagaaagagggtaggggtgggaaactggcatactgtgtgtatagcactgccgattggctaggccactgtgtctctgctacaaattaaagaaatcctaaaagttttccttggtcatagagttggggaatgacagaatttttctttgttgtgaaatgtatgtacagagtagaccatctctagccctgtggtgaaagaggtacactcgaatgtttgcataaagcaagtgacaaatgaaaaaaaaaaaaaaaa

SEQ ID NO: 3912 - DNA, 4862 bp, Homo Sapiens
  NM_015051
aggacccggaagtgagggtgtgagaggcctctctggaagttgtcccgggtgttcgccgctggagcccgggtcgagaggacgaggtgccgctgcctggagaatcctccgctgccgtcggctcccggagcccagccctttcctaacccaacccaacctagcccagtcccagccgccagcgcctgtccctgtcacggaccccagcgttaccatgcatcctgccgtcttcctatccttacccgacctcagatgctcccttctgctcctggtaacttgggtttttactcctgtaacaactgaaataacaagtcttgatacagagaatatagatgaaattttaaacaatgctgatgttgctttagtaaatttttatgctgactggtgtcgtttcagtcagatgttgcatccaatttttgaggaagcttccgatgtcattaaggaagaatttccaaatgaaaatcaagtagtgtttgccagagttgattgtgatcagcactctgacatagcccagagatacaggataagcaaatacccaaccctcaaattgtttcgtaatgggatgatgatgaagagagaatacaggggtcagcgatcagtgaaagcattggcagattacatcaggcaacaaaaaagtgaccccattcaagaaattcgggacttagcagaaatcaccactcttgatcgcagcaaaagaaatatcattggatattttgagcaaaaggactcggacaactatagagtttttgaacgagtagcgaatattttgcatgatgactgtgcctttctttctgcatttggggatgtttcaaaaccggaaagatatagtggcgacaacataatctacaaaccaccagggcattctgctccggatatggtgtacttgggagctatgacaaattttgatgtgacttacaattggattcaagataaatgtgttcctcttgtccgagaaataacatttgaaaatggagaggaattgacagaagaaggactgccttttctcatactctttcacatgaaagaagatacagaaagtttagaaatattccagaatgaagtagctcggcaattaataagtgaaaaaggtacaataaactttttacatgccgattgtgacaaatttagacatcctcttctgcacatacagaaaactccagcagattgtcctgtaatcgctattgacagctttaggcatatgtatgtgtttggagacttcaaagatgtattaattcctggaaaactcaagcaattcgtatttgacttacattctggaaaactgcacagagaattccatcatggacctgacccaactgatacagccccaggagagcaagcccaagatgtagcaagcagtccacctgagagctccttccagaaactagcacccagtgaatataggtatactctattgagggatcgagatgagctttaaaaacttgaaaaacagtttgtaagcctttcaacagcagcatcaacctacgtggtggaaatagtaaacctatattttcataattctatgtgtatttttattttgaataaacagaaagaaattttgggtttttaatttttttctccccgactcaaaatgcattgtcatttaatatagtagcctcttaaaaaaaaaaaacctgctaggatttaaaaataaaaatcagaggcctatctccactttaaatctgtcctgtaaaagttttataaatcaaatgaaaggtgacattgccagaaacttaccattaacttgcactactagggtagggaggacttagggatgtttcctgtgtcgtatgtgcttttctttctttcatatgatcaattctgttggtattttcagtatctcatttctcaaagctaaagagatatacattctggatacttgggaggggaataaattaaagttttcacactgtgtactgtgttttactgattggttggatattgcttatgaaaattccatagtggtatttttttggattcttaatgtgtaacttaaacatactttgaagtggaggagagtcataagacagaacatttggcaggaattgtccttatgaaacaagaaaaagaaaatgaaaagtattattaagcttctgtgtttgtctaaaaatgtggcatatggatggcatttaaaactttgaatgaattatacctaaatctgggacagggaggtgacagtggaacaggctaccaatcagaactagatgacttttaaggctcctcctattatgagacttcaatttccaaagagaagaactagcagagaaattgtatttcagtaattttaagctccttctgtcttgtagagtcttgttatagttgtataaatcaaaaacacagaataaggaacatatttaactttttttcattataaaatggttagaggaccctaccccctctagattccctgatttccccaggcctgcagcatacagtaagatgggtccctgtgccaggcctcaatactgccagggaataaaaccagagggagaggaccctcagtgtcatatcaggaagcccagtgccagaggacagacaggttcaaaactggcttttcctctgggcctgggttggtgctataggccaagggtcattttatacttgggtataaatcaatcccagtttgggaaaagattatttttaagcttaaaaggctgacatgtgccattatatgtagtatgtaatatatgtaacatcttccaattcttttaaaataaaattaatatttataatggatatttaatgattgttatttttaaaaaccagcttataattcctcgttatgcatgatttatccaaagtttccatagttttattcaaaataataaatgttaataaggtgataaggggtatatttaatgtattgtatcaaattgtgaataagaaagtaggatggagctttctagaggttgggccttagttctgttatcctcattgcttttaaccaataagttaaatgaagttagagttatggtcttcaggttagattatggaccagatctgtgagggtcagcatggaaattcacattcaacaaggtagcacacaggaccaagagcagcacatgcaatcaactggaataatatagtaatcctgtaactgggtttgaaaaaataatcaacaaaagatacaattcaagggttaggttgcagagagctggcttgagagtagttattatgaaaaaggcctcaaggagtacgtgttcagtatgctctaagatgataaagtggctgttaaaaagggagttgatttgaggaagtattacttagcattcatgcatattgggcttaggctctagccctgccactatcattgtcttctctggactgtgaagtcactgaggacaaggaaactaaatttaatgtctgtatcactagtgcctagaatttctggacacttagtagtcaccatcaggcgtttatttaatgaatgagaagcaaagtgaccttggttacttttttaccctgaggggctcagcactcattaggacttggtgcctaattttataaaaagtcactaagctcaagtgcttggatgaaaggacagcgtggataaaaaggtttttaaaacatggatgttaaggctgttttgcttggagaagacttgggactgggacagtctttagatattatttgaaatgctggcactgtctatctggatcccagggcttgaactaggatttgaggaagtcacagggaagcagatttcagtctgacatttattcagtgcaagttttttggtgctgtagtatatgatgaaagatgtaaagctgaataaagcattatttctgccctagagttgttcacagcctagtcaggcatatggatatgtaaacaatgactgtaacgtgttatagatgtaaagacaaaataaaggttaaagagggcataaaggagcactcaattgcagagatttgaggacattatttttattttgagctttaaaaagatgaataggtgttctcaggaggtagggatctggctgagagggaataatctgagcaaaggtatgaaacagcctaatgcattagagaaaaaagttcttttagtaaggcatttggggttggggaagctagaaaaagaaatgggagctggtcacacagggccttgtgtgccagactaaggggtttgtagtatatattgtaggcagaagagatccatcaacagattgcaagcaaggaagtatgttcactttaaagtttgagaaagaatagtgtggaagcacgtctcaaatttagacttgttccccctctgaaccgtgaatcagaccatttcaggtagaagtcttccccggtttatctgatctactcggggcctcaggcttctcagctgggaagagaggatgcaagaccagactgaagaacacggttgagtccccagaaccaaaagggggcctttctgcttcttagccagctacctcttcgagtttttcaaattgtgagggggaccataaaaggatggaaacttttagatgacattctacaaattatttttttctttaaattaaaagaacctagccaataagatagagaatgggcatctaaggcatctcagagctctctgatgaagccaggttgtcaaagatcatttgcaaaagaagggaaaactggcatgacaaaagctacagagaggagagtgaaatatagaagtgtttgaaatgttcaagctcacaataagcttaaatttatagaaaatgctaaggttgtcaagaaggcttttttttttttcttttttaaacctgagggcaaaaaggaatggataaagtagtgtaatggattgacaatcaggaagaacagaataactcagttttttttctcctacaaggagatatggctggaccaaaataaaatgacatgaaattgcaaaaatgaaaa

SEQ ID NO: 3913 - DNA, 5195 bp, Homo Sapiens
  NM_015054
ggtgatgctgcagccaagatggcgcccgcggcggccgtggcggcctgagcgtgatgctccgggttctcggcggcggctgtggccttggccggggccttgggtctctcccggtcgtgagcgatcagcgcctctccgccggccgggctagccgggacagagaggagacggccacgaagagaggaggcagtgagcaacaggacgagaccgcggcgtctccagcctcggtaccatggccgggatcatcaagaaacaaatcttgaagcacctctccagatttaccaaaaatttatctcctgacaagataaatctaagtacccttaaaggagaaggtgaactgaagaatttggagttggatgaagaagtactccagaatatgttggatttgccaacatggcttgctatcaacaaagttttttgtaataaagcgtccattaggatcccatggacaaaactgaaaacacatcccatctgtttgtccctggataaagtaataatggaaatgagtacatgtgaagaaccaagaagccctaatggcccatcaccaattgcaactgcttcaggacaaagtgaatacggctttgctgaaaaagtagttgagggaatttctgtttctgtaaattctatagtcatcagaattggagcaaaagccttcaatgcatcatttgaactttctcagcttcggatctatagtgtaaatgcacactgggaacatggagatttgagatttactcgtattcaggatccacagagaggagaggttttgacttttaaagaaataaattggcagatgataagaatagaggcagatgccacccaaagttcacatcttgaaattatgtgtgctcctgttcgattaataaccaaccaatcaaaaatcagagtcacacttaaaagaaggttaaaggactgcaatgtcatagcaacaaagttagttctaatattggatgacttattatgggttttgactgattcccagttgaaagctatggtacaatatgcaaagtctcttagtgaagcaatagaaaaatcaacagaacaaaggaagagtatggctcctgaacctacacagagctctacagtagtcgcatctgcccagcaagtgaagacaacgcaaacttcaaatgctcctgatgtaaatgatgcaattgtgaaactattcaatgattttgatgttaaggaaacctcccatcatttagtgatttctcatctagatctacacatatgtgatgacattcatgctaaagaaaaagagtcaaacagacgtattactggaggggcaatgcaactctcttttacacagctaactatagattattatccttatcataaagcaggagatagttgtaatcattggatgtattttagtgatgcaaccaaaacaaaaaatggatgggccaatgagttattgcatgaatttgagtgcaacgttgaaatgcttaaacaggctgtgaaggatcataatgtaggttcacctcctaaatccccaacacatgcctctccccagcacacacaaacagagaaggactaccctctgaaagggacatgcagaacaccttcagtattatctcaacaatcaaaagctaagctaatgtctagttctgttgtggttagacttgcagatttcaatatataccaggtctctacagcggaacaatgtcgttcttcccccaaaagcatgatttgctgcaataaaaaatccctatatcttccacaagaaatgtcagctgtctatatagaattcacagaatattactatccagatggaaaggattttccaattccatctcccaacctctatagccagctgaatgcactacagtttactgtggatgaaagaagcattctatggttaaatcaatttctgttggatttaaaacagagtcttaatcagttcatggctgtgtacaagttgaatgacaattcaaaatctgacgagcatgttgatgttcgagttgatggcttaatgctaaagtttgtcattccttctgaagtgaaatctgaatgtcatcaagatcagccacgtgcaatttctattcagagttctgaaatgattgccacaaatacaaggcactgtccaaactgtcgacattctgacctagaagctttgtttcaagactttaaagattgtgatttttttagtaaaacatataccagcttccccaaatcttgtgacaattttaatcttctacatccaattttccagagacatgctcatgaacaagataccaaaatgcatgaaatttataaaggaaatattactccccaattgaataaaaacactcttaaaacttctgctgccacggatgtttgggctgtgtacttttctcaattttggatagattatgaagggatgaaaagtggaaaaggacggccaataagttttgtagactcattccctctttccatttggatttgtcaaccaacaagatatgcagagtcacaaaaagagccgcagacttgtaatcaggtatctctaaatacatcacaaagtgaatctagtgatctggctggccgattgaagcggaagaagctcttgaaggagtattatagtacagagtctgagcctttgacaaatggtggtcagaagccttcttcatcagatacatttttcagattttccccttcctcgtcagaggcagatattcatctcctagttcatgttcataaacatgtcagtatgcagattaatcactaccagtatctgcttctacttttcctgcatgagtcacttatcctgctttcagagaacttaaggaaagatgtagaagctgtaactggcagtcctgctagtcagacatccatttgtattggaattttacttagaagtgcagaactggctcttttgctccatccagtggatcaagcaaatactcttaagtctcctgtttctgaaagtgtgagcccagtggtacctgattatttgcctacagaaaatggggattttttgtcttcaaaaagaaaacaaattagtagggatataaatagaattagaagtgtaactgttaatcatatgtcagacaacagatctatgagtgttgaccttagccatatccctttaaaggatcctttgctttttaaatcagctagtgatacaaatctgcaaaaaggcatttcttttatggactatttatcagataaacatttagggaaaataagtgaagatgaaagtagtggacttgtttacaaaagtggctcaggagaaattggatcagaaacaagtgacaaaaaggattcattttatacagattcaagtagtatcttaaactacagagaagattcgaatatactttcatttgatagtgatggtaatcaaaacatactttcaagtactttaactagtaaaggaaatgaaaccatagagtccatctttaaagctgaagatttgcttccagaagcagcttcactctctgaaaacctggatatcagtaaagaagagacccccccagttagaacacttaaatcacagtcatctttaagtggaaagcctaaggaacgttgcccacccaacctggctcctctctgtgtttcttataagaatatgaaaagaagctcttcacaaatgtcattggataccatttcacttgacagcatgatattggaagaacagttattagaaagtgatggaagtgatagccatatgtttttggaaaaaggaaataaaaagaactcaactacaaattacaggggcacagcagaaagtgtgaatgctggtgcaaacctacagaattatggtgaaacttctccagatgccatcagtacaaattcagagggtgctcaggaaaatcatgatgacctgatgtccgttgtggtatttaaaattactggtgttaatggggaaattgacatccgaggggaagatacagaaatctgtcttcaagtgaaccaggtgacaccagaccaattaggcaatatcagccttcggcattacctttgtaatcgtccagttggttccgatcagaaagctgtaattcattccaaatcctctcctgagatttctctgagatttgaaagtgggcctggtgctgtaatacactctttacttgcagaaaaaaatggatttctgcagtgccacatagaaaacttcagcactgagtttcttacatcttctcttatgaatattcaacattttttggaagatgaaactgttgcaacagtaatgccaatgaagatacaagtttctaacacgaaaataaatttaaaagatgatagtccccggagtagtacagtatcccttgaaccagctcctgtaactgtacatattgatcatcttgtggtagagagaagtgacgatggctcttttcatatcagagattctcacatgcttaacactggaaatgatttgaaagaaaatgtcaaaagcgattcagtgctgctgaccagtggaaagtatgatctgaagaaacaacgcagtgtcacgcaagccactcagacaagcccaggggttccttggccttctcagtcagctaactttcctgagttctcctttgacttcactagggaacagctcatggaagagaatgaatctcttaaacaggaactggctaaagctaaaatggctcttgcagaggctcacttggaaaaagatgctcttcttcatcatataaagaagatgacagttgaatagcaggagtggcagtcaaaactgaaattatagctctggagtaggaaggttatatttataatgtggatgttaccagttaggggaagacttttattttcatgaaaagacaataaaacaaaatggaatgtgatgaagtggtgactatttcaaagccagtttagaaagtattagtacgggcattacaatcttttggttgttttgtgttttggggcttaaccctcttttaagctgttgtgatctagggaagtcaacacatagtgtaaaataattacatgcctaatgaaaagaagatgtcatttcctaattttgatatctcattttcggcattttttaaaatgtaaaaggaaaacctcttgtgttcacacagattgctgaattgatttctccatatttgttaataatttactattatttacaaagattcaaatgcttttatgactaatgtaaaatgaaaagaggcttacattttaaatgttattaaaattatgtacttaaatctataattatttaattattgtaaaaagtccaagcagatcaataaactatataattaaaaaaaaaaaaaaaaaaaaaa

SEQ ID NO: 3914 - DNA, 5087 bp, Homo Sapiens
  NM_015056
cgccgccttctgtgcagtcgcggcccgggcggacggtggctggctgctccgcagcgctcggctggctgcagcggcaccgcgggttgcgcggccggggatgctccagcgggcgcgatggcccccgccatgcagccggccgagatccaatttgcccagcggctggcgtccagcgagaagggcatccgggaccgagcggtgaagaagctgcgccagtacatcagcgtgaagacgcagagggagacaggaggtttcagtcaggaagaacttctgaaaatctggaaggggctcttctactgcatgtgggtgcaggatgaaccccttctacaggaagagctcgccaacaccattgcacagctagtccatgctgttaacaactcagcggctcaacacctgttcattcagaccttttggcaaaccatgaatcgagaatggaaaggaatagacaggctacgcctggacaaatactatatgctgattcgtctggtcctgaggcagtcctttgaagtcttgaagcgaaatggctgggaagaaagccgaatcaaggttttcttggatgtcctgatgaaggaggtcctgtgtcctgagagtcagtctcctaatggagtgagattccacttcattgatatttacctggatgaactctccaaagtcggggggaaggagcttttagcagatcagaatctcaagtttatcgatccattctgcaaaattgctgcgaagacgaaggaccacaccctggtacagaccatagctcggggtgtcttcgaagctatcgtagatcagtctccttttgtgcctgaagagacgatggaggaacagaagacaaaagtgggtgatggtgacctctctgctgaggagatacctgaaaatgaggtatccttgagaagagctgtcagtaaaaagaagacagcactgggcaaaaaccattccagaaaagatggactcagtgatgaaagaggaagagatgactgtggaacctttgaggacacagggccccttctccagtttgactataaggctgttgctgatcgactcctggaaatgaccagcaggaagaacacgccccacttcaacaggaagcgcctctccaaactcatcaagaaattccaagacctttctgaaggaagcagtatatctcaactcagttttgcggaggacatttctgctgatgaagatgaccaaatcctcagtcaaggaaagcataagaagaaaggaaataaacttttagagaaaactaacttggaaaaggagaaaggaagcagagtcttttgtgtagaggaagaggacagtgaaagcagtcttcaaaagagaagaaggaagaagaagaagaagcaccacctgcagcctgaaaatccaggcccagggggtgcagccccatccctggaacagaaccggggcagggagcccgaggcctctgggctgaaagccctgaaggcacgtgtggccgagccaggtgcagaggccacgtccagcactggggaggagagtggctccgagcatcctccagccgtccccatgcacaataaaaggaaacggccacggaagaagagcccgagggcccacagggaaatgttggaatcagcagtgttgcccccagaggacatgtctcagagtggcccgagtggcagtcatcctcagggacctagagggtccccgacaggtggagcccaactcctaaaaaggaagcggaaacttggagttgtgcccgtcaatggcagtggcctgtccacgccggcctggcctccattgcagcaggaaggccctcccacaggccccgcagagggggcgaacagccacaccacgctgccccagcgcaggaggctgcagaaaaagaaggcagggcccggcagcctggagctctgtggcctgcccagccagaaaacagcaagtttgaaaaagaggaagaaaatgagagtgatgtcaaacttggtggagcacaacggggtgctggagtccgaagctgggcaaccccaggctctgggaagcagtgggacttgcagttccctgaagaagcagaagctgagggcagagagcgactttgtgaagtttgacacccccttcttaccaaagcccctgttcttcagaagagccaagagcagcactgccacccaccctccaggccctgccgtccagctaaacaagacaccatccagctccaagaaagtcacctttgggctgaacagaaacatgactgccgaattcaagaagacagacaagagtatcttggtcagtcccacgggcccttctcgagtggccttcgaccctgaacagaagcccctccacggggtgctgaagacccccaccagctcacctgccagctcacccctggtggccaagaagcccctgaccaccacaccaaggagaaggcccagggctatggatttcttctgaggagcagcagagtcccttgtaaaagactgcttttgtacagaatgcgctataaattatacctttaagaatgtggggccttttttatgattttgtaagttcccataagttgtgtgcacgaggttctgagagtgcccgcaggctgctgcgtcctggcccctctgtagtggctgcgggcgtcttggttgaatcttttgctacaaaccatgtttgcgtttgagctctccaggattttacatttttgggtaacctcagtgattcccattggtgtaggaaatgagaccctctctgaagctgaggagagcacgttgatctgaactttaaatcaatcagtgctgctggcacaatgaaaggtggaactgcacttctgttgagctctcagttctgcggaatttggtactcattaccgtattcgccgtactaagttggtttctgttagtcttaacagtctgttttcttttaaaagcatgtagggcttcattgccatgttctgtgggtgtttggcaggttaccgatggggaagattcttgtcacagaatcagcaataccatagtttttctacatgtgctcagctgggggtgtggacaggtaggggtggggaaagaagaggctctgcgttctgggggctttttcttctcctccccctacccggtttccctccctgttttcctacctctacggcaagcccaaagtgtcttcccgggagcccagcgcagcccccggctcttacccaggaccccgccccgtgctgagccttctgctgaggtccttgcgtggagcacactcattcctccaagcccttgcgctcccgtttctctctctctccgtccacgttccagccgagtcactgcctgaccggctccatggcagctccccatcttccctagaggctgcctgcgcatctggagcctgcgctccggctcagcgacctttcctctcaaatgcggaagcgtgcacttacagttcagaccgttctcctgtaagttcattacaaacacgggcggaaggcactcaggctttcgttggagaaacagaaataaggccttcttttgagcagcgattgctggatcattgatctgtttgaggaagtgtctgacctgggcctgagagctggagaaggtgcagattcaaagtgagcggctcctgaggagagccgccaaggctgctcgccttctccgtggcttccgcagctaccgtctgcacggtgagagggcacgggcacacggttcgggctggcgtgcagctctcccagccagccacgctctgctcaggcctggaagtgaaagccgcctccttcccgttatgccccccatacaggagcctcggtttttcagcaaaacgcggccagtccccttctccactgctgcctcccagcagagggccccaggatctccaaggtcccagctatggctttggacaacgtggcttcggcccctggggttgcagagcttgcattgggtttacctcggtctcattcattcatggagccaagggtggggtttcacctgcgaacatcagactgacttgctggcgtcaagagcagttgactcactgatgaaggccctggtgaggagaaagcactctgttcttcgcctactctgtaatcgttttgtcataatgagccatgaaaaaagtaatgaacttgtgctgttaatcgtcactgtaatgagaagtcttacgtacaacatagctgtggtggcttaatggctgcattagataggatcctcacatcccattcagaaccaaaactgatacagtgaaacaattaaggtgagcaaatagttttaacttttcttttttttttttaagtttcattcttcctagaatatttttctaacaatttttatttcagctttaaagatgggtcatatagccaaacgggccatataatccaacattgttgagatgtcttaggacatctaaggcaaaactggcacatttgttctgcagactattgcaggaatgttttttcctagcatttctatattatctgtccattctgaggaaccagtgaatgtcctataaatgcacctcctgtcaaaaccatgcctgagaggtcccggctgggagtgacagggtgcttcttagattctattggtccttctctcattctccgaacttactcctttttatgggtaagtcaactaggtttacagtcccttatttttaatgcctaagttttgacagcaggaagaaaacaattttttaaaaattctcattacatagacgcacaagaatatgtcacataaagaaaatgtgtttagaatactggttttctatttacgcatgatattttcctaagtaaaattgccaagtggacttggaagtccagaaaggaaaataatttaaattaatgctggtgatcttaacaatattttgtaaaatgatgcttcccccttctccatggtctagtcaattttgtacaattaggtatctgactttacaagtttgttatcctttctaatttttactgaactgaaagcacaaagaagactacacagaaaatctggaaacagttgcaggtgttgggaggaagatgaaatcgagctgtcttttaacttttgtatgtgttttatcagaatttgctggactatgctggcaaggactttgtttacgatcaaattgtactagtgtctgcagggtttgtcagtactcgtcaaagccaagtccaattaaaaaaaaaagtctttgccctccaa

SEQ ID NO: 3915 - DNA, 15025 bp, Homo Sapiens
  NM_015057
cggcggcagtggcggcaccgcctcctcctcacattcccggggtggcggggttagatgagcggccccagtagcggcgagggcggcgcgggggggaggaggagaagaaggaggaggagaaggaggtcgctgtctttgtagtctccctgctgcgggagccagaggccgccgccggagccgtcgtcgttggaaaagggctgtgtgtgcgcgcgcgtgtctgcccgcccggcccgcggggacgaggcggcggcggcggcggcggcggcgaggatgatgatgtgcgcagcgactgcctcccccgccgccgcctcctcggggctcggcggggacggattctacccagccgccaccttctcttcctccccggcgccgggggcgctgttcatgccggttcccgacggctccgtggctgctgcggggctggggctggggctacccgccgcggactcccggggtcactaccagctgctgctgtcaggccgggccctggccgaccgctaccggaggatttataccgctgcgctcaatgacagggaccaggggggcggcagcgctggacacccagcctccaggaataagaaaattttaaataagaagaaattgaaaagaaaacagaagagcaaatcaaaagtgaagacaagaagcaagtctgaaaacttagagaatacagtaatcataccagatatcaaactacatagcaatccttctgctttcaatatttactgtaatgtacgccattgcgttctggaatggcagaaaaaggaaatatcattggcagccgcatctaagaactctgtgcagagtggagaatcagatagtgatgaagaagaggaatccaaagagccccctatcaagcttccaaagattattgaggttggcctttgtgaagtttttgaattgatcaaagagacacgattttctcatccatccctgtgtctcaggagtctccaagccctgctcaacgtgctgcagggccagcagccagaaggcctccagtctgagccacctgaggtcctagagtctctcttccagcttcttttggaaatcaccgttcgaagtactgggatgaatgacagcacaggacagtccttaacagcactttcctgtgcttgcctctttagtctggtggcttcttggggagaaacaggaaggacacttcaggccatctctgctatcctcaccaacaatggaagccatgcttgccaaactattcaggtgccaacaattctaaattcgctacagagaagtgtacaagcagttttggtgggaaaaattcaaattcaggactggtttagtaatggcattaagaaagcagctttaatgcacaagtggccattaaaagaaatatctgttgatgaagatgaccaatgtctacttcagaatgatggattttttctttatctattatgcaaggatggattatataaaataggctctggatacagtggaacagttaggggccatatatacaattctacatcccgtattagaaacagaaaagaaaaaaagtcttggttagggtatgctcagggttatttattatatagagatgtgaataaccacagcatgacagccataaggataagccctgaaacactggagcaagatggtactgtgatgttaccagattgccacactgaaggtcaaaatattttattcactgatggagaatatattaatcagatagctgcttcaagagatgatggctttgttgtcagaatatttgccacaagcactgaacctgttctacagcaagaattgcaacttaaactggctagaaaatgcttacatgcctgtggtatctcactattcgatctggaaaaggacttgcatattataagtacaggatttgatgaggagtcagcaattcttggtgcaggacgagagtttgcgctaatgaaaacagcaaatggaaagatatattacactggcaaataccagagtcttggaatcaaacaaggtggtccttcagcaggaaaatgggttgagctaccaattacaaaatctccaaagatagtacacttctcagttggacacgatggctctcacgcccttttagttgcagaagatgggagcatattctttacaggatctgctagtaaaggagaagatggagaatcaactaagagcagacggcaatccaaaccttataaacctaaaaagataattaagatggaaggaaagattgtggtatatacagcctgcaataatggaagtagttctgttatttctaaagatggagaactctacatgtttggaaaagatgccatttactctgatagttcaagtttggtaactgatttgaagggccattttgtaactcaggtagctatgggcaaagctcacacttgtgttttaatgaagaatggagaggtgtggacatttggtgtaaataataaaggacagtgtggacgagatactggtgccatgaaccaaggtgggaaagggtttggagttgaaaatatggcaacagcaatggatgaagacctggaagaagaactagatgaaaaagatgagaagtctatgatgtgccctccaggcatgcacaaatggaagctggagcagtgcatggtttgcactgtctgtggagactgtacaggttatggagccagctgtgtcagtagtggacggccagacagagtccccggagggatctgtggttgtggttccggagaatctggttgtgctgtgtgtggatgttgcaaggcctgtgcaagagagttagatggtcaagaggcaagacaaagaggaattcttgatgcagtgaaagaaatgatacctttagatcttcttttagctgtcccagtgcccggggttaacattgaagaacaccttcagttacgacaagaagaaaaacggcaacgtgtaatcagaaggcacagattagaggaaggaagaggcccccttgtatttgctggtcctatttttatgaaccatcgagaacaggctctagccagactcagatcccatccagcacagctaaagcataaacgggacaagcacaaagatggaagtggagaaagaggcgaaaaggatgcaagcaaaatcacaacataccctccaggctctgtgcgatttgactgtgagctccgggcagtccaagtcagctgtggatttcaccattcagtggttttaatggaaaatggagatgtctatacatttggttatgggcagcatgggcagctaggacatggagatgtcaactccaggggatgtcccactcttgttcaagcattgccaggccctagcacacaagtcactgcaggcagcaaccatacggcagtacttttaatggatggacaggtcttcacatttggaagtttttctaaaggacaactgggcagaccaattttggatgtgccatattggaatgcaaagccagctcccatgcctaacattggatcaaaatatggaagaaaagctacttggataggtgcaagtggggaccaaacttttttacgaattgatgaagcacttattaattctcatgtacttgctacatcagaaatttttgccagtaaacacataataggcttggtacctgcttctatatcagaacctcctccatttaaatgccttctgataaataaagtggatgggagttgtaaaacttttaatgactcagaacaagaggatctgcaaggatttggtgtgtgtcttgatcctgtatatgatgtaatttggaggtttcgaccaaatactagagagctgtggtgttacaatgcggtggttgctgatgccaggcttccctctgcagcagacatgcagtccagatgtagtatcctaagtcctgaacttgccttaccaacaggatcaagggccctcactacccgatctcatgcagctttgcacattttaggttgtcttgataccttggcagctatgcaggacttaaaaatgggtgttgcaagtacagaggaagagactcaagcagtaatgaaggtttattctaaagaagattatagtgtggtaaacaggtttgaaagtcatggaggaggctggggttattctgcccattcagtagaagctatacgtttcagtgccgacactgatattttacttggtggtcttggtctgtttggaggtagaggagaatatactgctaaaattaagctgtttgaattgggtcctgatggaggagatcatgaaactgatggtgaccttcttgcagagactgatgtattggcttatgactgtgctgctagagaaaaatatgcaatgatgtttgatgagcctgttctcctgcaagctgggtggtggtatgtggcatgggcccgagtgtcaggacccagcagtgactgtggatctcatggacaggcatctattaccacagatgatggggttgttttccagttcaagagttcaaagaaatcaaataatggtacagatgttaatgcgggtcagatacctcagttattatacagacttccaaccagtgatggcagtgcttcaaaaggcaaacagcaaaccagtgaacctgtacacattttaaagaggtcttttgcaagaactgtctcagtggaatgttttgagtcattgttgagtattcttcactggagctggaccaccttagtcttaggagttgaagaacttagaggattaaaaggattccagttcacagctacactcctagatttagagagactgcgctttgtgggtacctgttgtctgaggttattgcgtgtctatacctgtgaaatttacccagtgtcagctacaggaaaagcagttgtagaagaaactagcaaattagcagagtgtattggaaaaaccagaactttgttaagaaaaattttatcagaaggagttgatcactgcatggtgaaattggataatgatcctcaaggatatctcagtcaacccttgagtcttctagaagctgtccttcaggaatgtcataatactttcactgcctgctttcattctttctacccaactcctgccttacagtgggcttgcctttgtgatctgctgaattgtttggatcaggatatccaagaagcaaacttcaagacatcaagtagccgactccttgcagctgttatgtcagctctgtgtcacacgtctgttaagctgacttccatcttcccgattgcgtatgatggagaagtattactacgatcaattgttaaacaagttagtacagagaacgactcaacactagttcatcgttttccccttttggtggcacatatggaaaaactcagccagagtgaagagaatatctcagggatgacaagcttccgtgaagttctggagaaaatgctggtcattgttgtgctaccagtcaggaacagcctgaggagagaaaatgaactcttctcctcccacctcgtctctaacacctgtggattactggccagcattgtcagtgaactgacagcgtcagccctgggatctgaggttgatggacttaattctcttcactctgtaaaagctagtgctaaccgatttacaaaaacaagtcagggcagaagttggaacactgggaacgggtcccctgatgcaatctgtttttcagtagacaaacctggaatagttgtggttggtttctctgtctatggaggaggtggaattcatgaatatgaattagaggtgttggttgatgatagtgaacatgcaggagattcaactcattcccacagatggacatctctggaattagtgaaaggaacgtacacaacggatgactcacccagtgatatagctgagatcagacttgacaaagtggttcctttaaaggaaaatgttaaatatgctgtgcgcttgaggaactatggaagccgtacagccaatggagatggaggaatgaccacagttcagtgccctgatggtgtgacattcacattcagcacgtgcagcttgagcagtaacggcacaaaccaaaccagaggacagatcccacagatactctactataggagtgaatttgatggagatttacaatcccaacttctgagtaaagccaatgaagaagataaaaactgtagcagagcattgtctgttgtaagcactgtcgttcgagcctctaaggacctcctgcacagagctcttgctgtggatgctgatgacattccagaactgctgagttcttccagtctgttttccatgctgctcccccttattatagcctacataggaccagtagctgctgctattcccaaggtggctgtagaagtctttggccttgtccaacaattgcttccgtcagttgccattttgaatcagaagtatgcaccgcctgccttcaaccctaatcagtcgacagatagcaccacaggaaaccagcctgaacagggcctctctgcttgtacaacctccagtcactatgctgtcatagagagtgagcacccgtataaacctgcctgtgtgatgcattacaaggtgacattcccagaatgtgtgaggtggatgacaatcgaatttgaccctcagtgtggtactgcacagtcagaagatgtccttcgtttgttgattcctgtcagaactgttcagaattcaggatatggaccaaaattgacatctgttcatgaaaatcttaattcatggatagaattaaagaaattttcaggatcctctgggtggcctactatggttttggtgttgccaggaaatgaggcccttttttcattggagactgcatcagattatgtgaaagatgacaaagcttctttctatggttttaagtgttttgcaattggatatgaatttagccctggacctgatgagggagtcatccaattggaaaaagaattagccaatcttggtggggtttgtgcagcagctctgatgaagaaggacctagcacttcctattggtaatgaattagaagaagaccttgaaattcttgaggaggctgcattgcaggtgtgcaaaacccattctggaattcttggaaagggtctagctctttctcattcaccaactatattagaagcacttgagggaaatttaccactccaaatccaaagcaatgaacagtcttttctggatgattttattgcctgtgtcccaggatcaagtggtggaaggcttgcaaggtggcttcagccagattcatatgcggatcctcagaaaacatctttgatcctgaataaggatgatattcgttgtggttggcctaccaccataactgttcaaacaaaagaccagtatggggatgtggtacatgttcccaatatgaaggtggaagtgaaagctgtccctgtttctcagaaaaaaatgtctttacaacaagatcaagcaaagaaacctcaaaggattcctggcagtcctgcagtaacagctgcatcttctaatactgacatgacttatggagggctggcatcaccaaagctagatgtttcatatgaaccaatgatagtgaaggaagctcgatatattgccataacaatgatgaaggtttatgaaaattattcatttgaagaactacgttttgcatcaccaactcctaagagacccagtgagaatatgctgatccgtgtcaataatgatgggacttattgtgcaaattggactccaggggctattggactctacactcttcatgttaccattgatggcattgaaatcgatgctggtctggaagtaaaagtaaaagacccaccaaaagggatgataccaccaggaactcagttggtcaaaccaaagtctgaacctcagcctaataaggttcgaaaatttgtggccaaggacagtgcggggcttcgcatccgtagccacccttcccttcagagtgagcagataggcatagtgaaagtcaatggaactatcacttttattgatgagatccataatgatgatggtgtgtggctgaggctgaatgatgagacaataaagaagtatgtccctaacatgaatggttacactgaagcctggtgcctctcttttaatcaacatcttggcaagagtcttctggtccctgttgacgaatctaaaactaatactgatgactttttcaaagacataaactcctgctgcccacaggaagcaacaatgcaagaacaagatatgccattcttgcgaggagggccaggcatgtacaaggtagtgaagacgggaccttcaggtcacaacatcagaagctgccctaaccttagaggtatcccaattggaatgttagttctgggaaacaaagtcaaagcagtgggagaggtaaccaattctgaagggacatgggtgcaactggatcagaacagcatggtagagttctgtgagagtgatgaaggagaggcatggtccttagctagagacagaggcggaaaccagtacctccgacatgaagatgaacaagctcttctggatcagaattctcaaactcctcctccaagccctttctcagtgcaagcttttaataaaggggcaagttgcagtgcccaaggatttgattatggactcggaaatagcaaaggtgatcgaggaaacatctcaacatcttctaaaccagcctctacatcaggaaaatcagagctgtcctctaaacacagcagatcgcttaaacctgatggacgtatgagccggactactgctgatcagaagaagccaaggggcacagaaagtttatctgctagtgaatccctcatcttaaaatctgatgctgcaaagttgaggtcagattcccacagtaggtcattatcccccaaccataacaccttgcagacattgaaatctgatgggaggatgccttctagctccagagctgaatccccaggaccaggttctcggttgtcatctcctaagccaaagactctcccagccaataggtctagcccatcgggtgctagttctccacgctcctcctcaccacatgataaaaatctacctcaaaaaagtactgctcctgttaagacaaagcttgatcctcctcgggaacgttctaaatcagactcttacacacttgatccagataccctccgcaagaagaaaatgcccctcacagaacctttgagaggacggtcaacgtcaccaaaaccaaaatcagtaccaaaggattctacagattcccctggatctgaaaatagagctccctctccccatgtggtacaggaaaacctccacagtgaggtggtcgaagtctgcacctcaagtactttaaaaacaaatagtctaacagacagcacctgcgatgacagcagtgaatttaagagtgtggatgaaggttcaaataaagttcattttagcattggaaaagcaccactgaaagatgaacaggaaatgagagcatctcccaaaataagtcgaaaatgtgctaatagacacaccaggcccaaaaaagaaaaatcgagttttcttttcaaaggagatggatccaagcctttagagccagccaagcaagccatgtctccttctgtggccgaatgtgccagagctgtgtttgcttccttcctctggcatgaaggcatagtacatgatgcaatggcttgttcttctttcctaaagtttcatcctgaactttccaaagaacatgctcctataaggagtagtttaaatagccaacaacctacagaggaaaaagaaaccaagttaaaaaatagacattcattagaaatatcatctgcactgaatatgtttaatattgcaccccatggaccagatatatctaagatgggtagcatcaacaaaaacaaggtattgtctatgcttaaggaaccacctctgcatgaaaaatgtgaggatgggaaaaccgagaccacttttgaaatgtccatgcataacacaatgaagtctaagtctcctcttcccttaactttacaacatttagtggctttttgggaagacatctctttggctactatcaaagctgcttcccagaatatgatttttccaagtcctggttcctgtgcagttcttaaaaagaaagagtgtgagaaagagaataagaagtccaaaaaggaaaaaaagaaaaaagaaaaggcagaagttaggcccaggggtaatttgtttggagagatggcccagctggcagtaggaggaccagagaaagataccatctgtgaactgtgtggggagtcacatccatacccggtgacctatcacatgagacaagctcacccaggttgtggccgatatgctggtggacaaggttacaatagcattgggcatttttgtggaggatgggctggtaactgtggtgatggtggcataggaggaagcacttggtatctggtatgtgatcgctgtagagaaaaatacctccgcgaaaaacaggctgctgcaagggagaaggtcaaacaatctaggagaaaaccaatgcaagtcaagacccctcgtgccttgcccaccatggaagctcaccaggtgattaaagccaatgcactcttcctgctgtccctgagcagtgcagcagaaccgagcattctgtgttaccatcctgcaaagccattccaatctcagttgcccagtgtaaaagaaggcatttctgaggatcttcctgtgaaaatgccttgtctctacctgcagacattagctaggcatcatcatgaaaattttgtgggctatcaagatgacaatctattccaggatgaaatgagatatctacgttcaacatctgtacctgccccgtatatatcagtaactcctgatgcaagtcctaatgtatttgaagagccagagagcaatatgaagtctatgccaccaagtttagaaaccagtcccataactgatactgatcttgcaaagagaactgtcttccaaagatcatactcagttgttgcttccgaatatgataaacaacactccattttacctgcacgagttaaagctattcctagaagaagagttaacagtggagacactgaagttggttcttcccttttgagacatccgtctcctgagctttctcggctaatctcagcccacagctctctttctaaaggagaacgaaatttccagtggccagttttagcttttgttatacaacatcatgatctagaaggtcttgaaatagcaatgaaacaggccctaaggaaatctgcttgtcgagtttttgctatggaggctttcaactggcttctgtgtaatgtcatccaaaccacttctctccatgatattctgtggcattttgtggcatcactgactcctgcaccagtggaaccagaggaagaagaggatgaagaaaataaaacaagcaaagaaaattcagaacaagagaaagatacaagagtatgtgaacatccactctcagacatagtgattgccggggaagctgctcatcctttaccacacacctttcaccgcttgctgcagaccatctcagaccttatgatgtctctccccagcggcagttcattacagcaaatggccctgaggtgctggagtctcaaattcaagcaatctgatcaccagttccttcatcagagcaacgtctttcatcacattaacaatattttgtcaaagtcagatgatggcgatagtgaagagagttttagcatcagtatacagtctggctttgaagctatgagtcaggaattatgcatagtaatgtgcttaaaggacttaaccagcattgttgacataaaaacttcaagccgacctgccatgattggcagtttgacagacggctccacagaaaccttttgggaatcaggagatgaagataaaaacaaaactaagaacatcaccatcaactgtgtaaaaggaatcaatgcccgctatgtgtctgttcacgtggacaattcccgagatcttgggaataaagttacctcaatgaccttcttaactggcaaagcagtagaagatttgtgcagaataaagcaggttgatctggattccaggcacattggctgggtaacaagtgaacttccaggaggggataatcacatcataaaaattgaattaaaaggcccagaaaatacactgagagttcgacaagtcaaagtcctgggctggaaagatggtgaaagcacaaaaatagctggccagatttcagccagtgtggcccagcagaggaactgtgaagctgagactctgcgagtattcagactgattacgtctcaagtatttggaaagctcatctctggagatgctgaacctacaccagaacaagaggaaaaagcactattgtcatcacctgaaggagaagaaaaagtatacaatgcaacatcagatgctgacctgaaagaacatatggttggaatcatattcagcaggagtaagctgactaacttacaaaaacaggtgtgtgctcatattgtccaagctattcgcatggaagctaccagagtccgtgaagaatgggaacatgctatatcaagcaaagaaaatgccaattctcagccaaatgatgaagatgcctcctctgatgcctactgctttgagctgctctctatggttttagcactgagtggctctaacgttggccggcaatatctggctcaacagctaaccctgcttcaggatctcttctcgctgcttcacacagcctctcctagagtccagagacaggtaacctctttactaagaagagttttgcctgaagtaacccctagtcgtctggccagcatcataggagtgaaatccctccccccagcagatatcagtgatatcattcactcaacagagaaaggagactggaataagctgggtatcttggacatgtttctaggatgcattgccaaagcactcactgtacagctaaaagccaaaggaaccaccatcactggaacagctggtaccactgtgggcaaaggagttacaacagttactcttccgatgattttcaattccagttatctccgacgaggtgaaagtcattggtggatgaagggctcaacccctacccagatctcagagatcatcattaaacttatcaaggatatggcagcaggtcatctgtcagaagcttggtcccgagtgacaaaaaatgctattgcagaaaccatcattgccttgaccaagatggaagaagaatttaggtctccagtgagatgtattgcaacaactagactctggcttgctctcgcatccctatgtgttcttgatcaggaccacgtagatcgtctctcctcggggagatggatgggaaaggatggacaacaaaaacaaatgcctatgtgtgataaccatgatgatggtgaaactgcagcaatcattttatgcaatgtctgtggaaatttatgtacagactgtgacagattccttcaccttcatcgaagaaccaaaactcatcaaagacaggtcttcaaagaagaagaagaagctataaaggttgaccttcatgaaggttgtggtagaaccaaattgttctggttgatggcactggcagattctaaaacaatgaaggcaatggtggaattccgagaacacacaggcaaacccaccacgagtagctcagaagcatgtcgcttctgtggttccaggagtggaacagagttatctgctgttggcagtgtttgttctgatgcagattgccaggaatacgctaagatagcctgtagtaagacgcatccttgtggccatccatgcgggggtgttaaaaacgaagagcactgtctgccctgtctacacggctgtgacaaaagtgccacaagcctgaagcaagacgccgatgacatgtgcatgatatgtttcaccgaagcgctctcggcagcaccagccattcagctggattgtagtcacatattccacttacagtgctgtcggcgagtattagaaaatcgatggcttggcccaaggataacatttggatttatatcttgtcccatttgcaagaacaaaattaatcacatagtactaaaagacctacttgatccaataaaagaactctatgaggatgtcagaagaaaagccttaatgagattggaatatgaaggtctgcataagagtgaagctatcacaactcctggtgtgaggttttataatgacccagctggctatgcaatgaatagatatgcatattatgtgtgctacaaatgcagaaaggcatattttggtggtgaagctcgctgcgatgctgaggctggacggggagatgattatgatcccagagagctcatttgtggtgcctgttctgatgtttccagggctcagatgtgtcccaaacatggcacagactttttggaatataaatgtcgctactgctgttcagtggctgtttttttctgttttggaacaacacatttttgtaatgcttgtcatgatgattttcaaagaatgactagcattcctaaggaagaactaccacactgtcctgcaggtcccaaaggcaagcagttagaaggaactgaatgtccactccatgttgttcatccacccactggggaagagtttgctctgggatgtggagtgtgcagaaatgcccacactttttagaacacgcagatcctttgtctacagagagaaaaattgccttcatcccccaagaggatgcggtgaagtttaaactctgctcaggataaggacgggaccatttttacatccatgaaaatgaaccattcacagtgcaagaaggataccaaataccatgtacataattcttgctatgaaaagtttccccattattttggtttatcttcttttgaacaaatgacatcaaacttgtgaggtgtttgcatgtggccattaccgtcattggcctgtgaagcattggacatttatagataattgatataaaagaatcgccatgcccatggactaagaacgatgctggctttcaagcaaaaaagaaaaataatcattgtttattgtatactgcctttttgtaatcctgtacaattgcatcacgggtggggataaaaagaggaatattctggtttatttcctagactgttatttaaaaaaaaaaaaaacattgtgttaggacagcatataaatgtaataagtatcacactgtatataaacatatcaatgtttgtcctgtataagaattactaaattacaaatgcaatttcatttaaacttctaggttaagtttgagcctgaaattttaatgaagtgcaatactgagtgtgcctcattatcttgcagctgtaaacatattggaatgtacatgtcaataaaaccactgtacatttttatacagtgataaagtcta

SEQ ID NO: 3916 - DNA, 11650 bp, Homo Sapiens
  NM_015059
atggtggccctgtccttaaagatttgtgtgcgccactgcaacgtggtgaagaccatgcagtttgaaccatctacagctgtgtacgatgcgtgtcgagtcattcgggaacgggtgcctgaggcacaaactgggcaagcttctgactatggactctttctttcggatgaagacccgaggaaagggatttggctggaagcgggcagaacactggattactacatgttgcggaatggggatattttggaatataaaaagaaacagagacctcagaaaatccggatgctggatggatctgtgaagacagtgatggtggatgattccaagactgtgggggagctcctggtcactatttgtagcagaataggaataacaaattatgaagaatactccttaatccaagaaactattgaagaaaagaaagaggaaggaacgggcacactcaaaaaagacaggacactgttacgagatgagaggaaaatggagaagttgaaggccaagctgcacacagatgatgacctaaattggctggatcacagccgaacattcagagaacaaggagtagatgaaaacgaaacgttgctgcttagacggaagttcttttactctgatcagaatgtagattcgagagaccccgtgcagctgaacttgctttatgttcaggcacgggatgacatcctgaatggctctcaccctgtctccttcgagaaagcttgtgagtttggtggatttcaagcccagatacaatttggacctcatgtggaacataaacacaaacctggatttttagatctgaaggaattcctgcccaaagaatatatcaagcagagaggagctgaaaagaggatctttcaggagcataagaactgcggagagatgagtgagatagaagccaaggtcaagtacgtcaaactcgcacggtccctccgcacatatggcgtgtccttcttcctggtgaaggagaagatgaaaggcaagaacaagctggtgcctcgcctgctggggatcaccaaagactcggtgatgcgcgtggatgagaagaccaaggaagtgctgcaggagtggcccctcaccaccgtcaagcgctgggcagcctcacccaagagcttcacactggattttggggagtatcaggaaagctactattcagtacaaaccaccgagggagagcagatatcccagctgattgcaggctacattgacatcatcctgaaaaagaaacaaagtaaagatcgatttggactagaaggtgatgaggagtcaaccatgttagaagagtccgtttccccaaaaaagtccaccatcttgcagcagcagttcaaccggaccgggaaggcagagcacggctcagtggcgctgccggccgtgatgcgctcgggctccagcgggcctgagaccttcaacgttggcagcatgccctcgccacagcagcaggtcatggttgggcagatgcaccgaggccacatgccgccactgacctcagcccagcaggccctgatggggaccatcaacacaagcatgcacgccgtccagcaggcccaggatgatctcagtgagctcgactcgctgccacctctcggccaggatatggcatctagggtatgggttcagaacaaagtcgacgaatccaaacacgaaatccattctcaagttgatgctatcacggccggaacggcttcagttgttaacctcacagctggtgaccctgcagacactgactacacagctgtgggatgtgcgatcaccactatttcttccaacctgacggagatgtccaagggtgtgaagctattggccgccctcatggatgatgaggtgggcagcggggaggacttgctcagagctgccaggaccctcgctggggcggtgtcagacttgctgaaagctgtgcagcctacttctggagagcctcgacagacagttttgactgctgctggcagcatcggacaagccagtggggatcttctgagacagattggagagaatgagactgatgagcgattccaggatgttttaatgagtttggccaaagctgttgccaatgcagctgccatgttggtactaaaggcaaagaatgttgcccaagtggccgaagacactgtcctacagaacagggtaattgctgctgccacccagtgtgccctctccacctcccagcttgtggcatgtgccaaggttgtgagccccactattagctcccctgtgtgccaggagcagctgattgaagcagggaagctggtggaccgctcggtggagaactgtgtccgtgcctgccaggcggccactaccgatagtgagctcctgaagcaggtcagcgcagcggccagcgtggtcagccaggccctccatgatctcctgcagcatgtgcggcagtttgccagccgaggcgagcccatcggccgctacgaccaggctactgacaccatcatgtgtgtcaccgagagcatcttcagctccatgggtgacgctggtgaaatggtgcgccaggcgcgggttctggcccaagccacatcagacctcgtcaatgccatgaggtcagatgcagaagccgaaatcgacatggagaattcaaagaagctcctggcagcagcaaaactcttagctgactccactgctcgcatggtggaagctgcaaagggggctgcagccaacccagagaatgaggaccagcagcaaaggctgagagaagctgcagaaggcctccgggtagcaaccaacgcagctgcccagaatgctattaagaaaaaaattgtcaaccgactggaggttgcagccaagcaggccgcagcggcagccacacagaccatcgccgcctcccagaatgcagctgtttccaacaagaaccctgcggcccagcagcagctggtccagagttgcaaggcagtggctgatcacatccctcagctggtccagggagtgagggggagccaagctcaagctgaagacctgagtgcccagctggctctcatcatctccagccagaacttcctccagcctggaagcaagatggtgtcctctgccaaagccgcagtgcccaccgtgagtgaccaggccgcagccatgcagctgagccagtgtgccaagaacctggccaccagcttggcggagctgcgtaccgcctcgcagaaggcccatgaagcttgtggtccgatggaaatcgattcagctctgaatacggtgcagacgcttaagaatgaactgcaggatgccaagatggcagccgtggagagccagctgaagccacttccaggggaaacgctggaaaaatgtgctcaggacctgggaagcacatccaaggcggtgggctcctccatggcacagctgctgacctgtgctgctcaaggcaacgaacactacacaggggtggctgctagagagacggcccaagctctgaaaacactggcccaggccgcccgtggagtggctgcatcgacaaccgaccccgcggccgcccatgccatgttagattctgctcgagacgtgatggagggctccgccatgctcattcaagaggccaagcaggccctgattgcacctggagatgcagagcgtcaacaaagactggctcaggtggctaaagccgtctcacactccttgaataactgcgtaaattgcctccctgggcagaaggatgtggacgtggccttgaagagcatcggggagtccagcaagaagctgcttgtggattcgctacctccaagcacgaagcctttccaggaagcccagagtgaactgaaccaggcagcagctgatctgaaccagtctgctggggaagtggtccatgccacccggggccagagtggagagttggctgcagcctctggaaagttcagtgatgattttgatgaattcctcgatgctggcattgagatggctggccaagctcagacaaaagaagaccagatccaagtgatagggaacctcaagaatatctcgatggcatccagcaagctgctgttagctgccaagtctctctctgtagatccaggagctcccaatgcgaaaaatctcctggctgcagctgcaagagctgtgacagagagcatcaatcaactcatcactctgtgtacccaacaagctccgggccagaaagagtgcgataatgccctgcgggagctcgagactgtgaaggggatgttggacaatcctaatgaacctgttagtgacctctcttactttgactgcattgagagtgtgatggaaaactccaaggttctgggtgaatcgatggcagggatttcacagaatgccaagaccggagacctccctgcctttggggaatgtgtggggattgcatccaaggctctctgtgggctgacagaggctgcagcccaggctgcatacttggttggcatctctgatccaaacagccaggcaggccaccagggcctggtggaccccatccagtttgccagggctaaccaggccatccagatggcatgccagaacttggtggaccctggcagcagcccatcacaggtcctgtcagccgccacaattgttgccaagcacacgtcagccttgtgcaatgcctgccgcatcgcctcatccaagacggccaacccagtagccaagaggcacttcgtccagtcagccaaggaagtcgccaacagcactgccaacctggtgaagaccatcaaggccctggatggggatttctctgaagacaaccgcaataagtgtcgcatcgccaccgcacccttgattgaagctgtggagaacctgacagcgttcgcctcaaaccctgagtttgtcagcattcctgcccagatcagctccgagggttcccaggcacaggaaccaatcctggtctcagccaagaccatgctggagagttcatcgtacctcattcgcactgcacgctctctggccatcaaccccaaagacccacccacctggtctgtactggctggacattcccatacagtgtccgactccatcaagagtctcatcacttctatcagggacaaggcccctggacagagggagtgtgattactccatcgatggcatcaaccggtgcatccgggacatcgagcaggcctcgctggccgccgtcagccagagcctggccacgagggacgacatctctgtggaggccctgcaggagcagctgacttcggtggtccaggaaatcggacaccttatcgatcccatcgccacagcggctcggggagaagcagctcagctgggacataaggtgacacaactggcaagctattttgagcccttgatcttagccgcagttggtgtggcctccaagattcttgatcatcagcagcagatgacggtgctggaccagaccaagactctcgcagagtctgccttgcagatgttgtatgcagccaaagaaggtggcggaaaccccaaggcacaacacacccatgacgccatcacagaggccgcccagttgatgaaggaagccgtggatgacatcatggtgacgctgaacgaagctgccagtgaagtggggctggttgggggcatggtggacgccattgcagaagccatgagcaagctggatgaaggcactcctccagaaccaaagggaacatttgtcgactatcagacgactgtggttaaatactccaaagccattgcggtgacagctcaggaaatgatgactaagtcggttactaacccggaggagttgggaggactggcttcacaaatgaccagtgactatgggcacctggctttccagggccagatggcagcagccacggcggaaccagaggagatcggattccagattcgcactcgtgtgcaggacctgggccacggctgtatcttcctggtgcagaaggcaggggccctccaggtctgccccacagacagctacaccaagagggagctgatcgaatgcgcccgtgccgtcacggaaaaggtctccttggtgctctcggctctccaggccgggaacaaaggaacccaggcatgcattacagccgccaccgctgtgtctgggatcattgccgacctggacaccaccattatgtttgcaacagcggggacgctgaatgcagagaacagtgagaccttcgcagaccacagggagaacattctcaagacggccaaggccttggtagaagacacgaaactacttgtgtcaggagctgcgtccactcctgacaagctggcccaggcggcccagtcctcagcagccaccatcacccagctcgcagaagtggtcaagctgggggcagccagcctgggctccgacgaccccgagacccaggtggttttgatcaatgccatcaaagatgtggccaaggccctttctgatctcatcagtgctaccaagggagctgccagcaagccagtggacgacccttccatgtaccagctcaagggggctgccaaggtgatggtgaccaatgtcacctcgctcctcaagactgtaaaggcagtggaggatgaggccacccggggcaccagggcgcttgaggccacaattgaatgcataaagcaggagcttacggtgttccagtcaaaagacgtacctgaaaagacatcatcacctgaagaatccataaggatgacgaaaggcatcaccatggcaacagccaaagccgtggcagctgggaactcatgtagacaggaggacgtgattgctactgccaacctgagccggaaagccgtgtcagatatgttgacggcttgcaagcaagcatccttccaccccgatgtcagtgacgaggtgagaaccagagccttgcgtttcgggacggagtgcacccttggctacttggacctcctggagcacgtcttggtgattcttcagaaaccaaccccagaattcaagcagcagctggccgctttctccaagcgagtcgccggcgctgtgacagagctcatccaggcggcggaagccatgaaaggaacagagtgggtggatccagaagacccaactgtcattgcagaaacagagttactgggggctgcagcatccatcgaagctgctgctaagaagttagagcaactgaagccaagagcaaaaccaaaacaagcggatgagaccctggactttgaggaacagatcttggaagctgctaaatccattgctgctgccacaagcgccctggtcaaatcggcctcagcagcccagagggagctggtggcccaaggaaaggtgggctccatccctgccaatgctgcagacgacggacagtggtcacaggggctgatttctgctgcccggatggtggcggctgcgaccagcagtctctgtgaggcggccaatgcctccgttcagggacacgccagcgaggagaagctcatctcatctgccaagcaggtcgccgcttccacggctcagctgctggtggcctgcaaggtgaaggccgaccaggattcagaggccatgaggcggctacaggcggcaggaaatgctgtgaaaagagcctcagacaatcttgtccgtgcagcccagaaggcagcttttggcaaagctgatgacgacgatgttgtagtgaaaaccaagtttgtggggggcattgctcagatcatcgccgcccaggaagaaatgctaaagaaagagcgagaactggaagaagcaaggaaaaaactggcccaaatccgccagcagcagtataagtttttacccaccgagctgagggaagatgagggctaaaggtgcgagcccagatggcgagccccaggggatggccctggctgaactggacagacagtgttcctgagaggctgggcacttagctggaaaccgcccacctccctcccgggtgagcctggagccctgcgtgcttgttctcacatctctgtcccgtcggcactggctgcatgatcgtgatgtcacacggtacaatgtcctacccacaactcctctgccgcctcccctcatgcctcaccgtgtctcaggagagaggggtgcacgtttcatggactgttaccaacaaagaaaagtcagtattatgttgttctcagacactttggcttttgttggtccttctcttaggcctgctcctggacctctttatgatattgtgatagggaaaaaaatcattgacgtcatagaatattcttcttcctctcaggagaagacggaagctggagttggacatggttcataaaagccagaaacacaaacccgtgtggactccgggagggtgactcaggtcctccttccatgtcttgagcactggctcacccagggggtgaaaaattcccgcccctgtttgcacgctttcttgcctccgtgtgtaagctccttgtacaacccagacccatcttgtattttgtggcccagaaaactgaacgattattttgttcctccgtagtccaaagggcagagttgcggaaggccgtcggggcttggtgagcaggggctgtaatacagtctgtgggctccttaccctgcagaggctgtttcagctcacacagagtcatccacacaaacccacggctcccagttgacagtcagtggaatgctcgtctccttagcgtccagggtggggattctgctggaataaagagcttcctcagtgactcatctttaggtcccacgctggtttctgtgccttcagaatggtcacaagcccggattggaaaggatctgcttacaaacctgtcccctgtcctccaacccaaaacgcctttttttctgtcttaatatccagaaaatctaaatgcatcctaaaatcaatgtgaacctttaacaagatagttttacttattatcacataagacataagatgttttcattttctggatgtcacacttccagaatttcatatttttcccctcttttctttccccttttcagagccctcccataggaagggaagggcttgaatttacccttaatctgcacctttagccaaggcagtgcatggaagatgaatggctcgtgggacagaatctaatgccagggagcaggagtgtttgaaagaattcatagtggggaaggtaaaagttaatggaagtacatgattttcaaaactggtaacagttaaaggcactcaccctccgcctctctctctctctctctctctggtgtgctatcatgtcttggactccatccacactatagtttcaaagttccactgacgggggaaagttggtgctttggtcctccgaagatgtcacctttcgaccttgcccgatcttgtttcaccagactctagcccatgtcatggttttaaaatacataaacttctgacagcttcccatatttataagttacttataagtgctgcacgtattagaatttttttttttcagaccagtaaagttagagaaaagacgctgtaaaggaaaagcaagtgagagtatgtgtaggacactgacagtgtgtgggcaccagttctgaagaggaggggagctgctggagccctagcctgttggggaaaagctggcacactcttggctcgccctctttgagtggagctgatccaacacctcatgcctgccttggccggacactgagaggaggggcacacgtgcttccagagacactcaggagtcagaccccaatgctcagagtcacaatgtgttcatggcctcctgtaacaggactctggggatcccctctgtggcccagcccaccccaccctctgctcttctatgctgtgcccagggcagctgccctcttctgcctgtgccccatcccatcctgaaaacccaggaccaaggcaggggcaggcagccagttcttccaccttgcctcagagtcatttaaaacctttactgcatttgataccagaaaagcctccagagacaaaccaaatgcaaaggcctttcctttataactctaaagaacaggcatcgaaagtttatttttgtaggagctatataaatactcacctttctggagtcgtccagtgctgggagctttggggagtttggttctcagttatcacctggtatggtcccagtttctcatctgtcctttcctcatccaccctgcacatgtgtatgtgaacggcttcgtggccggtgtggtggtttctcatttcataagatagttgaagggccatgccttgtctggatgttatttaataggcactactgcggtgtcctcagatggtactgagggggccttctggtccttcaaaggaaaataacacaggcatgagttcatttgggagtgtgaactttcagaacacctaataagagagtggtgtcagagtaaaaacggccccaggtctggagcatagaagtgtatctctgtgaagagagagccggtgtgttgacatgtggttcttctcacacccctctactcctcgagggctttgaatccttgggctgatttttgtgccagaaattgctgttcccgatggccaaaaggggaacctgaactggatttcagaactgcccagtgatttgaaaatttagattttacttgggcctttcaggagtctttagatagggatgctgaggtcatatttagttcaatgaacagcccttgtttaagttttgccagtgtccagccagctgtggccctggccatctgtgcaggcaggttcctcaattcctggttggccctgcagtcggtcaacacagtccctccaggtcggctgcagaggcagctgcccagcctgcagtctatgcacgggccttaagaaatgagctgcctgtagcctcacggcatatgcttttatcagggaaaacccttcgagcttcttctgattctcacctgcttgctttctggctgtcttagtcagtgtgtttacaggcaactaaagcctgttcctaatttatcaaaaaattataaccaaaattcaccatagcctaagagagtaaaccccacctccaaagtgatgccaaggccaaaacctcatcaaggaaccagacacaggtcaaaagtggtgagcaagccatggtctctgctcctggggaactcacacgctgacccccgaggagccttggtttcctccctggcagatagtccccagaatcttctctcccagctttgaggttctgggctctggaaaggcctctgggatgctggccttaagatctcagcacagactatcagcatgttccattctcagattcctggaggaaaggtaccctctgttgaccaaggggctggctgcttctgagacttaccaacccaagaaatttggagacattcccctcaggctaaaaggcagcggtccccagagttcagaaagcaaaagatcttgacaactgtgccagtagtggctctggtcctatctctccacagtgctggcctctgctggggaaggcatctttcccaaaggtatccccaagtaccatgttgaaaatgtcctcagtctgttgctccatctttctgagcctctgcttggtatgtcatgtttatggtcactacggatgagtgtgtgcagagtttgggttgattcttttaaatgctacaaacaagagctatttcttttcaataaaaaaggtttggattcggcctcttcctctgagcccacctcccagccctccagggagcatcagtgtacctgagtcactttgtctgcatctcttcatcccacaaaacacgaggctgggtctcattcagcggcctctcaccaaccttcaagatccagaagaaaacaggaacgttcagctctgccctgtgtcgtatctaatcacatacattaatttatctaaccacataagttatttttttttatttgccagaaataaacctttaaaggaacaaa

SEQ ID NO: 3917 - DNA, 2353 bp, Homo Sapiens
  NM_015060
gctttgcctccaccgatctccctgtggggccctcatgtgctgtgctcgctgacacccgaagtccgcggctttccgcacacggtggggtcgtcagacccgctgcccttggcggtcgaagtcgtcgtgcgggcccgcggcggccgcccatggagaaggccaggagaggcggggatggcgtcccccgggggcccgtactgcacatcgtggtggtcggatttcaccacaagaagggctgccaggttgaattctcttacccgcccctgattccaggagatggacatgacagccacactttacctgaagaatggaagtatttgcccttccttgccttaccagatggcgcacacaactaccaggaagatactgtgttttttcacttgccacccagaaatggaaatggagccacagtatttggtatctcttgctatcgacaaattgaagccaaggcactgaaagtaaggcaagcagatatcaccagagagactgttcagaaaagtgtctgtgttctaagcaagctgcctctgtatggtttacttcaagcaaaacttcaactcattacacatgcatattttgaagagaaggatttttcccaaatttctattctaaaggagctttatgaacatatgaatagttccttgggaggtgcttcattagaaggatcccaagtatatcttggtctgtcacctcgagatcttgtccttcattttcgacacaaggtcttaatcctatttaagctaattcttcttgaaaaaaaggttcttttttatatttctccagtgaataaattggtgggtgcactgatgactgtgttatccctttttccaggcatgattgaacatggtctcagtgactgttctcagtatagaccccggaaaagtatgtctgaagatggtgggcttcaggaaagtaacccatgtgcagatgattttgtttctgcatccactgctgatgtttcacataccaacttgggaactatcaggaaagtcatggcaggaaaccatggagaagatgctgccatgaagactgaggagcctttgttccaagtggaagacagcagcaaagggcaggaacccaatgataccaatcaatatttgaaacctccatctcgcccatctccagattcttcagaaagtgactgggaaactttggatcctagtgtcttagaggaccccaacttgaaagaaagggaacagctgggatcagaccagacaaatttgtttccaaaggactctgtcccctcagagagtcttccaattactgtacaacctcaagctaatacgggacaggtagtcctgataccagggctcatttcgggtttggaagaggatcagtatggcatgcccctggccatcttcacaaagggatatctgtgtttgccttacatggcattgcagcagcatcatcttctctccgatgtcaccgttcgggggtttgttgctggagctactaacatcctttttcgacaacagaaacacctcagtgatgccattgtggaagtagaagaagctctgatccagatccatgatccagaactcaggaagctgcttaacccaaccactgcagacctaaggttcgcagactacctagtgaggcacgtgactgagaatcgggatgacgtcttcctagatggcacgggctgggagggaggtgacgaatggatccgggcccagtttgcggtctacattcatgccctgctggctgccacgctgcaattagacaatgaaaagatattatcggactatgggacaacttttgttacagcatggaagaatactcacaactacagggtgtggaacagcaacaagcatccagcacttgcagaaataaatccaaaccatccatttcaaggccaatactcagtatcagacatgaagttaaggttctcacattctgttcagaatagtgaacgtggcaaaaaaattggaaacgtcatggtcacaactagccggaatgttgtacaaacaggaaaagctgttggccagtcagttggaggagctttttccagtgcaaagacagctatgtcttcatggctttccactttcaccacttccacctcccaaagtctcactgagccaccagatgagaagccttgagcaaggcgtcagaggctgctattgctttctgaggtttaagtgtcccctgtctgtctgctgctcccaggctgttactagccacagatccacagcaggggaccatatgtcgaactgtttacatggatgttgctctaagtgaatgtttcgggatgccgaaatgatgaaatcacagccatagcagggatggctttccaggttggggtttcaattgactacttttatttcagtctgagcctgattaaaacatacagtgaaccttc

SEQ ID NO: 3918 - DNA, 4687 bp, Homo Sapiens
  NM_015061
gccataggtgcgcgtcggcgcccaggaggacgtgtggcgcgtggactacatcaggtccagccctgcgggaccccagccagcgcttccgggcaaggttctgtgcacctgttttctccttctacgcgagtatctttcccctccggaaagaatgggatatgcctgtgtccaaaggacaagaagatgcgcgccagcaagcctaagttaaccacagcgcggaagttgagcccaaagcaagagcgtgccgggcacctttaagctgtttgtaagcccacgtgactcaccaagtgcgggccccagcggtcacgtgacggcgcgcgcgccctcgcgcagggagagccggcggtgcgcgcgccttcgccgctgcctcccacccaccccctcgacgggagggtgaggcgcggcgcagtgatcgggcggccggggtcctgtgcgcgtgcgcagcgaacagctgtcacctagtgcggaacaagtctcccaaatttcccaaatctccctgggccggaggccactgtcttctcttcctcctccaccgagtcgtgctctcgccccaacccgcgcgccagacactgccctaaccatcatggaggtggccgaggtggaaagtcctctgaaccccagctgtaagataatgaccttcagaccctccatggaggagttccgggagttcaacaaataccttgcatacatggagtctaaaggagcccatcgtgcgggtcttgcaaaggtgattcctcctaaggagtggaagccaagacagtgctatgatgacattgataatttgctcattccagcaccaattcagcagatggtcacagggcagtcaggactgttcactcagtacaacatccagaaaaaagcgatgactgtgaaggagttcaggcagctggccaacagtggcaaatattgtactccaagatacttggattacgaagatttggagcgcaagtactggaagaacttaacttttgtggcacctatctatggtgcagatattaatgggagcatatatgatgagggtgtggatgaatggaacatagctcgcctcaatacagtcttggatgtggttgaagaagagtgtggcatttctattgagggtgtaaataccccatatctctattttggcatgtggaagaccacgtttgcatggcacaccgaagacatggacctctatagcattaattatctccactttggagagcccaagtcttggtatgctatacctccggagcatggaaaacgacttgaaagactagctcaaggttttttcccaagcagctcccaagggtgtgatgcatttcttcgccacaagatgacattgatttctccatcagtattgaagaaatatggtattccctttgacaagataacccaggaggctggagaattcatgatcactttcccatatggctaccatgctggttttaatcatggtttcaactgtgcagaatctacaaattttgctactgtcagatggattgactatggaaaagttgccaaattgtgcacttgcaggaaagacatggtgaagatttcaatggatatctttgtgaggaaatttcagccagacagatatcagctttggaaacaaggaaaggatatatacaccattgatcacacgaagcctactccagcatccacccctgaagtaaaagcatggctgcagaggaggaggaaagtaagaaaagcatcccgaagcttccagtgtgctaggtctacctctaaaaggcctaaggctgatgaggaagaggaagtgtcagatgaagtcgatggggcagaggtccctaaccccgactcagtcacagatgacctcaaggtcagtgaaaagtcagaagcagcagtgaagctgaggaacacagaagcatcttcagaagaagagtcatctgctagcaggatgcaggtggagcagaatttatcagatcatatcaaactctcaggaaacagctgcttaagtacatctgtaacagaagacataaaaactgaggatgacaaagcttatgcatatagaagtgtaccttctatatccagtgaggctgatgattccattccattgtctagtggctatgagaagcccgagaaatcagacccatccgagctttcatggccaaagtcacctgagtcatgctcatcagtggcagagagtaatggtgtgttaacagagggagaagagagtgatgtggagagccatgggaatggccttgaacctggggaaatcccagcggtccccagtggagagagaaatagcttcaaagtccccagtatagcagagggagagaacaaaacctctaagagttggcgccatccacttagcaggcctccagcaagatctccgatgactcttgtgaagcagcaggcgccaagtgatgaagaattgcctgaggttctgtccattgaggaggaagtggaagaaacagagtcttgggcgaaacctctcatccacctttggcagacgaagtcccctaacttcgcagctgagcaagagtataatgcaacagtggccaggatgaagccacactgtgccatctgcactctgctcatgccgtaccacaagccagatagcagcaatgaagaaaatgatgctagatgggagacaaaattagatgaagtcgttacatcggagggaaagactaagcccctcataccagagatgtgttttatttatagtgaagaaaatatagaatattctccacccaatgccttccttgaagaggatggaacaagtctccttatttcctgtgcaaagtgctgcgtacgggttcatgcaagttgttatggtattccttctcatgagatctgtgatggatggctgtgtgcccggtgcaaaagaaatgcgtggacagcagaatgctgtctctgcaatttgagaggaggtgctcttaagcaaacgaagaacaataagtgggcccatgtcatgtgcgccgttgcggtcccagaagttcgattcactaatgtcccagaaaggacacaaatagatgtaggcagaatacctttacagaggttaaaattgaaatgcatcttctgcagacaccgggttaagagggtctctggagcctgcatccagtgttcctacggtcgctgcccggcctccttccatgtcacttgtgcccatgctgctggggtactgatggagcctgatgactggccttatgtggtgaacattacatgctttcgacataaggtcaaccccaacgtgaagtccaaggcttgcgagaaggtcatttccgtgggtcaaacggtcatcacgaagcatcggaacacccggtattacagttgcagagtgatggctgtgacatcgcagaccttctatgaggtcatgtttgatgatggctcctttagcagagacacatttcctgaggatatcgtgagccgagactgtctgaagctgggcccacctgctgagggagaagtcgtccaagtcaagtggcccgatggcaaactctatggagcaaaatattttggatcaaatattgcccacatgtaccaggttgagtttgaagatggatcccagatagcaatgaagagagaggacatctacactttagatgaagagttacccaagagagtgaaagctcgattttccacagcctctgacatgcgatttgaagacacgttttatggagcagacattatccaaggggagagaaagagacaaagagtgctgagctccaggtttaagaatgaatatgtggccgaccctgtataccgcacttttttgaagagctctttccagaagaagtgccagaagagacagtagtctgcatacatcgctgcaggccacagagcagcttgggttggaagagagaagatgaagggacatccttggggctgtgccgtgagttttgctggcataggtgacagggtgtgtctctgacagtggtaaatcgggtttccagagtttggtcaccaaaaatacaaaatacacccaatgaattggacgcagcaatctgaaatcatctctagtcttgctttcacttgtgagcagttgtcttctatgatcccaaagaagttttctaagtgaaaggaaatactagtgaatcacccacaaggaaaagccactgccacagaggaggcgggtccccttgtgcggcttagggccctgtcaggaaacacacggggacctctctctctagctccagcaggtggcacctcggtacccagcgggtagggcgataatttatatattttccacagtcagggaaggactctcacttatttgtttcaaattgcagtttttataaaacatttttaaaacacaaatggcatgtatgctaatgagatttacccgtgtgctatctgtatttcccttgtacagaacttttacatttttgaatattcctattacttttgattgtgtctgatgggaactgagttgttggcctttgtgaaatgaaatttttggctcttgagaaagaattcttatgaattgttatgcgaattttatatatttaaagagggagatctggggctgttatttttaaacactttttttcataatacatattccgagtagatatttataaaatatatgtttctttcattatgtgtttgtaaaattagagtttaaataaatatgctttgatgcatagttttgaactaatgtaacatgatttttcttttttaaaacagcctgaaaatgtactagtgtttaaaaataaagatttccattttctccaaaaaaaaaaaaaaaaaa

SEQ ID NO: 3919 - DNA, 5354 bp, Homo Sapiens
  NM_015062
gccagcgatcagagcagcgctgggtgttcaggggccaagatggcggcgcgccggggacggagagacggagtcgcgccgcccccgagtgggggccccggtccggaccctggcgggggagcccgcggcagtggttggggaagtcgaagccaagcgccgtatgggactttgggcgctgtgagcggcggcgagcaggtgctgctgcatgaggaggcgggtgattctggctttgtcagtctctctcggctgggcccatctctgagggacaaggacctggaaatggaggagctaatgctgcaggatgagacactgctggggaccatgcagagctacatggatgcctcccttatctccctcattgaggattttgggagccttggagagagcaggttatctctggaggaccagaatgaagtgtcgctgctcacggctctgacggagatcttggacaatgcagattctgagaacctttctccatttgacagcattcctgattcggagctgcttgtgtcaccccgggagggctcctctctgcacaagctgcttactctctctcggacacccccagaacgtgacctcatcaccccagttgacccactggggcccagtacaggcagcagtagagggagtggggttgaaatgtctcttccagatccctcttgggacttctccccaccctctttcttagagacctcttcccccaagcttcctagctggagacccccaagatcaagaccacgctggggccaatccccacctccccagcagcgcagtgatggagaagaagaggaggaggtggccagcttcagtggccagattcttgccggggagcttgacaactgtgtgagcagtatcccggacttccccatgcatttggcctgccctgaggaggaagataaagcaacagcagcagagatggcagtgccagcagctggtgatgagagcatctcctccctgagtgagctggtgcgggccatgcacccatactgcctgcccaacctcacccacctggcatcacttgaggatgagcttcaggagcagccagatgatttgacactgcctgagggctgcgtagtgctggagattgtggggcaggcagccacagctggcgatgacctggagatcccagttgtggtgcgacaggtctctcctggaccccggcctgtgctcctggatgactcgctagagactagttctgccttgcagctgcttatgcctacactggagtcagagacagaggctgctgtgcccaaggtaaccctctgctctgagaaagaggggttgtcattgaactcagaggagaagctggactcagcctgcttattgaagcccagggaggtcgtggagccggtggtgcccaaggagcctcagaacccacctgccaatgcagcaccaggttcccagagagctcgaaagggcaggaagaagaagagcaaggagcagccagcagcctgtgtggaaggctatgccaggaggctgaggtcatcttctcgcgggcagtctactgtaggtacagaagtgacctctcaggtagacaacttgcagaaacagcctcaggaagaacttcaaaaagagtctgggcctctccagggtaaggggaagccccgggcttgggctcgggcctgggcagctgccttggagaattctagccctaagaacttggagagaagtgctggacaaagtagtcctgctaaagaaggccctctagacctctacccaaagctggctgacactatccaaaccaatcctataccaacccatctctcattggtcgactctgcccaagccagccccatgccagttgactctgttgaagctgatcccactgcagttggccctgttctagctggccctgtacctgttgaccctgggttggttgaccttgcttcaaccagctcagaactggttgagcctctcccggctgagccagtgctgatcaacccagtcctggctgactcagcagcagttgaccctgcagtggttcccatctcagataacttgccaccagttgatgctgtcccgtctggcccagcaccagttgatctagcactggttgaccctgttcctaatgacctgactccagttgacccagtgctagttaagtccagaccaactgatcccagacgtggtgcagtgtcatcagccctggggggttcagcaccccagctcctcgtggagtcagagtccttggacccaccaaagaccatcatccctgaagtcaaagaggttgtggattctctgaaaattgaaagtggtaccagtgctacaacccatgaagccagacctcggcctctcagcttatctgagtaccggcgacgaaggcagcaacgccaagcagaaacagaagagagaagtccacagcccccaactgggaagtggcctagccttccagagactcccacagggctggcagacatcccttgtcttgtcatcccaccagccccagccaagaagacagctctgcagagaagccctgaaacaccccttgagatttgccttgtgcctgtaggtcccagccctgcttctcctagtcctgagccacctgtaagcaaacctgtggcctcatctcccactgagcaggtgccatcccaggagatgccactgttggcgagaccttcccctcctgtgcagtctgtgtcccctgctgtgcccacacctccctcgatgtctgctgccctgcctttccctgcaggtgggcttggcatgccccccagtctgcccccacctcccttgcagcctcctagtcttccattgtctatggggccagtactacctgatccgtttactcactatgcccccttgccatcctggccttgttatcctcatgtgtccccttctggctatccttgcctgccccccccaccaacggtgcccctagtgtctggtactcctggtgcctatgccgtgcctcccacttgcagtgtgccttgggcaccccctcctgccccagtctcaccttacagttccacatgtacctatgggcccttgggatggggcccagggcctcaacatgctccattctggtctactgttcccccacctcctttgcctccagcctccattgggagagctgttccccaacctaaaatggagtctaggggcactccagctggccctcctgaaaatgtacttcccttgtcgatggctcctcccctcagtcttgggctacctggccatggagctcctcagacagagcctaccaaggtggaggtcaagccagtgcctgcatctccccatccgaaacacaaggtgtctgccctggtgcaaagtccccagatgaaggctctagcatgtgtgtctgctgaaggtgtgactgttgaggagcctgcatcagagaggctaaagcctgagacccaagagaccaggcccagggagaagccccccttgcctgctaccaaggctgttcccacaccaaggcagagcactgtccccaagctgcctgctgtccacccagcccgtctaaggaagctgtccttcctgcctaccccacgtactcagggttctgaagatgtggtacaggctttcatcagtgagattggaattgaggcatcggacctgtccagtctgctggagcagtttgagaaatcagaagccaaaaaggagtgtcctcctccggctcctgctgacagcttggctgtaggaaactcaggcggcgttgacattccccaggagaagaggcccctagaccggttacaagccccagaactggccaacgtggcagggctcacccctccagctacccctccccaccagttatggaagcccctggctgctgtctcactgctggccaaagccaaatctcctaagtccaccgcccaggagggaaccctgaagcctgaaggagttacggaggccaaacatccagctgcagttcgcctccaagaaggggtccatggccctagtcgagtccatgtgggctctggggaccatgactattgtgtccggagcaggacccccccaaaaaagatgcctgccctagtcattccagaggtgggctcccgatggaatgtcaagcgccatcaggacatcaccatcaaacctgtcttgtccttgggcccagctgcccctccgcccccatgcatagctgcctcccgggagccgcttgatcacaggactagcagtgagcaggcagatccctcagcaccctgccttgccccatccagcttgctgtcccctgaggcctcaccctgccggaatgacatgaacactaggactccccctgaaccctcagccaagcagcggtcaatgcgctgttaccgaaaagcctgcaggtcagccagcccctcaagccagggctggcagggccgccgaggccgcaacagccgttctgtcagctctgggtccaaccggactagcgaagcatcttcctcatcctcatcatcgtcttcctcatcccgatctcggtccaggtccctctcccccccacacaagaggtggcgaaggtccagctgtagttcctctggacgttctcgaagatgctcttcctcttcttcgtcatcatcttcctcttcgtcttcctcatcctcatcatccagttctcgaagccgctcacgatccccatccccccgccggagaagtgacaggaggcggcggtacagctcttatcgttcacatgaccattaccaaaggcaaagagtgctacaaaaggagcgtgcaatagaagaaagaagggtggtcttcattggaaagatacctggccgcatgactcgatcagagctgaaacagaggttctccgtttttggagagattgaggagtgcaccatccacttccgtgtccaaggggacaactacggcttcgtcacttatcgctatgctgaggaggcatttgcagccattgagagtggccacaagctgcggcaggcagatgagcagccctttgatctctgctttgggggccgaaggcagttctgcaagaggagctattctgatcttgactccaaccgggaagactttgacccagcacctgtaaagagcaaatttgattctcttgactttgacacattgttgaaacaggcccagaagaacctcaggaggtaaccttgggcccttccctgctatcctttttctcctttggaggtgcccaacctcctccacccccttcccctactctaggggagagagctgctagtgagatgactgttttataaagaaatggaaaaaagtgaaataaaaaatatgttgaatcagattttttaaaaggggtatttgtttttttataacaggtattgaaacaagttaacttgcattcctatgtaagataggaggggctgaggggatccccagtgtttggaacataagtcactatgcagactaataaacatcaactagagagaactcccaaaaaaaaaaaaaaaaaa

SEQ ID NO: 3920 - DNA, 10585 bp, Homo Sapiens
  NM_015074
ctcccacctcgatgcggtgccgggctgctgcgtgatggggctgcggagcggcgccctgcggctcgcggcggccgctgctcgcgctgaggtgcgtcggtgcccggccccccgcgcccccgcgcgccgcggctcctgttgacccggtccgcccgtcggtctgcagcgcggctgaggaaacttggctgtaacttcaaaagaagatttgattctttatttctggactgcatatatatatataacaaggccattaaaatgtcgggagcctcagtgaaggtggctgtccgggtaaggcccttcaattctcgagagaccagcaaggaatccaaatgcatcattcagatgcaaggcaactcgaccagtattattaacccaaagaatccaaaggaagctccaaagtccttcagcttcgactattcctactggtctcatacctcacccgaagatccctgttttgcatctcaaaaccgtgtgtacaatgacattggcaaggaaatgctcttacacgcctttgagggatataatgtctgtatttttgcctatgggcagactggtgctggaaaatcttatacaatgatgggtaaacaagaagaaagccaggctggcatcattccacagttatgtgaagaactttttgagaaaatcaatgacaactgtaatgaagaaatgtcttactctgtagaggtgagctacatggaaatttactgtgaaagagtacgagatttgctgaatccaaaaaacaagggtaatttgcgtgtgcgtgaacacccacttcttggaccctatgtggaggatctgtccaagttggcagttacttcctacacagacattgctgacctcatggatgctgggaacaaagccaggacagtggcagctacaaacatgaatgaaacaagtagccgttcccacgctgtgtttacgattgttttcacccagaagaaacacgataatgagaccaacctttccactgagaaggtcagtaaaatcagcttggtggatctagcaggaagtgaacgagctgattcaactggtgccaaagggactcgattaaaggaaggagcaaatattaataagtctcttacaactttgggcaaagtcatttcagccttggccgaggtgagtaaaaagaagaagaaaacagattttattccctacagggattctgtacttacttggctccttcgagaaaatttaggtggcaattctcggactgcaatggttgctgctctgagccccgcggatatcaactacgatgagactttgagcactctgagatatgcagatcgtgcaaaacaaattaaatgcaatgctgttatcaatgaggaccccaatgccaaactggttcgtgaattaaaggaggaggtgacacggctgaaggaccttcttcgtgctcagggcctgggagatattattgatacatccatggggtccctcacttcatccccatcttcctgctcactcagtagtcaggtgggcttgacgtctgtgaccagtattcaagagaggatcatgtctacacctggaggagaggaagctattgaacgtttaaaggaatcagagaagatcattgctgagttgaatgaaacttgggaagagaagcttcgtaaaacagaggccatcagaatggagagagaggctttgttggctgagatgggagttgccattcgggaagatggaggaaccctaggggttttctcacctaaaaagaccccacatcttgttaacctcaatgaagacccactaatgtctgagtgcctactttattacatcaaagatggaattacaagggttggccaagcagatgctgagcggcgccaggacatagtgctgagcggggctcacattaaagaagagcattgtatcttccggagtgagagaagcaacagcggggaagttatcgtgaccttagagccctgtgagcgctcagaaacctacgtaaatggcaagagggtgtcccagcctgttcagctgcgctcaggaaaccgtatcatcatgggtaaaaaccatgttttccgctttaaccacccggaacaagcacgagctgagcgagagaagactccttctgctgagaccccctctgagcctgtggactggacatttgcccagagggagcttctggaaaaacaaggaattgatatgaaacaagagatggagaaaaggctacaggaaatggagatcttatacaaaaaggagaaggaagaagcagatcttcttttggagcagcagagactggactatgagagtaaattgcaggccttgcagaagcaggttgaaacccgatctctggctgcagaaacaactgaagaggaggaagaagaggaagaagttccttggacacagcatgaatttgagttggcccaatgggccttccggaaatggaagtctcatcagtttacttcattacgggacttactctggggcaatgccgtgtacctaaaggaggccaatgccatcagtgtggaactgaaaaagaaggtgcagtttcagtttgttctgctgactgacacactgtactcccctttgcctcctgaattacttcccactgagatggaaaaaactcatgaggacaggcctttccctcgcacagtggtagcagtagaagtccaggatttgaagaatggagcaacacactattggtctttggagaaactcaagcagaggctggatttgatgcgagagatgtatgatagggcaggggagatggcctccagtgcccaagacgaaagcgaaaccactgtgactggcagcgatcccttctatgatcggttccactggttcaaacttgtggggagctcccccattttccacggctgtgtgaacgagcgccttgccgaccgcacaccctcccccactttttccacggccgattccgacatcactgagctggctgacgagcagcaagatgagatggaggattttgatgatgaggcattcgtggatgacgccggctctgacgcagggacggaggagggatcagatctcttcagtgacgggcatgacccgttttacgaccgatccccttggttcattttagtgggaagggcatttgtttacctgagcaatctgctgtatcccgtgcccctgatccacagggtggccatcgtcagtgagaaaggtgaagtgcggggatttctgcgtgtggctgtacaggccatcgcagcggatgaagaagctcctgattatggctctggaattcgacagtcaggaacagctaaaatatcttttgataatgaatactttaatcagagtgacttttcgtctgttgcaatgactcgttctggtctgtccttggaggagttgaggattgtggaaggacagggtcagagttctgaggtcatcactcctccagaagaaatcagtcgaattaatgacttggatttgaagtcaagcactttgctggatggtaagatggtaatggaagggttttctgaagagattggcaaccacctgaaactgggcagtgccttcactttccgagtaacagtgttgcaggccagtggaatcctcccagagtatgcagatatcttctgtcagttcaactttttgcatcgccatgatgaagcattctccacggagcccctcaaaaacaatggcagaggaagtcccctggccttttatcatgtgcagaatattgcagtggagatcactgaatcatttgtggattacatcaaaaccaagcctattgtatttgaagtctttgggcattatcagcagcacccacttcatctgcaaggacaggagcttaacagtccgcctcagccgtgccgccgattcttccctccacccatgccactgtccaagccagttccagccaccaagttaaacacgatgagcaaaaccagccttggccagagcatgagcaagtatgacctcctggtttggtttgagatcagtgaactggagcctacaggagagtatatcccagctgtggttgaccacacagcaggcttgccttgccaggggacatttttgcttcatcagggcatccagcgaaggatcacagtgaccattatccatgagaaggggagcgagctccattggaaagatgttcgtgaactggtggtaggtcgtattcggaataagcctgaggtggatgaagctgcagttgatgccatcctctccctaaatattatttctgccaagtacctgaagtcttcccacaactctagcaggaccttctaccgctttgaggctgtgtgggatagctctctgcataactcccttcttctgaaccgagtgacaccctatggagaaaagatctacatgaccttgtcggcctacctagagctggatcattgcatccagccggctgtcatcaccaaggatgtgtgcatggtcttctactcccgagatgccaagatctcaccaccacgctctctgcgtagcctctttggcagcggctactcaaagtcaccagattcgaatcgagtcactggcatttacgaactcagcttatgcaaaatgtcagacacaggtagtccaggtatgcagagaaggagaagaaaaatcttagatacgtcagtggcatatgtgcggggagaagagaacttagcaggctggcggccccgtggagacagcctcatccttgagcaccagtgggagctggagaagctggagctcctacatgaggtggaaaaaacccgccactttttgctgctgcgtgagagacttggtgacagcatccccaaatccctgagcgactcgttatcccccagcctcagcagtgggaccctcagcacctccaccagtatctcctctcagatctcaaccactacctttgaaagcgccatcacacctagcgagagcagtggctatgattcaggagacatcgaaagcctggtggaccgagagaaagagctggctaccaagtgcctgcaacttctcacccacactttcaacagagaattcagccaggtgcacggcagcgtcagtgactgtaagttgtctgatatctctccaattggacgggatccctctgagtccagtttcagcagtgccaccctcactccctcctccacctgtccctctctggtagactctaggagcaactctctggatcagaagaccccagaagccaattcccgggcctctagtccctgcccagaatttgaacagtttcagattgtcccagctgtggaaacaccatatttggcccgagcaggaaaaaacgaatttctcaatcttgttccagatattgaagaaattagaccaagctcagtggtctctaagaaaggataccttcatttcaaggagcctctttacagtaactgggctaaacattttgttgtcgtccgtcggccttatgtcttcatctataacagtgacaaagaccctgtggagcgtggaatcattaacctgtccacagcacaggtggagtacagtgaggaccagcaggccatggtgaagacaccaaacacctttgctgtctgcacaaagcaccgtggggtccttttgcaggccctcaatgacaaagacatgaacgactggttgtatgccttcaacccacttctagctggcacaatacggtcaaagctttcccgcagatgcccgagccagtcgaaatactaagtgactctgccgagtgccctcactcgccttcgagagataaagaaagcgttacctctcatttctctttgtgattcttgacggtgactcttgtatgtaatcctgtggcttaactacttctccctccttgtccagcacttttctagctctcccgttccccatctccattgctctgtactcttttcttttttcttgtgctgagaatctcgttagtagcatgtggcctaacaaaaggaaaaaatgtttttaaacacacacacacacacacacacacacacacacatacacagacaaaaacacaaaaactctgaggggatctggtgaatctccaaattattgtgggtgtactttggcttccttttgtatgataggtccccatcatgaccacctctgatgtctgtgctgctgtcaccaggcacctttgtttttcaagacaacatactttttttttcttttctctgtttgtgatatcactttaatttttcttgggtggcttagagactaagggaggagacatctggcctttttagaacctgagaggaaaaaaagagtctttttttcccctctgtctctttttgccatggctaatccctgcatttccattcagggaaaaggtggtagtgagcatagaactgcaacagttatattctgagtcaaagttggggctttttacggcataattatggaatttttatttactggtagagaggagacgagaggctttttcagtgggcctgggacagtggctgctcttgactttgtgtgaagggaaatgccaaggatgcttctggtggacttcaggggaccccagggtttggccgtgggccgtgatggcagcaggcggtgggatgcttgtagctcctcacagcaggattcctgcccactgttttttctctgttgggagggaagctcttttctaggagtgtctcagttctgcttttggcattagtgatggtggtggtacagttggaattagtgccatgtcatacacaaatgttccacaaggcgggagtgtttcactttctggtgataaacttgatggtcattgttatgattaagataatgccgggcaggccgggcacagtggctcacgcctgtaatccaagcacttggggaggccgaggcgggcagatcacgagatcaggagttcaagaccagcctggccaatatgatgaaaccccgtctctactaaaaatacaaaattagtcgggtatggtggcacatgcctgtaattccagctgcttgggagcctgaggcaggagaactgcttgaacccaggaggcagaggttgcagtgagccaagatcgcgctattgcactccagcctgggtgacagagcaagactctgcctcagaaaaaaaaaaaaataataatgctgggtagtgaccttgtgattgttacagctccctttgatcaaagaaatatagctttcaggcataaacctggaagtctccctctgaatccagcagttgttttcattgatgcttgtcaggttgaagatgctttcagtgatgctctctatactcataaataagcaaatgtggcaggctttgctttctggatcccaggattaaaactaaccgtgaccactactccaaacaaaacacaatatgcctaggggcacggatgaacgtccagggagcccgggccccaggctttgttgcgtgttccctgctcctctccatctggtgtggaaacactgcccagggagaaaggaggaagctcactgtggacagtcttctttccttctgacagaccaggtcatctggcttccgagatcatcagagaagataagtctgtctctttcagctgccagtaagttttccaggatgagaggggaaaaagaaagcctccagtgacttcagttgctttgccagttgtcttgggattgttttacaccatcctttacttcccttgctcagacctctctgtttcaccattgctcaggcattcaggaaagtatctgctcactcccacttggtgagtcctcggccttgaggttgctgactctcaggcgttaggcagctggatgacttcccgcttcacgcagcaaaggccaggggcttgcgcgcctctgcagagttgttgctagggagacttgtgtcatcatccacaaccttgtttctcacttcctggttgggctcatctctgaagaacaggtctcccagcttcgctccttatcactgcattgtgaagaggaggaaaagtgaatcacggagagagaaaggaaaggatagaatcacaggctgcgtctgcacctgaaaagtgacccgcggaaactctatggcggattttttttttaactttcttcttcctgttaaaacataggtcactaactgtgatgttatttgttttctaagtggtatgtgagattttctaatgtagttagaagtttcattgtctgatggacacaatatgcccttccggttctattcaaaccagcaggatctgtcggtgcttagagatggctgcctggactggaatcaaatctaatttcagggaaatgaagatggaatttgaaggtcacttttaaaattaagtcattgatgctgctgttacagagtgtgacagaggatccatgtctgtgacacaggacggtgggaagcctgagagagagtgaaattatgtgatacactgaaatgacttttgtttttcttctaactcatacaaaactggtttggaaagtctttgctttggaagcgtcagacattagaacaggccaaactggactgtctgttcatagcgtgcctgaataagaaggcctcttagggagccagagggagcagagtggtcgtgtcctgcgtgctcttcaccctctggggcgcccctgctgcggctggcaggtgcagacagcctttgctggtccccagcacgtccagggtgggtgctcccttgcccgacagaaccatccccactgtgaggctgtgagagatttgtggcaggaactgtttatgaggctctagttgttgctgttgtggcgggaaagttaagaaacatagcccttaaggaaaccacctttatgtattttcttaaagcacgcctttaaataagcaaaaactttaaaaggcaggaaagagaattcttaggcaaattcagagaaataagtgctagttaatactaatcacctcctcctctgtctctcatcctcctttctcccatcaaagcaaaatatggcctcaccaccagccccaaatcagtgctcagaccctctctgtgtctgtgtgccctcctgggagtcagtcagcgctcaggccaggactgtgcagggccagccagcccatgcgctagtcaggagcacaggcaaggggtgcttgtggcagtggccgggcacctgagccccagctcgttgttaaacgtgctgacggcaaggggcaatggagtgagtttcccaactaagaaaccactattatatattttttcccttcagtcacatagacttcagacaactctcctattttttatggatttttcagctcatttcagatgaaggaactaagtcattgtgaactgtctcttgagatctaaaaacaagatgacttttcctggcacatattccaaagcaaagactttgttgcctgctgcttattgtctaatttacagggatatttaattttgtcaggtctatgtatatttatccagctatacttacttgcacagtggattggagagaaaggattctccagtgtgcacactcatcggtactctttctgcatttccctcgtgctgtgtcccgctcgggttccaatggacagtatcagggcttgtttgacttaggtctttcagttttcctttcggttcccttttaaaaatgtgattgttaacctgcctcttgaaagattcaaccgggtgtggtggctcacgcctgtaatcccagcacattgggaggccaaggcaggtggatcacctgaggtcagaagtttgagaccagcctggccaacatggtgaaaccccgtctctactaaaaatacaaaaagtagccaggcgtggtggcgtgtgcctgtagtcccagctacttgggaggctgaggcaggagaatagcttgaacctgggaggtggaggctgcagtgagttgagactgcaccattgcactccagcctgggtgacaaagcaggactccgtctcaaaaaaaaagaaaagattcatgatgctgctgctcccagaaggtttgctggatgtgtttacataggactctaacttgtgtgcactacagttgttcaccagggccagtgattcaccccagtgtgtggccagaccatgactgtgtagcaggaatgttttaatttgtgcttccttagtaaattgaaatatcagctgagagattatttgctgctgttattcaaaaggccatttatgaagttagtatttgagccccataagatctttaaaaagcctccaatcatttaaaggaagaaatcagagttgctataaaattcagtaaaaagctcatagccaaacggctgtgctcagatggaaagtctgagctgaggttggtctcttgccaaaccgtggctgttgtgtgttgttcttcatgtcttcgagttcattttttttcattctgcctattctggcatcagctcacttgaggagtccctcagccttcttgtatttaaggcatcgtcttagactttgtggctctaaagtacctgtctgttgagatttcaagtctcttgtcaccatcctcacacatgacaacaaaacccataatgcataagtggcctttttgaaccaagactttgcaaactgatctctcccccgtgaaggagttgagcacattagcaacaatgtacattaattttggattttcattttcatgttttattttgtaaatattatctgatgtttggagcttgagtatacagactgtaaatatagttcttgtatttgtactaattctgattcttttgctgtatagccttagatgtgcaatgcagacactatctaactgtgtgtggtaaccttgcgtcacggagctgttagtgaacgaggtaaaaataataaaggtacagccagtgcatcagaaaaaa

SEQ ID NO: 3921 - DNA, 7001 bp, Homo Sapiens
  NM_015077
ccaaaacccgggtctctccgcgtggccccgcctccaggccggggatgtcccccgcggccccgcgcccatggtcctgacgctgcttctctccgcctacaagctgtgtcgcttcttcgccatgtcgggcccacggccgggcgccgagcggctggcggtgcctgggccagatgggggcggtggcacgggcccatggtgggctgcgggtggccgcgggccccgcgaagtgtcgccgggggcaggcaccgaggtgcaggacgccctggagcgcgcgctgccggagctgcagcaggccttgtccgcgctgaagcaggcgggcggcgcgcgggccgtgggcgccggcctggccgaggtcttccaactggtggaggaggcctggctgctgccggccgtgggccgcgaggtagcccagggtctgtgcgacgccatccgcctcgatggcggcctcgacctgctgttgcggctgctgcaggcgccggagttggagacgcgtgtgcaggccgcgcgcctgctggagcagatcctggtggctgagaaccgagaccgcgtggcgcgcattgggctgggcgtgatcctgaacctggcgaaggaacgcgaacccgtagagctggcgcggagcgtggcaggcatcttggagcacatgttcaagcattcggaggagacatgccagaggctggtggcggccggcggcctggacgcggtgctgtattggtgccgccgcacggaccccgcgctgctgcgccactgcgcgctggcgctgggcaactgcgcgctgcacgggggccaggcggtgcagcgacgcatggtagagaagcgcgcagccgagtggctcttcccgctcgccttctccaaggaggacgagctgcttcggctgcacgcctgcctcgcagtagcggtgttggcgactaacaaggaggtggagcgcgaggtggagcgctcgggcacgctggcgctcgtggagccgcttgtggcctcgctggaccctggccgcttcgcccgctgtctggtggacgccagcgacacaagccagggccgcgggcccgacgacctgcagcgcctcgtgccgttgctcgactctaaccgcttggaggcgcagtgcatcggggctttctacctctgcgccgaggctgccatcaagagcctgcaaggcaagaccaaggtgttcagcgacatcggcgccatccagagcctgaaacgcctggtttcctactctaccaatggcactaagtcggcgctggccaagcgcgcgctgcgcctgctgggcgaggaggtgccacggcccatcctgccctccgtgcccagctggaaggaggccgaggttcagacgtggctgcagcagatcggtttctccaagtactgcgagagcttccgggagcagcaggtggatggcgacctgcttctgcggctcacggaggaggaactccagaccgacctgggcatgaaatcgggcatcacccgcaagaggttctttagggagctcacggagctcaagaccttcgccaactattctacgtgcgaccgcagcaacctggcggactggctgggcagcctggacccgcgcttccgccagtacacctacggcctggtcagctgcggcctggaccgctccctgctgcaccgcgtgtctgagcagcagctgctggaagactgcggcatccacctgggcgtgcaccgcgcccgcatcctcacggcggccagagaaatgctacactccccgctgccctgtactggtggcaaacccagtggggacactccagatgtcttcatcagctaccgccggaactcaggttcccagctggccagtctcctgaaggtgcacctgcagctgcatggcttcagtgtcttcattgatgtggagaagctggaagcaggcaagttcgaggacaaactcatccagagtgtcatgggtgcccgcaactttgtgttggtgctatcacctggagcactggacaagtgcatgcaagaccatgactgcaaggattgggtgcataaggagattgtgactgctttaagctgcggcaagaacattgtgcccatcattgatggcttcgagtggcctgagccccaggtcctgcctgaggacatgcaggctgtgcttactttcaacggtatcaagtggtcccacgaataccaggaggccaccattgagaagatcatccgcttcctgcagggccgctcctcccgggactcatctgcaggctctgacaccagtttggagggtgctgcacccatgggtccaacctaaccagtccccagttccccagccctgctgtgacttccatttccatcgtcctttctgaaggaacagctcctgaaaccagtctccctgggctgagacaacctgggctcttcttaggaaatggctctccctccccctgtcccccaccctcatggcccacctccaacccactttcctcagtatctggagagggaagggaagtcaggcttgggcacgggaggttagaactcccccaggccctgccattgggttgtctgtctccgtcatggggagggtccctgctcagttctggagacactggagttggggtgggggtggttctgcattcccttctcctgctgatagcagtcagcttgaggaggatgaaggaaggcagcctcagacaggaattaaggcaatgcccaggcgggcctgggcactgtattctgagcaaaggcctgggcccaggagccagccagggatgagtgccatcatggctctccactcagactgtgcctggcccctgcacttacaacttcctgccgctctgtggccttgccctgtaatcactcagtgcccttagctagcctgactaagtcccagatcccctacagcttccttcggtgtggtatcttttgccacatccagggcgagggttgaggcaaaccagccctccctctgacttccttgtcactgcagccagctttgctgcacttgctggtgcacaggagcctcctgtttgggcctgggtctgggcatggggaggccgtgcctcaaagcccaccctaccccatgccttggtgctgtgcctcaggctccttcctggtctggcccagctggcttccccagcccctcagccatccagggctacccactgcttactcagggaccaggcagcccccatggcagtaaaagcagcctagacagaacctgcagctctgtggaaagaggcaaagtcctgaaaaggcaaagggttgtcacttagggcagcttctccaactttaacatgcatccaagtcacctgggaatgttgttaaaatcaggagatctggggtggggcctaggactctgcatttcttacagattcccaggtgagctgatgctggtggttaagggtagcaaatctctaaagcacgaagccctcacaaatctttgccatttcccaaacactccgctccatggtctccagtcatcagagcaactctacctggtattatcatccccattttacagataatgacactgaggctcagaaaggttgaggataagcccactttcctgtcattagtggcagccccagatccagacctaggcctcctggcacccagtccactggcagtggaattgctttcctgagaatcattctgaggctgggctattgcttctcccttgcttcaaagaatctagcagcgggggataggattttgcaacaaaaagctgacccagaggccatacagagcaggaatatcccattgccccctcctccactgggttcagagggtaagaaagcaccctccaataaacccaggctccaggccgtgggggctgctgaaggctctttccccgcaagggccaggtgttgacaccttaaagctggcgcccccagccccactcttggctgtgctggccaggtgactcctagttcttggccacatcatcagaaagtcaaaggtctcactccaggtttggggctccttccttccactcccctccctgccagagtctgtcttggccagtgccagcctcgatgctttggttttgaccccacctgatcctcctttcctcatgcagcacaagtgctcaccggggccagagccagggcatggatatgacaagcagggcagcctggacactgccctcacaggacagcgccaataacaatacagtgtctgagtatctccaggggatgatttctggctctttgtctccaatcagtcccactccctcctgaggtccccaagggcagtattcagagaggtttcctgcgttttatttctatttggtataccctccactgttgtccactgccctgtgtggccttctggttgacctctgcccgatcttctgtctctctgagggaatcagagtccagcatccagccccagctggaacagctgaagtcacaagcctcctctaagccaaggccagtgtgttcagaggtgactgccacccatactaggacaaacacagctcagatcaccaggtcaagcacctaggcctggcttctcctgagacagaggactcagaagtggcctttcctccaaagcctgctcagacacaggtctgtagggccagggtgttctgcttggctgggctgcagctgctacccctcggttggggctgagtcagccagatcctccccctacttctccccaagggccaagaactgctcagggacattaaaggtcaaaagtccagccacactcattcatcctttccccaggcccatgaagagaggcatctcattgtagaatgtatgaggaagtgggaagtatctcagagaatcagctaagtttcctaacttgtccatccaaatgtgatcaccacgattcaacaatttggggcattgctgatctagccgttcctagtggggcttgctcaaggttgcacagcgagtcagtagaagccctggctggccccacttggtaccaatccaccaggcagctcagggctcctgcccagcccagcagcttctgttgtctaacgtatggcaggcagactgggagcaggaaaacagagggccccaaagcccaaggcaccagaaggtttgtttcagtttgctgaagctgatttgtaatgattggcactcttcagccaggggagtgggtaggccatagccaaggatcgattccccaaccacagcaaaggcaacactcttcctccagagatcaccaagcccctcttacctccctccctccttcccaaggctggcactaaccaggtaccacattcattgttaaggaatggctgatgactgctacacgtgttgggaacctggttggggctgtgcagtttgggctggaaggagagatgccagccctcgtgctgcctctggtccctgaagtgtcacctctctcaggacctctcctctggcctgtggggttataagtgatggatagcagaaagggagaactgactcctgtcccaaatagctcctctgccacctgtcctgcagtgggcctgtgtgggttatgattctagatcctagacagaggctgggtcagctgtggatggggtggtgccttggtctctcttgactacctcgtccaaagagagcactgcccttagacaagagttgcttgtcctgctgtgggctgggcttccagctgcagacctccagttgcttggtgttcactttgctcctcttgccctctgtcttctggtccaggcagatcaggggctctggggaaactgctggaactcgaggtgaggatcagccttttccagcatcctgtgagagaccagagagagagtttggatttcatgtggggaaccctcaaggcctgtctggagaagtgacacaggatttactggggtgggctggtccaggtagctctcctgaacctcctccttccccaagctgagaagctgagagctggaggacaatatccagggacatggctctggaaaataacttttttttttttaagagacagggtcttgctctgttgtccaggctggagggcagtgacataatcatagctcactgtacccttgaactcctgggctcaagtgatcctcctgcctcagcctccttagtagctgggactaccagtgcataccaccatgcctgggtgattttttaaattttttatacagacaaggtcttgctatgttgcccaggctgatcttgaattcccgggctcaagtggtcctcctgcctcagcctcccacaggatcgggattacaggcaagagcctccacgcccggccatgaaatataattcttaatatcatacaggaaaaagtcagcgggtcaagctagcctgtggcccagccacaactagctgacaaagcttcctggccttccctttaacacagttctgctgccatagttccatctataaaatgggaatggagggaaataggggaactgggatagagaacacagccttgccaagcagcaatgttagcctgatccttcctccacctagctcgccatctcgcccttggaaaatggctcctggaggattaggcagccatctgcaaggagaggggcaacctgggacaagacacccagagggtaaggattccaggaatgaagctgccatttctggttgggaggagaagaggaaacttttaagagaaagggctccattatgagcatgggttcagggccctgcattacccaatcagaacagccgggatgagcaggaggccagctcccaggaggaaggggaaccccttcataaagttcagagtggctgggtagagtgagttgaagatgccggaggccgtcagcatggccaggctattcacacaggccacagcagaaaagagagcacctgtgaagaaataaataccatactctggagtccgaaagggccatattccaactctggcaccaccacctcacagctgtgtgaccgggagtagtcacttaacctatgtctccccttcctcaccagtaaatcctgctacatcatgtactgtgacaaggattcagtaaggtcatatgtggacagtagctggcacagaggggctactaaacaaatggctgctattaaatccacattaaaagtacatgtgatctgacagaacccagcacataaaagaaaaaaaaaagt

SEQ ID NO: 3922 - DNA, 2797 bp, Homo Sapiens
  NM_015084
gtaacccgttggctgttccttttggtacgctccaagatggctgcctccatagtgcggcgcgggatgctcctggcgcggcaagtggttcttcctcagctctctcctgcaggtaaaagatacctgctttcttcagcctatgtagacagccacaaatgggaagcaagagaaaaagaacattactgtcttgctgatcttgcatctttaatggataaaacatttgagagaaagttgcctgttagttctttaacaatatcacggcttatagacaacatttcctctcgggaagagatagatcatgcagagtattacctttacaagtttcgacacagccccaactgctggtacctgagaaactggactatccacacctggattaggcagtgtctaaaatatgatgcacaagacaaagccctatatacccttgtaaataaggttcaatatggaatttttccagataactttacattcaatttactgatggattctttcataaagaaagaaaattacaaagatgctttatctgtggtttttgaggtcatgatgcaagaagcctttgaagtgccttccacccaacttctctccctctatgttttatttcattgcctggcaaagaagacagacttcagttgggaagaggagaggaactttggtgcatcccttttgcttccaggcctaaaacaaaagaactcagtgggtttcagttcccagttgtatggctatgcacttcttgggaaggtggagttgcagcaagggctacgggctgtgtaccacaacatgcctctgatatggaaaccaggctaccttgacagagcccttcaagtgatggagaaagtggctgcctccccagaagacataaagctgtgtagagaagcgctcgatgtgctgggtgcagtgctgaaggctctgacttcagctgatggggcttcagaggagcagtcccaaaatgatgaagacaaccaggggtcagaaaaactggtggagcagttagacatcgaggaaacagagcagtccaagcttcctcaatacctggaacgatttaaggccttacattctaagcttcaagctctgggcaaaattgagtcagaaggtcttttaagtctgaccacccagcttgtcaaggaaaaactctccacctgtgaagcagaggacatcgccacctatgagcagaatctgcagcagtggcatctagaccttgtacagttgatccagagagaacagcaacagagggagcaagcgaagcaggagtaccaggctcagaaagcagcaaaggcatctgcctaatagggtcccccagggccccacctgtctcacaagaacttcactcaaccccgtgccaggactcagcagtggcctggacaacagcctcagcttcctctacccatcttcttttcttaaagcaggctatgtgccctacatggcaaggcaccatgactgcccatcgagatgccaagaagggctatggaactatgcaggtggctagtggtcagactgaagtcaccagctgaataccttaaggaggactcttgaggctcataatggagttcctggggcacagggattagttatgagcattaaagttcctaagacccagtgacagtactgggagaaaccaaggctgaagagtcaggttgaagcacaggcttttgttttttgttgtttttgttttttgagacagagtctcattctgtcacccaggctggagtgcagtggcgcaatcttggctcactgcaacctccgactcccaggttcaagcaattctcctgcctcggcctcctttagtaggtgggattacaggtgcataccaccacacctttctaatttttgcatttttagtagagatggggtttcaccatgttggtcaggctggtctcaacctcctgacctcaagtgatctgcccgcctcagcctcccaaagtgctgggatgataggcgtgagccaccacacccggccaagcacaggcttttgaatggtctccctctccccagcccaggtacatgaggccaaggtgaactgtgcatcctgagaccttgtgtccctgagtctcctttctgagtgcaagctgcactgtgagctggctgtgggatactcacacattcccacattctcctttctgccacatctcgcccttctggacctgcactgggagaaattcaggacaggagtgaactcaaggccatgaactcactggatttccatttttaggcacccatagggatgtttttaggatgtaagtttctgaggagaaagctagctctagcatgaagcttttttggattggcttctccatcgtgttggggtaacattttttttccaattttttttttcccaaaacatcgtctcagctcatttatcaagtaggtaaaatgagccttttgtgtacacacagaggcacatgtgcatgcacacacaacttgtgaacacacatttctgttaaagaagttagaaaatgagagatgggttggggcttgaagtgcatcagaggtatgaatgttgtaaaactgtcaggagatgtaaaattcctttctgaagtgtctcttctgtgaaagggttcagagcagattttgcttactatgtagtgttgcccttaagtacagtggtgtaattttattcaagattgtgctcttctatcaaaagcctctggaaataaatgttccgggatcatgttagtgtactctttatctttggggaaagggaggagggagagggactcattattgttactatgattttgaggagtgtactttaaaccctcccccattaaactatgggatttattgtaaaaaaaaaaaaaaaaaa

SEQ ID NO: 3923 - DNA, 5031 bp, Homo Sapiens
  NM_015087
acgtgacctaggctgcggcggcggcgtgctgcgggctctgtggcgggagcgaggccgacgggcggggccgcgcggccgcgtgacgcgaagcgttcgagagcgcgcgtcgtggaacgtcttggttgccacggcaagcgcgcgcgcgaggccttgggaacctcgggaccggcccccggcgagcgcagcggcgcccagtgtaagggagtgggagctggtccgtgccgcggcggccgcgcagggagctctcgaggcaacgccggggcgcccgaggtctggaaggcgcagaaatggagcaagagccacaaaatggagaacctgctgaaattaagatcatcagagaagcatataagaaggcctttttatttgttaacaaaggtctgaatacagatgaattaggtcagaaggaagaagcaaagaactactataagcaaggaataggacacctgctcagagggatcagcatttcatcaaaagagtctgaacacacaggtcctgggtgggaatctgctagacagatgcaacagaaaatgaaagaaactctacagaatgtacgcaccaggctggaaattctagagaagggtcttgccacttctctgcagaatgatcttcaggaggtgcccaagttatatccagaatttccacctaaagacatgtgtgaaaaattaccagagcctcagtcttttagttcagctcctcagcatgctgaagtaaatggaaacacctcaactccaagtgcaggggcagttgctgcacctgcttctctgtctttaccatcacaaagttgtccagcagaagctcctcctgcttatactcctcaagctgctgaaggtcactacactgtatcctatggaacagattctggggagttttcatcagttggagaggagttttataggaatcattctcagccaccgcctcttgagaccttagggctggatgcagatgaattgattttgataccaaatggagtacagattttttttgtaaatcctgcaggggaggttagtgcaccttcgtatcctgggtaccttcgaattgtgaggtttttggataattctctcgatacggttctaaaccgtcctcccgggtttcttcaggtttgtgactggttatatcctctagttcctgatagatctccggttctgaaatgtactgcgggagcctacatgtttcctgatacaatgctacaagcagcaggatgctttgtgggggtcgtcctgtcctctgagttaccagaggatgatagagagctctttgaggatctgttaaggcaaatgtctgaccttcggctccaggccaactggaacagagcagaagaagaaaatgaattccaaatccctggaagaactagaccctcctctgaccaactaaaagaagcctctggcactgatgtgaaacagttggaccaaggcaataaggatgtacgtcataaaggaaaacgtggaaaaagggctaaagatacttcaagtgaagaagttaacctgagtcacattgtaccatgtgagccagttccagaagaaaagccaaaagaattacctgaatggagtgaaaaagtggctcacaacattttgtcaggtgcttcctgggtgagttggggtttagtcaaaggtgctgagattactggtaaggcaatccagaaaggtgcttctaaactccgagagcggattcaaccagaagaaaaacccgtggaagttagtccagctgtcaccaagggactttatatagcgaagcaagctacaggaggagcagcaaaagtcagtcagttcctggttgatggagtttgcactgtagcaaattgcgttggaaaagaactagctccacatgtcaagaagcatggaagcaaacttgttccagaatctcttaaaaaagacaaagatgggaaatctcctctggatggtgctatggttgtagcagcaagtagtgttcaaggattttcaactgtctggcaaggattggaatgtgcagctaaatgcatcgttaacaatgtttcagcagaaactgtacaaactgtcagatacaaatacggatataatgcaggagaagctacccaccatgcggtggattctgcggtcaatgttggcgtaactgcctacaatattaacaacattggtatcaaagcaatggtgaagaaaactgcaacacaaacaggacacactctccttgaggactatcagatagttgataattctcagagggaaaatcaagaaggagcagcaaatgtcaacgtgagaggggagaaggatgagcagacgaaggaagtaaaggaggcaaagaagaaagataaatgatgaagtgctgggaatcacttataccaaagccttatgaaatggatgaaattttgttaaataggcaaatgtggaattcctcacagattaaccagtattttttaaatgtattcattcctacaaattaactttcataaattttatggcatgtcttctatttaaaaggaaaagaataagtattcttgcatctggccttagaaatgtgaagttatattctcaagtttatttttttccaagtgtagctaaaatatttttgcaggtaaaataaagctgatagtacatgtgttgttcaaaccttgttaaacctaatattgaactatttttatatctgctgtctttcagaaggcaaataggaaactatatatttgcttaaaaattggcatttagtaaccttaattctttttatagaaggaatgacttaaagtattgtcccctctttttgcactaattgtggatttttttagatgcttctcaaaattttcagtgtgtaagctaaacaaaaactaaaactaagaattctcaaaaaaacttgttcaaaacagggaaagactgatgaaaagtaaaatggactacttttgtaacttacctgtttgttaggaaatggaatggtctctttgatttaaaataaataaaaatagattattacgtcttttgtattgagactgtattgttatgagcctaggaaatttgggaacatgattgtattgtattaaaattcgaagtgattattatcagcttaattggattaaaaaagtacttcaagaaattattttatcatatctgcttctgtttttccaaaaggttaaaacttgtaaaaaaaatatatataaacaattgagtttactaatggtaaacatttttattctgggattcggtcattggaatttatattaaaagacaagttattaaaaaggaaaggttctattcataatcagggtaaagaatatgaaaaccttagacgtaatccatggtggataggcattatggtttccactttggcagaaggcagactattcacagccctatttacttacataggctaaaaaactatgtaactaaatacctaatggtatttaatttttgtttattgaatttaagagattggtattagttttcatagctgtagtccattctaataatttctgatcttctagtggctacttaattagacattatttgaagctgtctgaagaatgcactttatgaattaaaaaactgaattgcctgacctcgttatcacatgagcttatattttgggaacacatagaactgatggaggcttttcctaaggccaaggataatgtactagttgttaaaatggaaataaaagtgaagtggtaaatagcttacagacagtctatgctttgtttaagaaatggaatggcacttcatatattctcatttgtgggagctaaaaattacaataatcaaacttaaggagatagagagtagaatgatggttaccagaggctgggaggcattgaagggatggggagggaagtgaggttgattaatgggtacgaaaatatagttagaacgaatttgttgtagtatttgatagcccaacagggtgactacagtcaacaataactttatacatttaaaaataaaagagtgtaattgggacgtttgtaacacaaatgaatgcttgaagcagtagatacaccctgatgtaattattataaatcgcatacctgtatcaaaatatctcatgtatcccataaatatatacacctaccatgtacccataaaaatttaaaaagaaatggaatggcaaataatggaacataaactttaaacagttagctttgaccagaggtcagcaaatatcctccatgggctaaatccagatgtccacctgttttcataaataacgttttattggagcatagctgtacccatttgtttacatattggctatggctgctgtctagttcaacgtgagagttgaatagttgcatcagagagtatatggtccacaagcctaacttattcactctctggccctttgcagaaaaagtgtgctgccttagtctatagaaaatggacttttcccaccattcactgactcattaggagataggcatcttctaaagattttttttatattgtgtaatgattgatatatagataaaattatatattacttgtaaggtatgatgaataacaacacttaaaaactcatcacacctaaagacatggaaagctgccaattacctatatgtatgttcttcctattttcttacctctttccccatgtcattttttattgttccttgccattttttaatcacacatgtatgttctccaaacatactgtttcattttttgaagctttctacatatagtgtctgaatgtgaagtcttactcaacttgcttttttgagtttatgtttaaaattcattcttgcgcttatatgcatggatggtttacttgctctatagtattctgtgtgagtataccacaatttaagtgttcattttcctatcagttgacatttgtttttagtttttgttggtagaaacagtacactcaaaacatccttgactgtcccctggtacacatatgcaagagactttatgcgtaagagtggagttgttggcttgtcaagttttgcaaaataatgccaggtattttccaaaatgatgatattctcttgagtattacttccctttgcaatgtttttattgttaatgtagcatatataaaaaagtatctcataattttaaaaaaaaaaaaaaaaaa

SEQ ID NO: 3924 - DNA, 7771 bp, Homo Sapiens
  NM_015089
gaggcggggccaggacggcgggaccggccgctgggtcccagcgagggctgagccgggcggtgggaggaggtcaggatggtgggggaacggcatgctggggacctcatggtgcccttagggcctcggctgcaggcatatcctgaagaactcattcgacagaggcctgggcatgacgggcatcctgaatacctgatccgatggagtgtcctgaagtgtggggaagtgggcaaagtgggtgtggaagaaggcaaagcagagcacatcctcatgtggctgtcggctcctgaggtctacgccaactgccctgggctgttaggtgagcgggcactatctaagggacttcagcacgaaccagctggggtttcaggaagctttcctcgagatccaggaggcctggatgaagtggcaatgggagagatggaggctgatgttcaggcgctggtacgcagggcggccaggcagctggcagaaagtgggaccccaagcctcacggccgctgtgcttcacaccatccacgtgctcagtgcctacgccagcatcgggcccctcactggtgtcttcagggagacaggagccctggacctgctcatgcacatgttatgcaatcctgagcctcagatccgccggagtgcaggcaaaatgctgcaggctctggcagcccacgatgctgggagtcgggctcacgtccttctatcactgagccagcaagatggcatcgagcagcacatggattttgacagtcgctatacattgctggagctgtttgcagaaaccacatcctctgaagaacactgcatggcctttgagggcattcatctgcctcagatcccaggaaagctgcttttctccttggtgaagcgctacctttgtgtcacgtccctcctggatcagctgaatagcagtccagagctgggagctggagaccaaagctccccatgtgccacaagagagaaaagccggggacagcgggaactggagttcagcatggctgtgggcaacctcatctctgagcttgtgcggagcatgggctgggcccggaacctcagcgaacagggcatgtcacctccccggccaacccggtccatctttcagccctacatttcaggccccagccttttactccccaccattgtcaccacccccagaagacaagggtgggtcttccgccagcgctctgaattctccagccgtagtggctatggagaatatgtgcagcagacactccagccagggatgcgagtgcggatgctggatgattatgaggagatcagtgctggggacgagggcgagttccggcagagcaacaacggcattccccctgtgcaggttttctggcagtcgacaggccgcacttactgggtgcactggcacatgctggagatcctgggccctgaggaagccactgaggataaggcttcagcagctgtggagaagggggcaggggctactgtgttgggcacagcatttccctcctgggactggaatcctatggatgggctgtaccctttgccgtacctccagcccgaacctcagaagaatgagagagtgggatatctgacccaggctgaatggtgggagctgcttttctttatcaaaaagttggacttgtgtgagcagcagccaattttccagaatctttggaagaacctggatgagaccctgggtgaaaaggccctaggtgagatctctgtgtccgtggaaatggccgagagtctgctgcaggttctcagtagtcgatttgagggcagcactctcaatgacctgctcaactcccagatctacaccaagtatgggctgctgtctaatgaaccaagcagctcgtctacttcacgaaatcactcctgtaccccagatccagaagaggagtccaagtcggaggccagcttctcagaggaagagactgagtccctcaaagcaaaggccgaggcccctaagacagaggccgagcccaccaagacaaggaccgagacccccatggcacagagtgattctcagctgtttaaccagcttctggtgactgaggggatgaccctgcccactgagatgaaggaggcagccagtgaaatggccagagccttgcggggtcccggtcctcgcagctccctggatcagcatgtggcagcggtcgtggccactgtgcagatatccagcttggacacaaacctgcagctttcagggctctctgccctctctcaggctgtggaggaggtcactgagcgggaccaccctctggtccgtcctgacagatcgctgagagagaagctagtgaagatgctggtggagctgctgaccaaccaggtgggagagaagatggtggtcgtgcaggccctgcgcctcctttacctgctcatgaccaagcacgagtggcggccgctctttgccagggagggtggcatctatgctgtgctggtctgcatgcaagaatataagacttctgtcttggtgcagcaggctgggctggcggcactgaagatgctggccgtcgccagctcctcggagatccccacttttgttactggccgagattctatccactctttgtttgatgctcagatgaccagagagatcttcgccagcatcgactcagccacacgcccgggctctgagagcctgctcctcactgtccctgcagccgtgatcctgatgctgaatactgaggggtgctcttctgcagcgagaaatggcttactcctgctcaacctacttttgtgcaaccaccacactctgggagaccagattataacccaagagctgagagacacgttgtttaggcactcagggatagcaccaagaacagaacctatgcctaccacacgcaccatcctcatgatgcttctcaatcgctactcagagccgccgggcagccctgagcgtgcagcactagagacccccatcatccagggtcaggatgggtcccctgagctactgattcgatccctggttgggggcccatctgcagaactactcctggacttggagcgtgtgctgtgccgtgagggcagccccggaggtgccgtgaggcccctcctcaagcgcctccagcaggagacccagcctttcctcctgttgctgcggactctggatgctccggggcccaacaagactctgctgctgtctgtgctgagggtcataacccgactgctggatttccctgaggcaatggtcctcccctggcacgaggtcttggagccctgcctcaactgcctgagtggccctagcagtgactccgagattgttcaggagctgacctgcttcctacatcgcctggcctcgatgcataaggactatgctgtggtgctctgctgcctgggagcaaaagagatcctctccaaagtcctggacaagcactcagctcagctgctgctgggctgtgagcttcgggacctggtgacagagtgtgagaagtacgcacagctctatagcaacctcacctccagcatcctggccggctgcattcagatggtgctgggccagatcgaagaccacagacgaacccaccaacccatcaatatccccttctttgatgtgttcctcaggcatctctgccagggctccagtgtggaagtgaaggaggacaagtgctgggagaaggtggaggtgtcctccaacccgcaccgagccagcaagctgacggaccacaaccccaagacctactgggagtccaacggcagcaccggctcccactacatcaccctgcacatgcaccgtggtgttcttgttaggcagctcactttgctggtggccagtgaggactcaagctacatgccagccagggtggtggtgtttgggggtgacagcaccagctgcatcggcactgagctcaacacggtgaatgtgatgccctctgccagccgggtgatcctcttggagaacctgaaccgcttctggcccatcatccagatccgcataaagcgctgccagcagggcggcattgacacccgggttcggggtgtggaggtcctgggccctaagcccacattctggccactgttccgggagcagctgtgtcgccgaacatgtctcttctacacaattcgggcacaagcctggagccgggacatagcagaggaccaccggcgcctcctccagctctgtcccagactgaacagggttttgcgccacgagcagaattttgctgaccgcttcctccctgatgatgaggccgcccaggcactgggcaagacctgctgggaggccctggtcagccccctggtgcagaacatcacctctcccgatgcggaaggcgtgagtgccctgggatggctgctggatcagtacttagaacagagagagacctctcggaaccccttgagtcgagcagcgtcctttgcttctcgagttcgtcgcctttgccacttgctggtgcatgtggaacctcctcctgggccttctcctgagccatccactcggcccttcagcaagaacagcaagggtcgggaccggagcccggcgccttcgccagtgcttccaagcagcagcctgaggaacataacccagtgctggctgagcgtggtgcaggagcaggtcagcagattcctggctgcagcttggagggccccagactttgtgcctcgttactgtaaactctatgagcacttgcagagagcaggctccgagctgtttgggcctcgggcagccttcatgctggctctgcgcagtggcttctctggcgccttgctgcagcagtccttcctcactgctgctcacatgagtgagcagtttgccaggtacattgaccaacagatccagggtggcctgattggtggagcccctggagtggaaatgctggggcagcttcagcggcacctggaacccattatggtcctttctggtctggaactggccacaacttttgagcacttctatcagcattatatggcggaccgtctcctgagctttggttcgagctggctggagggggctgtgctagagcagattggcctctgttttcccaaccgcctcccacagctgatgctgcagagcctgagcacctctgaggagctgcagcgccagttccacctcttccagctccagcggctcgacaagttgttcttggagcaggaagatgaggaggaaaagagactagaggaagaggaggaggaagaggaggaagaggaagctgagaaagaattatttatcgaagatccaagtccagccatttctatactggtcctgtcaccacgctgctggcccgtctccccactctgctacctgtaccatcccagaaagtgccttcccacagaattctgtgatgcccttgaccgtttctccagtttctacagccagagtcagaaccatccagtcctggacatgggaccacatcggcgactgcagtggacgtggctgggccgggctgagctgcagtttgggaagcagatactgcatgtgtccaccgtgcagatgtggctgctgctgaaattcaatcagacagaggaggtgtcagtagagaccttgctgaaggattctgacctctccccagagctgctgctccaggcactcgtgcccctcacctcagggaatggccctttgaccctgcatgagggccaggactttccacacgggggtgtgctgcggcttcatgagcctgggccccagcgcagtggggaggccctgtggctgatacctccccaggcatacctgaacgtagagaaggatgaaggccgaaccctggaacagaagaggaatctcttgagctgtcttcttgttcgtattctcaaagcccatggggaaaagggcctccacattgatcagctggtttgtctggtgctggaggcctggcagaagggtccaaatcctcctggaaccctgggccacactgttgctgggggtgtggcctgtaccagtacagatgtcctctcttgcatcctgcacctcttaggccagggctacgtgaaacggcgtgatgaccggccccagatcctgatgtatgccgctccagagcccatggggccctgccggggtcaggcagatgtccctttctgtggcagccagagcgaaacctccaagcccagcccagaagctgtggctaccctggcatctctacagctgcctgcaggccgcaccatgagcccccaggaagtagaagggttgatgaagcagacggtgcgtcaggtgcaggagacgctgaacttagagccagatgtcgctcagcaccttttggctcattcccactggggcgctgaacagctgctgcagagctacagtgaggaccctgagccactgctgctggcagctgggctgtgcgtacaccaggctcaggctgtacccgtacggcctgaccactgccccgtctgtgtgagccccctggggtgtgacgacgacctgccctctctctgctgcatgcactattgctgtaagtcttgctggaatgagtacctgacaactcggatcgagcagaaccttgttttgaattgcacctgccccattgccgactgccccgcccagcccaccggagccttcattcgtgccatcgtctcctcgccagaggtcatctccaagtatgagaaggcgctcctgcgtggctatgtggagagctgctccaacctgacctggtgcaccaacccccagggctgcgaccgcatcctgtgccgccagggcctgggctgtgggaccacctgctccaagtgtggctgggcctcttgcttcaactgtagcttccctgaggcacactaccctgctagctgtggccatatgtctcagtgggtcgacgacggtggctactatgacggcatgagcgtggaggcgcagagcaagcacctggccaagctcatctccaagcgctgtcccagctgtcaggctcccatcgagaagaacgaggggtgcctgcacatgacctgtgccaaatgtaaccatggattctgctggcgctgcctcaagtcctggaagccaaatcacaaagactattacaactgctctgccatggtaagcaaggcagctcgccaggagaagcggtttcaggactataatgagaggtgcactttccatcaccaggcgcgggagtttgctgtgaacttgcggaaccgggtgtctgccatccatgaagtgcccccgcccagatccttcaccttcctcaatgatgcctgccagggactggagcaggctcggaaggtgctggcctacgcctgcgtgtacagcttctacagccaggacgcagagtacatggatgtggtggagcagcagacagagaacctggagctgcacaccaatgccctgcagatcctcctggaggaaaccctgctgcggtgcagagacctggcctcctccctgcgcctcctgcgggccgactgcctcagcacgggcatggagctgctccggcggatccaggagaggctgcttgccatcctgcagcattctgcccaggatttccgggttggtcttcagagtccatcagtagaggcctgggaggcaaaaggacccaacatgcctggcagtcagccccaggcctcctcagggccagaggcagaagaggaggaggaagacgatgaggatgatgtgcccgagtggcagcaggatgagtttgatgaggagctggacaatgacagcttctcctacgatgagtctgagaacctggaccaagagactttcttctttggtgatgaggaagaggatgaagatgaggcctatgactgagggggcagatgcaggaaacacctagagcagccccagagtcacggggctgagggggcgggagctgcccctgtcatagggagggggattcccagcgtctgtagtgcttcctgtttgctgaataaaggtctctttctcacacaca

SEQ ID NO: 3925 - DNA, 6812 bp, Homo Sapiens
  NM_015094
gtgagcggcgctcggggcgcgctaggcggggagccgagccgggctggcggcaggcggacggggcgggcgcgtgcggcgcgagccgggcgctgaggacaagggccgctggtagggccggccggccggcgggcggagcgccgccgccgacgcacacgaggtgaccaggcattgatgcacccccaggaaggccacgcgctcaggagccccccccgccgctggctgctgctcacatggtgtctgggcccttggcactccggtggtgcgcgtgggcagggcgcggggacatggggcccgacatggagctgcccagccactcgaagcagctcctgctgcagctgaaccagcagaggaccaagggcttcctgtgtgacgtcatcatcatggtggagaactccatcttccgggcccacaagaacgtcctagccgccagcagcatctatttcaagtccctggtcctgcacgacaacctcatcaacctggacacagacatggtcagctccacagtgttccagcagatcttggacttcatctacacaggcaagctgctgcccagcgaccagccagccgagcccaacttcagcaccctcctcactgccgccagctacctccagctgcccgagttggcagccctctgccgccgcaaactcaagcgagccggcaagccctttggctctgggagggcggggtccactggcatggggcggcccccccgcagccagcggctgtccacggcctctgtcatccaagctcggtatcaggggctcgtggatgggcgcaagggggcccacgccccccaggagctcccccaagccaaaggctcagacgatgaactctttcttggtggctctaaccaggatagcgtgcaaggtctgggccgggctgtctgcccagctggcggggaggcgggtctggggggctgcagcagcagcaccaacgggagcagcgggggctgcgagcaggagctgggcttggacctgtccaagaaaagcccacccttgccccctgccaccccaggtccccacctcactcccgatgacgcagcccagctgagcgacagccaacatggctcgccccctgcggcctctgctcctcccgttgccaacagtgcctcttattctgagctggggggcacccctgatgagcccatggatctggagggggccgaggacaaccacctgagcctgctggaggcgcctggtgggcagcctcggaagagcctccggcactccactcggaagaaggagtggggcaagaaggagcctgtggctggctccccctttgagcggagagaagcagggcccaagggtccctgcccgggagaggagggtgagggggtcggggacagggttcccaatggcatcctggctagtggggctggccctagcgggccctatggggagcccccctacccctgcaaggaggaggaggagaacggcaaggatgcaagtgaagacagtgcgcagagcgggagcgaggggggcagcggccatgccagcgcccactacatgtaccggcaggagggctacgagacggtgtcctacggggacaacttgtatgtgtgcattccctgcgccaagggcttccccagctctgagcagctcaatgcgcacgtggagactcacacggaggaagagctgttcatcaaggaagagggggcctacgagacaggcagtgggggtgccgaggaggaggccgaggacctgtcagcacccagtgcggcctacacggctgagccccggcccttcaagtgttcggtctgcgagaagacctacaaggacccagccacgctgcggcagcacgagaagacgcactggctgacacggcccttcccctgcaacatctgtggcaaaatgttcacgcagcgcggcaccatgacgcgtcacatgcggagccacctgggcctgaagcccttcgcctgcgatgagtgtggcatgcgcttcacccgtcagtaccgcctcacggagcacatgcgtgtgcactcgggcgagaaaccttacgagtgccagctgtgcgggggcaagttcacccagcagcgcaacctcatcagccacctgcgcatgcacacctccccctcctagaagccaaagacccgcgggcgccctctgccaccttgctccccgggaacccatggaaggagaagcgaggtgatgcagcagcaggggcaagaccctgggtccagtggaggctccgggtggcccctctggcccccactgcccacacccagagctttaatggacagtccgtaccaagcagagccgagaggagggaagccaggggtcccagcccgtctacctccccatcccacccaggcccccagctccccgcgggggccaccgcagggcctgtgggctgggtcacgtgggtctcgctgggacctggtccctttgttgcaggcggcttggagaaagggcagtgggacgctggccacggccagggtggtgtcgggagcaggcctcaccccgctggccgtgtctgtgtgtgtgcacgtgtgcttgtgtctgtgcgggcgcgtgcagccctggttctgcagggaacaggtgctgggggtgcagatccctccctccttgagccagggtggcactgttcactggcgctgggacagtcagggtgaccccaccgcctacctctctacatctaaagagccctctgggcctgtgttgctgttattcctactgatctgttcctctgtttttctttttgatttttgttttttaaaccaaaacagacaatagcttattttctttccgccccctccggggctgagcctgggtctgaagactgaatgtaacaggggccgctggcactcctgcgcgtcccccggctctggcgctgcaggggtgtcggcgcgccacctctccaggccccagaagcccttcttgcccaaaggcttccctggtccctgagccctgcctcggctgcctcaggggagagtgcttttcctgtagtttccaaggaatattctttgtttagaggtacttgttttttattaagagaaaaaccagtgtaacgtttatgtgactgtttgaactggaaggtctggggttccggggggtggggggaggctagactcaatgccggggccgtcggtactcttgttttcatttgtgtgtgcgtgcgtgtgtgtgtgtgtatgtgcgtatgtgtgtgtctatgtgtggtgtgtgccgtatgcatgggcagatgtttcgctttccctccttcctcgctgaacaaggtggagacttctgaccttttgctacctcttgaattcatgacaacgatatgttggtgactggcagtggaagcccttgacactcttgttttccttcgcttagcacctaggaagtcgtgtgcaggagccagcagggcgccaagtggcccagtgcctgcagctcacctgtgggttttccctttgagcctttggccacatccacctcgaggggaccctggcaccccgggcacacaaacctctgtggtataggtgaggggtgtgaggccccagcctggagccaggcactgggtgctgacaggggaaccatgaggagggtggcaggtctttgcagctcccggccagggtgaggcggaagtgagccctcatcctgccactcctatcctccattcctgcaagagttttaagcttgagagagctgaccacagggccccccggggaacagggatggcacttccctgagcagtcctggcccccggccactgtctcggggcccacctctcgcccctcatcttggtaattagccagcctcagatacttctgtgggccctgaagtgggctctcaaggtcagaccaaggttgctgatctcagtcccactgtcttcagccagctgaagctgtggggctgggctggcagcctttattgtcatcttgcttcaccatttttttttctctctcttttcattctattttaagtttagaccaaaaaaatacagagtcatcccctacccccacccctctagagaccctccagctaaaaacagagcctgagttcagggacccaagtggtgagcggcgtcttttgggggtgagggagcttgggtagatgaggctcctggctgagccctccctgtggtgatcccagcctaagatggcccctcttccctcctggtgggagacagaggactggaccctgggtctcaggttccagcaagtcaggctagggacctggggggaggagacccatggacttcacccatactcagtgagggggctcctgccgtcctgacgccaccccgccccatcagcacttaagccacatgacacaaagtctgtaccgcacgggaaatgttcacgcgcctggccgtgtgcatggcctcccgggctgtgggcagccgcatctgtgaggtgactcgtgaaagtaggtgattcctttgcagaacttcagggactgggagcagaggcccctcactcaacgacgtttgtgcgacatagtattgtatccaccttagtattgtatcgagccttttctgtgttttaatgagaaagcagaacactagtttcctatttaagactttaagggtttgtggggcggggcgggattaacacaacatttggctttgttttctttttcctttgatttccacatcaggtgtgtgcgagtgtgtgtgtgtggagatgttaagagcctcacaaggaaactgggttattggaggccaaggcggcttacagttctctgcgttcgtcacttaattcctgaatgtttcagagaaacaggaatcagaaaatagcagatatcatgtaggaaagagaggataaacaaagaaaaaagaaaaaaaaataagctcatacccaaattcacaaagcctattttttaaaccaaagcacattttgaatgagtatggaacctccatgggctcagaaaaaagatgctaatatatttatctcattgtttacataagcttttacagtttcagacctcagcagctgtaaggccagtccagggaaccctcccctgctgctggaaacccttctgagttggccctggagtggctcacgggcagagaagggtagccctggggctgggggagggattggaagcctccctggagtcacctgagccctcgtccccattcccagggcccctccaagcccagctggcaccaaagagcttgggcccgtgctgaccagcccccaaggccctctggccggaccatgctggtcctgaccagctagcctacgcggggatggccgtcagttctggccacaggacccgagtctgggcttgggtccccctgctgctctgcccgtgacccttggggatgggttgatgcgagggtcccactcaagccaaaaagccgggacctttgcgcagctctgtcgactctggtgggtccccactcctggggccccctaaccccaccccaggcagcggaaggggctgactgggtctggtccttaccaacatagacggtgcaaacactcttaacagtgttgtttttgtatcaatatgtttgtgcagtgatgaatgtatttatttctcagacttggggcgagtgagcgggtggcaggccgggctccgccactgcatgctcccgccggaccgagccccagcaagggctcctccaggattgcaaaaaaaaaaggaagagaaaagatgaacctttaagcaaataagaatctcagagactcgcagcatagccatacacctcagcctgtgaaatgaacgatccggaccctcaccaactttccccacctcaggcagccctgtgtgtttaccgttcatcaccactcgggggcaccgggccgcccacccactcccaaaatccgtcagtattcactggacctcaggccctgtgcaggagtgcgatccgggctgggccgctgggcaggctgaccccctgccctcctgcggccatcctgagttggggtgaggcctgggcagccggagggcagggctcagggagcaggaggctgcatccgtccacccccaggcgtgggggacaaaagccaaaggtgccaggccttagagcagacaagggctctcagccctggcatgccccctaaagggaccaaggtcctcctatttcccagaaccccgttggggcagatgttactgaacctgtgaatcagacgccaggagtgagggctggggagggacctaactggagcctcagtctgacattccacgccggggtgggggtgggcatgagcggtgggaactgaggctgcccaggacccccttcctaggatgccccggcttcagtcaccccactttaactttctaccaggaccccctccccctacctcaccttgctatttattgctgtaatttattgacctcaaaaatgctgcataacagacctcactggggcagggaggatccccagggctcccaccctccacttggcgggccccgtggggccaggtgctgaggggagcctctctaccccacccatcactagcttccctctgccctctcccaccccgggggggacccaggttgggcactggctcatttctcgcaaatacctcgaaggggaggggggagggatggggttatagctgttttgtttaattggaactggaagagggatcatgttttgttttatgcccttcccagaaggggggagggacaccgggatcgcactcctgtactggccaccgccgctgtcacttgtcacattgagttcatgtcccttgagagtttgtataaattcaggtcagagctgcagctacacagctgcccagtgtcatagaaaagcaattcaccaacgactgatctctccattcagaagtgtgcagtcttaaatgtacagcgataagaaactgttattttatgatcttttcattaaaagcttgattgaaaaaaaaaaaaaaaaaa

SEQ ID NO: 3926 - DNA, 6636 bp, Homo Sapiens
  NM_015100
ggggggagtcggcgtctctctcccccgcgccagctcccgtacacggagccgcattccttggcccccccacccccctccctcggggcccccccgcccccctcgggaaaaaaatccaccccgaatcactcgaacccgagggaggcttcctttcacccttggggagacgagctttcaacggttacctcttcttcgtctccccccaagcccccgtcccctccccctgctcccacccccttctggcgccgggtgtaaggtccctttaaggcgacggcgccttcctcgggtcagactaccggcggcgacgaccacaggagcatggcggacaccgacctgttcatggaatgtgaggaggaggagttggagccatggcagaaaatcagtgatgtcattgaggactctgtagttgaagattataattcagtggataaaactaccacagtttctgtgagccagcagccagtctcggctccagtgcccatcgctgcccatgcttctgttgctgggcacctctctacatccaccaccgttagtagcagcggggcacagaacagcgacagtacaaagaagactcttgtcacactaattgccaacaacaatgctggcaatcctttggtccagcaaggtggacagccactcatcctgacccagaatccagccccaggtctgggcacaatggttactcaaccagtattgaggcctgttcaggtcatgcagaatgccaatcatgtgactagttcccctgtggcctcacaaccaatatttatcactacgcagggatttcctgtaaggaatgtccggcctgtacaaaatgcaatgaatcaggttgggattgtgctgaacgtacagcaaggccaaacggttagaccaattacactagttccagccccaggtacccagtttgttaagccgacagttggagttccacaagtgttctcccagatgacccctgtgaggccaggctccacaatgcctgtgaggcccaccaccaacaccttcaccaccgtcatcccggccactcttaccattcgaagcaccgtcccacagtcccagtcccagcagaccaagtccactcccagcacttctaccactcccactgccacacagccaacctcactggggcaactagctgttcagtctccaggccagtcaaaccagaccacgaatcccaagctagctccctccttcccctctccacctgcagtgagcattgccagctttgtcactgtgaagcgacctggtgttacaggcgaaaatagcaatgaagtggccaaattggtgaatacccttaacaccatcccttccctgggccagagtcctgggccagtggtggtgtccaacaacagctctgctcatggctctcaaagaaccagcggacctgagtcttcaatgaaagtgacctcttccatcccagtatttgacctccaggatggtggacggaaaatatgtccacgatgtaatgctcaatttcgtgttactgaagctttgagaggtcacatgtgttactgttgcccagaaatggttgaataccagaagaaaggaaagtccctggattcagaacccagtgtcccatcagcagcaaagcccccatcccctgagaaaacagctcctgttgcttccacaccctcttctacacctattcctgctctgtcaccgcctaccaaagtaccagaaccaaatgagaacgtgggcgatgccgtccagaccaaactcattatgcttgtagatgacttctactatggacgggatggtggcaaagtagcccagctcacaaatttccctaaggtcgccacatctttccgatgcccacattgtaccaaaaggctaaaaaacaatattcgattcatgaaccatatgaaacaccacgtagaactcgatcagcagaacggtgaggtagatggtcacactatctgccagcactgttaccgccagttttccactcccttccagcttcagtgccacttggaaaatgttcatagtccctatgaatctactaccaagtgcaagatctgtgaatgggcgtttgaaagtgagccactatttctccagcatatgaaggatactcataagcctggagagatgccttatgtttgccaggtgtgtcaatatcgctcctcactctactctgaggtagatgtccattttcggatgatccatgaggatacccggcatctgctctgcccttattgcctgaaggtcttcaaaaatggcaatgcattccaacagcattacatgaggcaccagaagagaaatgtttatcactgcaacaaatgccggctgcagtttctctttgccaaggacaaaattgaacacaagcttcaacaccataaaaccttccgtaaacccaagcagctggagggcttgaaaccaggcaccaaggtgacaatccgggcttcccgagggcagccacgaactgttcctgtatcctctaatgatacacctcccagcgccttgcaggaggcagcaccgctgacctcctcaatggaccctctgcctgtcttcctttatccccctgtccagcgcagcatccagaagagagctgttaggaaaatgagtgtcatgggccggcagacatgcctggagtgcagcttcgagatcccagacttccctaatcatttccctacttacgtacactgctctctgtgtcgctatagcacctgctgttctcgagcttatgccaaccacatgatcaacaatcatgttccacggaagagccccaagtatttggctttgtttaaaaattctgtgagtggaatcaagctggcctgcacttcatgtacctttgttacctctgtgggcgatgctatggccaagcatttggtattcaacccctctcacagatccagcagcatcctgccacggggactcacttggatagctcactcaaggcatggccagactcgtgaccgagtgcatgaccggaacgtgaagaatatgtaccctcctccttccttccccactaacaaagctgccactgtgaaatctgcgggggccaccccagctgagcctgaagagctactaactcccttagccccagcactcccatcaccagcctcaactgcaaccccaccaccaacccccactcacccgcaggctttagcccttccaccgctggctacagagggagccgaatgtctgaatgttgatgatcaggatgaagggagcccagtcacccaagaacctgagctagcatcaggtggtggtggtagtggtggagttggcaaaaaggagcagctgtctgtgaagaagcttcgagtagtactgtttgctctatgctgcaatacagaacaggcagctgaacacttccgaaatccccagcgacgtattcgccgttggcttcgacgtttccaggcctcccagggggagaatctagagggcaaatatctgagctttgaggcagaagagaaactggctgagtgggtgctaacccagcgcgaacaacagctacctgtaaatgaggagaccttgttccagaaggccaccaaaataggacgttctttggaaggggggtttaagatctcctatgagtgggctgtgcgtttcatgctgcggcaccacctgactccccatgcccggcgagctgtggcccacaccctacctaaggatgtagcagagaatgcaggactcttcattgattttgtacaacggcagattcacaaccaggacttacccttgtctatgattgtggctattgatgagatctctttgttcctggatacagaggtgctgagcagtgatgatcgaaaggagaatgccctgcagacagtgggcacaggggaaccttggtgtgatgtagtcctagccattctggcagatggcactgtccttcccaccctggttttctacagagggcagatggatcagcctgctaacatgccagactccatattgctagaggcaaaggagagtggctacagtgatgacgagatcatggagctgtggtcaactcgagtgtggcagaagcacacagcttgccagcgcagcaaaggcatgcttgtgatggactgtcatcgcactcacttgtcagaagaggtactggctatgcttagtgcctctagcactttgcctgcagtggtcccagcaggctgtagctccaaaattcagccattagatgtatgcatcaaaagaactgtcaagaacttcctgcataaaaaatggaaggaacaggctcgggaaatggcagatactgcatgtgattctgatgtcctgcttcagctggtgcttgtctggctgggtgaagtgctaggtgtcattggggactgtccagagctagttcagcgctccttcctggtggctagtgttctgcctggccccgatggcaacattaactcacctacaagaaatgctgacatgcaggaggagctaattgcctccctagaggagcaactgaagctgagtggggaacattctgagtcttccactccacgacccagatcatctcctgaagagacaattgagcctgaaagtcttcaccagctctttgagggtgaaagtgagaccgagtctttctatggctttgaagaagctgacctagatctgatggagatttgagtgttggggtcatgagggggtgtggagtgagggtgggaacatgtgagggagggtaaaggggcttagggaaaagggggcataccaggtggggtatttggtttctattttttaattttataccaccactcccccctgaagttgacttacacttccctgtggatttgtggattaattaggaaaaccaatagtaatcacgtctgagccaaggagctggcccattggtcattcacttctgctaaaaacaggtttttgtgactttttttttttttaaatttaaatcactgtgtttggtatttttctgacaaaattaagaaaaagaaaaaaaattatttgtgggcaaatgttaaatttttttgtttccccttttacctcaattgtatcatagtactgggtttttttgtttgttttattgtgtggccaatgtctttgggcatgatgctatctaatcattgttaatgtgagaacatttctgaagatgggaaagacaaattatgtagctcacaaactggtttattatatatatggataaaaaacttttttcattgtggtcttaacacttttatataaaaatgaaaatggaaaaaaagtcccactgaactctctcttccttctccttttctttccttccctctccagagatgttggtttctacagcaaccctagatataaaattgtggctttaaaaatgcatgaaaccacctttaattatccagaatgaatagatttgtcttttcctcaccaccttccctccaaaacatgacataaacaatattttttgcacttgtgatccttggcccctttccccattctcaacaccatccatccctctggacaaaggatcatacaggtgttattagcaagcaagagatactgaagcgatcaaacagttttagggtggaagccattcccagtttgagtcttcatcctgtaagcccccaggggcagtccctgctttactgaacttcatcctgttagatggagagcatgcctgtttaagggattactggtcctacagccaggagctaattgttcaagaagtgttgaactttaaaaagacaagaccacttgttgaaatccagcgtgctctgtggctttcccctatttctcttaatacttagggaagaatctgacaggaagaagcgcacaggggtgtgcacaaagaaaatgacatgaatctttatttttcactgccagcttcaaggaaagaaaattttttctacaatttgcatgagggatttttttaattgtatgtactcatggttgtaaaccaaaacgtactgtaccgtacagagaaaaggagcaaaaaaccaagtcttctgtttatcctgaggctttccacaatgttcccctcctgtgagccaaggaggcaaactgcacaagcttgtaaatggttcgtctttaaaatgtacataagtggaacatttaataaaatgaggggaaatggatttataaacttgttttttttctaggtgaccctgtttaataggctttcacagactggggaatgctcaagatgtgatgggcctggtggtacaggtgtgacatttgttaccacccatttctcccaccccaccctgcttttttgtttgtttgttttttcatcccccagcacactataatatagtgaactggaaaagtcccttccagaaacagcttggccagctttgtgaacctttgacatctgaaaacaaccaaggatccatctgggcttctcttccccagctttttgcctgatgccattttattgacagacaatggactttgaagtcagcctttgcctttgagaaagttcaagaactatggttggtcacgtctatctacaacctaatcctactctttggtagtctctgcagcagccacagccttagcagagctggggttcctgtcttctgcacacgattgactttcttgatgggtaattttttttaagattataccaacagtggatcagctgggttttggccaggaagttgtctttgtggactctgcctgcatggcttagtagtagaaggaaatttttttttggttttgttttttataattcagtttaatcaataaacatgtatttattgactgttaaaaaaaaaa

SEQ ID NO: 3927 - DNA, 5020 bp, Homo Sapiens
  NM_015102
gacgcgaggcgggttcttggactgagtgtgcggcgcggtgcgccgccttccgaggctcctcccgcgggtggcagcggacggggcgcgcccctcggccagtcctcggtcctcaggcttgtggctccgttgagcaccggccgccgggcctctgggtccgtcgagtggagactctctgaaaagcgtgggctccgtggcctccggcgcggccgcggcgggtcggtctcctagatcatccgggaagcccacgggaccctcaggcgggcaggatgaacgactggcacaggatcttcacccaaaacgtgcttgtccctccccacccacagagagcgcgccagccttggaaggaatccacggcattccagtgtgtcctcaagtggctggacggaccggtaattaggcagggcgtgctggaggtactgtcagaggttgaatgccatctgcgagtgtctttctttgatgtcacctaccggcacttctttgggaggacgtggaaaaccacagtgaagccgacgaagagaccgccgtccaggatcgtctttaatgagcccttgtattttcacacatccctaaaccaccctcatatcgtggctgtggtggaagtggtcgctgagggcaagaaacgggatgggagcctccagacattgtcctgtgggtttggaattcttcggatcttcagcaaccagccggactctcctatctctgcttcccaggacaaaaggttgcggctgtaccatggcacccccagagccctcctgcacccgcttctccaggaccccgcagagcaaaacagacacatgaccctcattgagaactgcagcctgcagtacacgctgaagccacacccggccctggagcctgcgttccaccttcttcctgagaaccttctggtgtctggtctgcagcagatacctggcctgcttccagctcatggagaatccggcgacgctctccgaaagcctcgcctccagaagcccatcacggggcacttggatgacttattcttcaccctgtacccctccctggagaagtttgaggaagagctgctggagctccacgtccaggaccacttccaggagggatgtggcccactggacggtggtgccctggagatcctggagcggcgcctgcgtgtgggcgtgcacaatggtctgggcttcgtgcagaggccgcaggtcgttgtactggtgcctgagatggatgtggccttgacgcgctcagctagcttcagcaggaaagtggtctcctcttccaagaccagctccgggagccaagctctggttttgagaagccgcctccgcctcccagagatggtcggccaccctgcatttgcggtcatcttccagctggagtacgtgttcagcagccctgcaggagtggacggcaatgcagcttcggtcacctctctgtccaacctggcatgcatgcacatggtccgctgggctgtttggaaccccttgctggaagctgattctggaagggtgaccctgcctctgcagggtgggatccagcccaacccctcgcactgtctggtctacaaggtaccctcagccagcatgagctctgaagaggtgaagcaggtggagtcgggtacactccggttccagttctcgctgggctcagaagaacacctggatgcacccacggagcctgtcagtggccccaaagtggagcggcggccttccaggaaaccacccacgtccccttcgagcccgccagcgccagtacctcgagttctcgctgccccgcagaactcacctgtgggaccagggttgtcaatttcccagctggcggcctccccgcggtccccgactcagcactgcttggccaggcctacttcacagctaccccatggctctcaggcctccccggcccaggcacaggagttcccgttggaggccggtatctcccacctggaagccgacctgagccagacctccctggtcctggaaacatccattgccgaacagttacaggagctgccgttcacgcctttgcatgcccctattgttgtgggaacccagaccaggagctctgcagggcagccctcgagagcctccatggtgctcctgcagtcctccggctttcccgagattctggatgccaataaacagccagccgaggctgtcagcgctacagaacctgtgacgtttaaccctcagaaggaagaatcagattgtctacaaagcaacgagatggtgctacagtttcttgcctttagcagagtggcccaggactgccgaggaacatcatggccaaagactgtgtatttcaccttccagttctaccgcttcccacccgcaacgacgccacgactgcagctggtccagctggatgaggccggccagcccagctctggcgccctgacccacatcctcgtgcctgtgagcagagatggcacctttgatgctgggtctcctggcttccagctgaggtacatggtgggccctgggttcctgaagccaggtgagcggcgctgctttgcccgctacctggccgtgcagaccctgcagattgacgtctgggacggagactccctgctgctcatcggatctgctgccgtccagatgaagcatctcctccgccaaggccggccggctgtgcaggcctcccacgagcttgaggtcgtggcaactgaatacgagcaggacaacatggtggtgagtggagacatgctggggtttggccgcgtcaagcccatcggcgtccactcggtggtgaagggccggctgcacctgactttggccaacgtgggtcacccgtgtgaacagaaagtgagaggttgtagcacattgccaccgtccagatctcgggtcatctcaaacgatggagccagccgcttctctggaggcagcctcctcacgactggaagctcaaggcgaaaacacgtggtgcaagcacagaagctggcggacgtggacagtgagctggctgccatgctactgacccatgcccggcagggcaaggggccccaggacgtcagccgcgagtcggatgccacccgcaggcgtaagctggagcggatgaggtctgtgcgcctgcaggaggccgggggagacttgggccggcgcgggacgagcgtgttggcgcagcagagcgtccgcacacagcacttgcgggacctacaggtcatcgccgcctaccgggaacgcacgaaggccgagagcatcgccagcctgctgagcctggccatcaccacggagcacacgctccacgccacgctgggggtcgccgagttctttgagtttgtgcttaagaacccccacaacacacagcacacggtgactgtggagatcgacaaccccgagctcagcgtcatcgtggacagtcaggagtggagggacttcaagggtgctgctggcctgcacacaccggtggaggaggacatgttccacctgcgtggcagcctggccccccagctctacctgcgcccccacgagaccgcccacgtccccttcaagttccagagcttctctgcagggcagctggccatggtgcaggcctctcctgggttgagcaacgagaagggcatggacgccgtgtcaccttggaagtccagcgcagtgcccactaaacacgccaaggtcttgttccgagcgagtggtggcaagcccatcgccgtgctctgcctgactgtggagctgcagccccacgtggtggaccaggtcttccgcttctatcacccggagctctccttcctgaagaaggccatccgcctgccgccctggcacacatttccaggtgctccggtgggaatgcttggtgaggaccccccagtccatgttcgctgcagcgacccgaacgtcatctgtgagacccagaatgtgggccccggggaaccacgggacatatttctgaaggtggccagtggtccaagcccggagatcaaagacttctttgtcatcatttactcggatcgctggctggcgacacccacacagacgtggcaggtctacctccactccctgcagcgcgtggatgtctcctgcgtcgcaggccagctgacccgcctgtcccttgtccttcgggggacacagacagtgaggaaagtgagagctttcacctctcatccccaggagctgaagacagaccccaaaggtgtcttcgtgctgccgcctcgtggggtgcaggacctgcatgttggcgtgaggccccttagggccggcagccgctttgtccatctcaacctggtggacgtggattgccaccagctggtggcctcctggctcgtgtgcctctgctgccgccagccgctcatctccaaggcctttgagatcatgttggctgcgggcgaagggaagggtgtcaacaagaggatcacctacaccaacccctacccctcccggaggacattccacctgcacagcgaccacccggagctgctgcggttcagagaggactccttccaggtcgggggtggagagacctacaccatcggcttgcagtttgcgcctagtcagagagtgggtgaggaggagatcctgatctacatcaatgaccatgaggacaaaaacgaagaggcattttgcgtgaaggtcatctaccagtgagggcttgagggtgacgtccttcctgcggcacccagctggggcctgtctgtgcccctcctgccctgcaggctgtcctccccgcctctctgcagcctttcacttcagtgcccacctggctgacctgtgcacttggctgaggaagcagagaccgagcgctggtcattttgtagtacctgcatccagcttagctgctgctgacacccagcaggcctgggttccgtgagcgcgaactccgtggtggtgggtctggctctggtgctgccatctacgcatgtgggaccctcgttatcgctgttgctcaaaatgtattttatgaatcatcctaaatgagaaaattatgtttttcttactggattttgtacaaacataatctattatttgctatgcaatattttatgctggtattatatctgttttttaaattgttgaacaaaatactaaacttttacacgtctaaaaaaaaaaaaaaaaaa

SEQ ID NO: 3928 - DNA, 4173 bp, Homo Sapiens
  NM_015115
aaggcgagatgggcgggctgggagtgcccggcggcgggtcctcagcttcgagccgaggtgcagtgagctggtggggggaccgcgaggcgagcgcgggagcctgggcggcgagccgggtgtgagctgcctgaaaatgcactcggatgccgccgctgtcaattttcagctgaactctcatctctcaacactggcaaatattcataagatctaccacacccttaataagctgaacctaacagaagacattggccaagacgatcaccaaacaggaagtctgcggtcttgcagttcttcagactgctttaataaagtgatgccaccaaggaaaaagagaagacctgcctctggagatgatttatctgccaagaaaagtagacatgatagcatgtatagaaaatatgattcgactagaataaagactgaagaagaagccttttcaagtaaaaggtgcttggaatggttctatgaatatgcaggaactgatgatgttgtaggccctgaaggcatggagaaattttgtgaagacattggtgttgaaccagaaaacgtagttatgcttgtcctagcttggaaattggatgcacaaaacatgggttattttactctacaggagtggttaaaaggaatgacttctctccaatgtgatacaacagaaaaactcagaaatactttggattacttaagatcattcttaaatgattctacaaactttaaacttatttacagatatgcgtttgactttgcacggcaatcaaaatacaaagttattaataaagaccagtggtgcaatgtcctagagtttagcagaacaattaatcttgacctcagcaactatgatgaagatggagcatggccagttttgttggacgagtttgtggagtggtataaagacaaacagatgtcctaggactttatgcatagcagcgagagagtcactgttaccacagttttgtcacccattagccataaattgctgtttgtatcaaagcgcatgctgcttctcttgcactgtttccctttcgcagggacatgttggtgtttgctattgaattggccagctctgcttgctgtgtggcattgttctcttggaaggctgctttgcagtttgtatttacactacagattggtgaatttgccaacgtcctcactgtgattatgtgtatattgctgtttaaattttgtatatgtgtataaaaggaaaaaggttcacctagagattatttctgaaaaatgtattgtaaaaataattttgtggcatttctagtccctttttttgaatgaaccaattatactttatttggtctcctatgtagcatttcagaaaacaagagaaaactgttaccatgaacaaacattgccagaattaaccttactgtttaagaggccaacttctggaaggaggtaggagtcataactttttagaggcatatgccaaatatcatttggtatacttaacaatattagtgttttaaaatgatgagttataattatttgaacatatagatatgtaacatgccacaaatcatttctaccatgcaaggtgtataagttgtttattttttagtgttaaaactataatagcttgaatataggtaccaatgaacaaattcaaattgcacctcttttcttaaaagaatgggatttaaactcttataaacattctttaacttttttgtttgtttgttctctttttttccttttgcattcttctagccagtgattgatctgctaatgctttctttgccactctaagtaaaatttatttcacctcctcaatgaaaacctcatggttttgctggctgtttataactgcatcgcacttctagttgtggcttgaattttcagttaagctttcatggtatgtaattttccagccttttgagaaaacaagcatactataagtgagagctgttttgttttccttgtttgtttgtttcatgctaggcttttcctggcagcatgtccattgcaggcagtggacaagaaaccaccagcattgagctaacccagtacatgctaggacctgtcctagaggggccacttttcattacctgagttatttgtacagaagggcaatagccattatttttgtggatgaggaaacaagaataaacagaatggtatttttaggtttgtattttatgtctttttttttttttttttttgccattcttgaggaaatatagagatgacatgttttcaccccaactatctggtgctattgaatgactaattcagtccctaaagttctgtgaaaacacaaaagtctaatgatttgagtgagtaaaaggtaatggtgcatttgaacaagtaaatgctgtcgtggtcagcaagatccgtgatttgaacatgtgatgactggaaaaaggtttgggttatttggaactctggctaaaacttctttcgggtgacatgtgatcgtttaaatggcattaagtgaataaagcacacagacagtgctactcttgaccactattttaccatttctttgcaaacagtgttcacattttcatattttttccctaactaaaccaccaaagaaagaaattttgtatgtatatacagtgtgtgtgtatacaaaatcatgatatagtagaatgcaactactttctttttctaccaaacgaaaggttttatttgctgtgaaataaaccagaagtttaaaaaaccctgtagtgattaagcatacttaaccactccttatttgtagattcactttcaaccttaaaaattaataccagtttgcataaaccaatatctgaaaagaacaggaaatgttaatggcaagcaacagctattaatactgatgtgatggatgcatttgttttgcagtggtgactggcctaggcaggtttggatctgtgaagaattgattcattttcaaaattattccataaagttaaaaagttacactttaaaggcaacaggtcatacagttctttaaatctgatcaactgtagctttatttaaagcaaatataaatcatagatgaagttattttaaacactatgttagaatatagagatttttaaaaaatgctgataagcacagttaattctaaaatgagaggattgttacaggagggagatgttacagttaatccacaatcaacattttgatggtagggaaaaaactgcgtaaaaactattgcattatgtatgataagaaagtaagtattccaaagggataatcttgcatattaagaaaactccaaataatctttaaactgccttgaaaaataaacctctttgactgctgagcggcagagtgcttacccttgattgtcttgattttatatatttatttctaaggggagaaaaaggggtcagacagagtaatatgatacattttcttaaaaacttctctaagttgcacaaaactgaacaatcatcaagcacttatttactggctaatgttgaataaattagggtgccttcatctgggttttctttagtacctaagtctacaaccctttctctttttctattgtgtttcgaactccacattgcaatactctgttgtcatggaatacaacctttagatgtttactgctgaagtaggtcagaaattgtattatttgatttgcctcaaacatccactgtaatgttacatgcaccttttttgaagcatgaactctgaattatgtttttataaatctgactaggcaaacctagattctggtttcacaatggatttattttctctctcagtctccattttaacagtgcttttgaagtttatacagaaagctttaaaagttagtttgtgcccttggtttttattcttaaaactgctaaaatacctctgtaagccttatcctttattctttcatatgttgtataataaatgtatagatttcattgaccaactaaaatgttgggtgtctgtaaatgagaccaaaacgtgggttgcttttttcataaaataatttctattgggggttactgttcaatgacagcaggtaacctataactgtgaatgcttcgtgtcgtcagtatttgcattacattcataaaagtgtgcaagtcctgtgactcccagcttaactgaaatactgttatgccacctaacttgagtacagcaaactggttttaggtttcaatgacattgatgtaaaatgatatcccatgaataaaaagtatttgtgtttggtttcagaaaaaaaaaaaaaaa

SEQ ID NO: 3929 - DNA, 12928 bp, Homo Sapiens
  NM_015120
aggcgggcggcactgcgcctaagctgggccacaaccgccagtcagggctctccccttcccctccctccccccctcctcctcctcctctgccgcccagagcgagacaccaacatggagcccgaggatctgccatggccgggcgagctggaggaggaggaggaggaggaggaggaggaggaggaggaggaagaggaggaggctgcagcggcggcggcggcgaacgtggacgacgtagtggtcgtggaggaggtggaggaagaggcggggcgggagttggactccgactctcactacgggccccagcatctggaaagtatagacgacgaggaggacgaggaggccaaggcctggctgcaggcgcaccccggcaggattttgcctccgctgtcgcccccgcagcaccgctactcggagggcgagcggacctccctggagaagattgttccattgacctgtcatgtatggcaacagatagtatatcaaggcaatagtagaacacaaatttctgatactaatgtggtctgtttggaaacaacagctcagcggggttctggggatgatcagaaaacagaatcttggcattgtcttcctcaagaaatggactcttcccaaaccttggatacatcccagactaggtttaatgtgagaacggaagatactgaagtgacagacttcccctctctggaggagggcatattgacgcaatcagaaaatcaagtaaaggaacccaacagagatctcttctgttctccactgctagtcatacaagatagctttgcttctcctgatttgcctttgctgacctgtttgacacaagaccaagaatttgcgcctgattctttatttcatcaaagtgaactaagttttgcacctctgaggggaattcctgataagtctgaagatactgaatggtcttctcgaccatcggaagttagtgaagctttattccaggctactgcagaagtagcttcagacttagcaagcagtcgctttagtgtatctcagcacccgcttataggcagcacagctgttgggtctcagtgcccttttttaccttctgaacaagggaataatgaagagactatttcgtctgttgatgaactgaaaattcccaaagactgtgatcgttatgatgatctttgttcatatatgtcatggaagacacgaaaagatacacagtggcctgaaaacaatttagctgataaagatcaagtttcagttgcaacttcatttgacataactgatgaaaacatagctactaaaagaagtgaccattttgatgctgctcgttcatatgggcagtattggacacaggaagattcatctaagcaggcagaaacatatttaaccaagggcctgcaggggaaggttgagtctgacgtcattactctggatggcctaaatgaaaatgctgttgtatgcagtgaaagagttgctgaactacaaagaaagccaacaagagagtcggaatatcactcttcagatctcagaatgttgaggatgtctcctgacactgtgccaaaggctcctaaacatttaaaagcaggagacacttctaaaggaggcatagctaaagttactcaatccaacttgaagtcaggcatcactaccactcctgttgattcagacattggatctcatttatccttgtcccttgaggacctgtctcagttggctgtaagttctcctctagaaactactactggtcaacacactgatactctcaaccaaaagacattagcagatactcatctaactgaagagactctgaaagtcacagctattcctgaaccagctgaccagaagactgcaacaccaacagtactctctagttcccactcacatagggggaagcccagcattttctaccagcagggcttgccagacagtcatctaactgaagaggctttgaaagtttcagctgctcctggactagctgaccagacaactggcatgtcaactctaacctctacttcctactcacatagagagaagcctggtactttttaccaacaagagttaccagagagtaacttaaccgaagagcctttggaagtttcagctgctcctggcccagtggagcagaagacgggaatacctacagtatcctctacatcccactcacatgtagaggacctcctctttttctatcgacagaccttgccagatggtcatctaactgatcaggctctgaaagtctcagctgtgtctggaccagctgaccagaagactgggacagcaacagtactctctactccccactcacatagagagaagcctggtattttttaccaacaagagttcgcagacagtcatcaaactgaagagactcttactaaagtttcagccactcctggaccagctgaccagaagactgagataccagcagtacagtctagttcttactcacaaagagaaaagcctagtattttgtacccacaggacttagcagacagtcatctacctgaagagggtctgaaagtttcagctgttgctggaccagctgaccagaagactggcctaccaacagtaccctctagtgcatactcacacagagagaagctccttgttttctaccaacaggccttgctggacagccatctacccgaagaggctctgaaagtttcagctgtttctggaccagctgacggaaagactgggacaccagctgtaacctctacttcctctgcgtcctcttcacttggagaaaagcccagtgctttctatcagcagaccttacccaatagtcatctaactgaagaggctctgaaagtatcaattgttcctggaccaggtgatcagaagactgggataccctcagcaccatctagtttctactcacacagagagaagcccattattttttcccagcagaccctgccagactttcttttccctgaagaagctctgaaggtttcagctgtttctgtattggctgcccagaagactgggacaccaacagtgtcctctaattctcactcacatagcgagaaatctagtgttttctaccagcaagagttgccagacagtgatctacctagagaatctctgaaaatgtctgctattcctggactgactgaccagaagactgtcccaacaccaacagtaccttcaggttccttctcacatagagagaagcccagtattttctatcaacaggagtggccagatagttatgcaactgaaaaggctctgaaagtttcaactggccctggaccagctgaccagaagactgagataccagcagtacagtctagttcttacccacagagggagaagcctagtgttttgtacccacaggtgttatcagacagtcatctacctgaagagagtctgaaagtttcagccttccctggaccagctgaccagatgactgacacaccagcagtaccgtctactttctactcacaaagagagaagcctggtattttctaccaacagaccttgccagagagtcatctgcctaaagaggctctgaaaatttcagtagctcctggactagcagaccagaagactggcacaccaactgtaacctcaacttcctactcacaacatagagaaaagcccagcattttccaccagcaggccttgccaggtactcatatacctgaagaggctcagaaagtttcagctgttactggaccaggtaaccagaagacttggataccaagagtactttctaccttctactcacaaagagagaaacctggtattttctatcaacagaccttgccaggtagtcacatacctgaagaggcacagaaagtttcacctgttcttggaccagctgaccagaagactgggacaccaactccaacctctgcttcttactcacacacagagaagcctggtattttctaccaacaggtcttgccagataatcatccaactgaagaggctctgaaaatttcagttgcctctgaaccagttgaccagacaactggcacaccagctgtaacctctacttcctactcacaatatagagagaagcccagcattttctaccaacagtcgttgccaagtagtcatctaactgaagaggctaagaatgtttcagcggttcctggaccagctgaccagaagactgtgataccaattttaccctctactttctactcacacacagagaagcctggtgttttctaccaacaggtcttgccacatagtcatccaactgaagaggctctgaaaatttcagttgcctctgaaccagttgaccagacaactggcacaccaactgtaacctctacttcttactcacaacatacagagaagccgagtattttctaccaacagtcgttgccaggtagtcatctaactgaagaggctaagaacgtttcagcggttcctggaccaggtgaccggaagactgggataccaactttaccctctactttctactcacacacagagaagcctggtagtttctaccaacaggtcttgccacatagtcatctacctgaagaggctttggaagtttcagttgctcctggaccagttgaccagacgattggcacaccaactgtaacctccccttccagctcatttggagagaagcccattgttatctacaaacaggcctttccagagggtcatctacctgaagagtctctgaaagtttcagttgctcctggaccagttggccagacaactggcgcaccaactataacctctccttcctactcacaacatagagcaaagtctggcagtttctaccaactggcattgctaggtagtcaaatacctgaagaggctctcagagtttcttctgctcctggaccagctgaccagacaactggcataccaaccataacctctacttcctactcatttggagagaagccgattgttaactacaaacaggcctttccagatggtcatctacctgaagaggctctgaaagtttccattgtttctggacctactgaaaaaaagactgacataccagcaggacctttaggttccagtgcacttggagagaagcccattactttctaccggcaggctctgctagacagtcctctaaataaagaggttgtgaaagtttcagctgctcctggaccagctgaccagaagactgagacattaccagtacattctactagctactcaaatagggggaagcctgtcattttctaccagcagaccctatcagacagtcatttacctgaagaagctctgaaagttccacctgttcctggaccagatgcccagaagactgagacaccatcagtatcctctagtttatactcatatagagagaagcccattgtcttctaccaacaggccctgccagacagtgagctaactcaagaagctctgaaagtttcagctgttcctcaaccagctgaccagaagactgggttatctactgtaacttcctctttctattcacatacagagaagcctaatatttcttaccagcaagagttgccagatagtcatctaactgaagaggctctgaaagtttcaaatgttcctggaccagctgaccagaagactggggtatcaacagtaacctctacttcctactcacacagagagaagcccattgtttcctaccagcgagagttgccgcattttactgaagcaggtttgaaaattttaagagttcctggaccagctgaccagaagactggaataaacatcctgccctctaattcctacccacagagagagcactctgtcatttcttatgagcaggagttgccagatcttactgaagtaactttgaaagcaataggggttcctgggcctgctgaccagaagactgggatacaaatagcatcctctagttcctactcaaatagagagaaggccagtatttttcatcagcaggagttgccagatgttactgaagaagctttaaatgtttttgttgttcctggacaaggtgaccggaagactgagataccaacagtacctttaagttactactcacgtagagagaagcccagtgttatctctcaacaggagttgccagacagtcatctcacagaagaggctctgaaagtttcacctgtttctataccagcagagcagaagactgggataccaataggactgtctagttcctactcacattcacataaagagaaactcaagatttcaactgtgcatataccagatgaccagaaaactgagtttccagcagctacccttagttcctactcacaaatagagaagcccaagatttcaactgtgattggaccaaatgaccagaagactccatcccagacagcttttcatagttcctattctcaaacagtaaagcccaatattttatttcaacagcagttgccagatagagatcaaagtaaaggtattctaaagatttcagctgtccctgaactaactgatgtgaatactggaaaaccagtatctctctctagttcttattttcacagagagaaatcgaatattttcagtccacaggaattgccaggtagtcatgtaactgaagatgtgctgaaggtttcaacaattcctggaccagctggccagaaaacagtattaccaacagctcttcctagttccttttcacatcgagagaaaccagatattttctatcaaaaggatttgccagatagacatctaactgaagatgctctaaagatctcaagtgctcttgggcaagctgatcaaattaccggattacaaacagttccctctggtacttactcacatggtgagaatcacaagcttgtttcagaacatgtccaaaggctaatagataatttgaattcttctgactccagtgttagctcaaataatgtgcttttaaattctcaggctgatgacagagttgtaataaataaaccagaatctgcaggttttagagatgttggctctgaagaaatccaggatgcagaaaatagtgctaaaactcttaaggaaattcggacacttttgatggaggcagaaaatatggcactgaaacgatgcaattttcctgctccccttgcccgtttcagagatattagtgatatttcatttatacaatctaagaaggtggtttgcttcaaagaaccctcttccacgggtgtatctaatggtgatttgcttcacagacagccattcacagaggaaagcccaagcagcaggtgcatacagaaggatattggcacacagacgaatttgaaatgccggagaggcattgaaaattgggagtttattagttcaactacagttagaagtcctctacaggaagcagagagcaaagtcagtatggcattagaagaaactcttaggcaatatcaagcagccaaatctgtaatgaggtctgaacctgaagggtgtagtggaaccattgggaataaaattattatccctatgatgactgtcataaaaagtgattcaagtagtgatgccagtgatggaaatggttcctgctcgtgggacagtaatttaccagagtctttggaatcagtttctgatgttcttctaaacttctttccatatgtttcacccaagacaagtataacagatagcagggaggaagagggtgtgtcagagagtgaggatggtggtggtagcagtgtagattcactggctgcacatgtgaaaaaccttctgcaatgtgaatcctcactgaatcatgctaaagaaatactcagaaatgcagaggaagaggaaagccgggtacgagcacatgcctggaatatgaagttcaatttagcacatgattgtggatactccatttcagaattaaatgaagatgacaggaggaaagtagaagagatcaaggcagagttatttggtcatggaagaacaactgacttgtccaagggtttacagagtccacggggaatgggatgcaagccagaagctgtatgtagtcacattattattgagagccatgaaaagggatgtttccggactctaacttctgaacatccacaactagatagacacccttgtgctttcagatctgctggaccctcagaaatgaccagaggacggcagaacccatcatcatgcagagccaagcatgtcaacctttctgcatccttagaccagaacaactcccatttcaaagtttggaattccttgcagttaaaaagtcattccccatttcagaactttatacctgatgaattcaaaatcagcaaaggtcttcgaatgccattcgatgaaaagatggacccttggctgtcagaattagtagaacctgcttttgtgccacctaaagaagtggattttcattcttcatcacaaatgccgtccccagaacccatgaaaaagtttactacctccatcactttttcatctcaccgacattctaaatgcatttccaattcctctgttgttaaggttggtgttactgaaggtagccagtgtactggagcatctgtgggggtatttaattctcatttcactgaagaacaaaatcctcccagagatcttaaacagaaaacctcttccccttcatcatttaaaatgcatagtaattcacaagataaagaagtgactattttagcagaaggtagaaggcaaagccaaaaattacctgttgattttgagcgttcttttcaagaagaaaaacccttagaaagatcagattttacaggcagtcattctgagcccagtaccagggcaaattgtagcaatttcaaggaaattcagatttctgataaccatacccttattagcatgggcagaccaagttccaccctaggagtaaacagatcgagttccagactaggagtaaaagagaagaatgtaactataactccagatcttccttcttgcatttttcttgaacaacgagagctctttgaacaaagcaaagccccacgtgcagatgaccatgtgaggaaacaccattctccctctcctcaacatcaggattatgtagctccagaccttccttcttgcatttttcttgaacaacgagaactctttgaacagtgcaaagccccatatgtagatcatcaaatgagagaaaaccattctccccttcctcaaggtcaggattctatagcttcagaccttccgtctcccatttctcttgaacaatgccaaagcaaagcgccaggtgtagatgaccaaatgaataaacaccattttccccttcctcaaggtcaggattgtgtagtggaaaagaataatcaacataagcctaaatcacacatttctaatataaatgttgaagccaagttcaatactgtggtctcccagtcagccccaaatcactgtacattagcagcatctgcatctactcctccttcaaatagaaaagcactttcttgtgttcatataactctttgtcccaagacttcttccaagttggatagtggaactttagatgaaagattccattcattggatgctgcttctaaagcgaggatgaatagtgagtttaactttgacttacatactgtatcttcgagatcactggaaccaacctccaaattattgaccagtaaacctgtagcacaggatcaagaatctttaggttttctaggacctaaatcttcactggatttccaagtcgtacagccttctcttccagacagtaacactattactcaggacttgaaaaccataccttctcagaatagccagatagtaacctccaggcaaatacaagtgaacatttcagatttcgaaggacattccaatccagaggggaccccagtatttgcagatcgattaccagagaagatgaagaccccactttctgctttctctgaaaaattgtcatctgatgcagtcactcagataacaacagaaagtccagaaaagaccctattttcatctgagatttttattaatgctgaagatcgtggacatgaaattatagagcctggtaaccagaagctacgcaaagctcctgtcaagtttgcctcatcatcttcagtccaacaggttactttttctcgcggcacagatggccagcctttattattgccatataagccttctggtagtaccaagatgtattatgttccacaattaagacaaattcctccatctccggattccaaatcagataccaccgttgaaagctcccattcaggatccaatgatgccattgctccagacttcccagctcaggtgctaggcacaagagatgatgacctctcagccactgttaacattaaacataaagaaggaatctacagtaagagggtagtgactaaggcatccttgccagtgggagaaaaacccttgcagaatgaaaatgcagatgcctcagttcaagtgctaatcactggggatgagaacctctcagacaaaaaacagcaagagattcacagtacaagggcagtgactgaggctgcccaggctaaagaaaaagaatctttgcagaaagatactgcagattccagtgctgctgctgctgcagagcactcagctcaagtaggagacccagaaatgaagaacttgccagacactaaagccattacacagaaagaggagatccataggaagaagacagttcccgaggaagcctggccaaacaataaagaatccctacagatcaatattgaagagtccgaatgtcattcagaatttgaaaatactacccgttctgtcttcaggtcagcaaagttttacattcatcatcccgtacacctaccaagtgatcaagatatttgccatgaatctttgggaaagagtgttttcatgagacattcttggaaagatttctttcagcatcatccagacaaacatagagaacacatgtgtcttcctcttccttatcaaaacatggacaagactaagacagattataccagaataaagagcctcagcatcaatgtgaatttgggaaacaaagaagtgatggatactactaaaagtcaagttagagattatccaaaacataatggacaaattagtgatccacaaagggatcagaaggtcaccccagagcaaacaactcagcacactgtgagtttgaatgaactgtggaacaagtatcgggagcgacagaggcaacagagacagcctgagttgggtgacaggaaagaactgtccttggtggaccgacttgatcgtttggctaaaattcttcagaatccaatcacacattctctccaggtctcagaaagtacacatgatgatagcagaggggaacgaagtgtgaaggaatggagtggtagacaacagcagagaaataagcttcagaaaaagaagcggtttaaaagcctagagaaaagccataaaaatacaggcgagcttaaaaaaagcaaggtgctttctcatcatcgagctgggaggtctaatcaaattaaaattgaacagattaaatttgataaatatattctgagtaaacagccaggttttaattatataagcaacacttcttcggattgtcggccctcagaggagagtgagctgctcacagatactaccaccaacatcctttccggcaccacttctactgtcgaatcagatatattgacccaaacagatagagaggtggctctgcacgaaaggagtagctctgtttccactattgacactgcccggctgattcaagcttttggccatgaaagagtatgcttgtcacccagacgaattaaattatatagcagcatcaccaaccaacagaggagataccttgagaagcggagcaaacacagcaagaaagtgctgaatacaggtcatcccctagtgacttctgagcacaccagaaggagacacatccaggtagcaaaccatgtgatttcttctgactctatttcctcttctgccagtagtttcctgagctcaaactctactttttgcaacaagcagaatgtacacatgttaaacaagggcatacaagcaggtaacttggagattgtgaacggtgccaaaaaacacactcgagatgttgggataactttcccaactccaagttccagcgaggctaaattggaagagaacagtgatgtgacttcttggtcagaagaaaaacgtgaagagaaaatgctctttaccggttatcctgaggacagaaagttaaaaaagaacaagaagaattcccatgaaggagtttcctggtttgttcctgtggaaaatgtggagtctagatcaaagaaggaaaacgtgcctaacacttgtggccctggcatctcctggtttgaaccaataaccaagaccagaccctggagggagccactgcgggagcagaactgtcaggggcagcacctggacggtcggggctacctggcaggcccaggcagagaggctggcagagacctactgaggccatttgtgagagcaacccttcaggaatcgcttcagtttcacagacctgacttcatctcccgctctggggagcggataaagcgcctgaagttaatagtccaggagaggaagctgcagagcatgttacagaccgagcgggatgcactattcaacattgacagggaacggcagggccaccagaatcgcatgtgcccgctgcccaagagagtcttcctggctatccagaagaacaagcctatcagcaagaaggaaatgattcagaggtccaaacggatttatgagcagcttccagaagtacagaaaaagagagaagaagagaagagaaaatcagaatataagtcataccggctgcgagcccagctatataaaaagagagtgaccaatcaacttctggggagaaaagttccctgggactgacacaagtttattttcctcagagccttggaattctattttatgaacctagagaagcagaatccttacttttgtgagtctggttgaataaagcttattctttgtccatgtgtattttagaaatagtaacttctaaagagtctggaacaaagtggtgattaaaattcctaatggtttgggagcaatactttctgcatagtggccttgtccaatggcctgtgtgttacaatgatatgatcatttctcaagaataagtccctttttgtatgtgtttttatacttttagaaaataaaaactttagattaactc

SEQ ID NO: 3930 - DNA, 5507 bp, Homo Sapiens
  NM_015130
gcggccgcgggctctcgcggggcggcgacgccgcggggaggatgctgcttgccgcgcccgcgtcctcaccgtcctcccgggccgcctgctggggctttgttgtggcccggacgccgcgggccaccccctgaagtcgcctgccgccgccgccgccgcacctagcggacgggcgggcgggcgcgcgtgtgcccaggagtgcgcgcctgtcgcggtggtgggtgcaggactggacccacgggcccattgtgcgcccgcccgcggcagccaggaccatgtgggtgaacccggaggaggtgttgctggccaacgcgctgtggatcaccgagagggccaacccatacttcatcctgcagcggaggaagggccacgccggcgatggaggcggcggcggcggactggcgggcctgctggtgggtacccttgatgttgtgttggactccagcgcccgggtcgctccttaccgaatcttgtaccagactccagactccctggtctactggaccatcgcctgtggtggttccaggaaagaaatcactgaacactgggaatggcttgagcaaaatctcttgcagacactctccatctttgaaaatgagaatgatatcaccacatttgtgagaggaaaaatacagggcatcattgcagaatacaacaaaatcaatgatgtaaaggaagatgatgacacggagaagtttaaagaagccattgtgaaatttcataggctgtttgggatgccagaggaagagaaactcgtcaactattactcttgcagctattggaaggggaaggtcccccgtcagggttggatgtacctcagcattaaccacctttgcttttattcttttcttatgggaagggaagcgaaactggtcatccggtgggtagacatcactcagcttgagaagaatgccaccctgcttctgcctgatgtgatcaaagtgagcacacggtccagtgagcatttcttctctgtattcctcaacatcaacgagaccttcaagttaatggagcagcttgccaacatagccatgaggcaactcttagacaatgagggatttgaacaagatcgatccctgcccaaactcaaaaggaaatctcctaaaaaagtgtctgctctaaaacgtgatcttgatgccagggcaaagagtgagagataccgtgcacttttccggctgcccaaagatgaaaaattagatggccacacagactgcactctctggactccatttaacaaaatgcacattttggggcagatgtttgtgtccacaaattacatctgttttaccagcaaggaggagaacttatgtagcctcattatcccgctccgtgaggtgacaattgtggaaaaggcagacagctccagtgtgctccccagtcccttatccatcagcacccgaaacaggatgaccttcctatttgccaacttgaaagatagagactttctagtgcagaggatctcagatttcctgcaacagactacttccaaaatatattctgacaaggagtttgcaggaagttacaacagttcagatgatgaggtgtactctcgacccagcagcctcgtctcctccagcccccagagaagcacgagctctgatgctgatggagagcgccagtttaacctaaatggcaacagcgtccccacagccacacagaccctgatgaccatgtatcggcggcggtctcccgaggagttcaacccgaaattggccaaagagtttctgaaagagcaagcctggaagattcactttgctgagtatgggcaagggatctgcatgtaccgcacagagaaaacgcgggagctggtgttgaagggcatcccggagagcatgcgtggggagctctggctgctgctgtcaggtgccatcaatgagaaggccacacatcctgggtactatgaagacctagtggagaagtccatggggaagtataatctcgccacggaggagattgagagggatttacaccgctcccttccagaacacccagcttttcagaatgaaatgggcattgctgcactaaggagagtcttaacagcttatgcttttcgaaatcccaacatagggtattgccaggccatgaatattgtcacttcagtgctgctgctttatgccaaagaggaggaagctttctggctgcttgtggctttgtgtgagcgcatgctcccagattactacaacaccagagttgtgggtgcactggtggaccaaggtgtctttgaggagctagcacgagactacgtcccacagctgtacgactgcatgcaagacctgggcgtgatttccaccatctccctgtcttggttcctcacactatttctcagtgtgatgccttttgagagtgcagttgtggttgttgactgtttcttctatgaaggaattaaagtgatattccagttggccctagctgtgctggatgcaaatgtggacaaactgttgaactgcaaggatgatggggaggccatgaccgttttgggaaggtatttagacagtgtgaccaataaagacagcacactgcctcccattcctcacctccactccttgctcagcgatgatgtggaaccttaccctgaggtagacatctttagactcatcagaacttcctacgagaaattcggaactatccgggcagatttgattgaacagatgagattcaaacagagactgaaagtgatccagacgctggaggatactacgaaacgcaacgtggtacgaaccattgtgacagaaacttcctttaccattgatgagctggaagaactttatgctcttttcaaggcagaacatctcaccagctgctactggggcgggagcagcaacgcgctggaccggcatgaccccagcctgccctacctggaacagtatcgcattgacttcgagcagttcaagggaatgtttgctcttctctttccttgggcatgtggaactcactctgacgttctggcctcccgcttgttccagttattagatgaaaatggagactctttgattaacttccgggagtttgtctctgggctaagtgctgcatgccatggggacctcacagagaagctcaaactcctgtacaaaatgcacgtcttgcctgagccatcctctgatcaagatgaaccagattctgcttttgaagcaactcagtacttctttgaagatattaccccagaatgtacacatgttgttggattggatagcagaagcaaacagggtgcagatgatggctttgttacggtgagcctaaagccagacaaagggaagagagcaaattcccaagaaaatcgtaattatttgagactgtggactccagaaaataaatctaagtcaaagaatgcaaaggatttacccaaattaaatcaggggcagttcattgaactgtgtaagacaatgtataacatgttcagcgaagaccccaatgagcaggagctgtaccacgccacggcagcagtgaccagcctcctgctggagattggggaggtcggcaagttgttcgtggcccagcctgcaaaggagggcgggagcggaggcagtgggccgtcctgccaccagggcatcccaggcgtgctcttccccaagaaagggccaggccagccttacgtggtggagtctgttgagcccctgccggccagcctggcccccgacagcgaggaacactcccttggaggacaaatggaggacatcaagctggaggactcctcgccccgggacaacggggcctgctcctccatgctgatctctgacgacgacaccaaggacgacagctccatgtcctcatactcggtgctgagtgccggctcccacgaggaggacaagctgcactgcgaggacatcggagaggacacggtcctggtgcggagcggccagggcacggcggcactgccccggagcaccagcctggaccgggactgggccatcaccttcgagcagttcctggcctccctcttaactgagcctgccctggtcaagtactttgacaagcccgtgtgcatgatggccaggattaccagtgcaaaaaacatccggatgatgggcaagcccctcacctcggccagtgactatgaaatctcggccatgtccggctgacacgggcgccttcccgggggagtgggaggagagggaggggagggattttttatgttcttctgtgttgagttttttctttctttcttttaaattaaatatttattagtacctggcttgaagcctagtgttttcataatgtaattcaatgaaaactgttggagaaatatttaaacacctcaatgtaggtacattacactcttgttgcggggaggggatttaccagaatacagtttatttcgtgaattctaaaaaacaaaaagatgaatctgtcagtgatatgtgtgtattataacttattaatcttgctgttgagctgtatacatggtttaaaaaatagtactgtttaatgctaagtaaggcagcagtcatttgtgtattcaggctttttaaataaaattagagctgtaaggaaaatgaaaagccacaaatgcaagactgttcttaaatggaaggcatagtcagcgagggtaaatcctataccactttaggaagtattaaaaatatttttaagatttgaaatatatttcatagaagtcctctattcaaaatcatattccacagatgttccccttcaaagggaaaacatttggggttctaaacagttatgaaagtaagtgatttttacatgattccagaataacacttgtattgaccaatttagacagataccagaccaattttgcatttaagaaattgttctgattatttacgtcaactcattagaattcagtgaaaagtaacagtcttttgtcacagagaatctgaaagtagcagcaaagacagagggctcatgacaggtttttgcttttgctttgcttttgtttttgaaagagtaaaagtactgatgcttctgatactggatgtttagcttcttactgcaaaaacataagtaaaacagtcaactttaccatttccgtattctccatagattgaagaaatttataccacatatcgcatatgaccatctttccatcaaatcaatgtagagataatgtaaactgaaaaaaaatctgcaagataatgtaactgaatgttttaaaaacagaacttgtcactttatataaaagaatagtatgctctatttcctgaatggatgtggaaatgaaagctagcgcacctgcactttgaattcttgcttcttttttattactgttatgattttgctttttacagatgttggacgattttttcttctgattgttgaattcataatcatggtctcatttcctttgcttctttggaatatttctttcaacacattcctttattttattatacattgtgtcctttttttagctattgctgctgttgttttttattctatttacaggatgatttttaaactgtcaaatgaagtagtgttaacctcaaataggctaaatgtgaacaaataaaatacagcaaatactcagaaaaaaaaaaaaaaaaaaaaaa

SEQ ID NO: 3931 - DNA, 6371 bp, Homo Sapiens
  NM_015132
gagacgcggacgtcgctcttccaagatggcggcgcgtccgtcgcgagcgaccgggccgaggggaggccagcgaagccgagtaaaaccgccgcccgggagaagactgaaggagcagttgccgccgttggcggcggcccgagcagttttcgctgctgctacggctgttgccatgaggcgaggctagggaggacctcacttccccggggtgtaataatgttaactgaggccagtctatccatatggggatggggaagccttggcattgtcctttttctgataacctttggaccctttgtaatattttatttgacattttatatcctctgctttgtgggtgggggtttagtggttactctcctgtttggaaaaacaaactcagagaagtacctagaacagtgtgaacactcatttcttcctccaacatcacctggggttcctaagtgcttagaagaaatgaaacgggaagccaggactattaagattgatagaagattgacgggtgccaatataattgatgaacctctccagcaagttatccagttttccttgagggattatgtccagtattggtattatacactaagcgatgatgaatcttttcttcttgaaattaggcagactcttcaaaacgcactcattcagtttgctactaggtcaaaagaaatagactggcaaccttattttactacacgcattgtagatgactttggcacacacttacgagtattcagaaaggctcaacagaaaataacagagaaagatgatcaagtgaaaggtacagcagaagatcttgtagataccttctttgaagttgaagttgaaatggagaaggaggtttgccgtgatctagtgtgcacttcccccaaagatgaagaaggattcctaagggatttgtgtgaggtcttactatatttattgctacctcctggagatttccagaacaagatcatgcgatactttgtcagggaaatccttgcacgaggaattcttcttccattaataaatcaactcagtgatcctgattatattaatcagtatgtcatatggatgatccgtgattctaactgcaactatgaggcctttatgaacattattaaattgagtgacaatattggagagctagaagcagtcagagataaggcagcagaagaattacagtatcttagatctctagatacagctggtgatgatatcaacactatcaaaaatcaaataaatagcttactattcgtaaagaaggtatgtgactcaagaatacagcgattgcagtcaggcaaagaaataaatactgtgaaacttgcagcaaactttgggaaactttgcacagtccccctggacagcattcttgtagacaatgttgcactacaattttttatggattacatgcagcaaactggaggtcaagcacatctattcttttggatgacagtggaaggataccgggttaccgcccaacagcagctagaagttttattaagtcgtcagagagatggaaaacatcaaaccaaccaaaccaaaggtcttttaagagcagctgctgttggaatttatgaacagtatttatcagaaaaggcatctccaagagttactgttgatgactatttagtagcaaaattagcagatactttgaatcatgaagatccaacccctgaaatctttgatgacattcaaagaaaggtatatgaattgatgctacgagatgaaagattttatccttccttcagacagaatgcactttatgtgcgcatgttagctgagcttgacatgttaaaagatcctagtttcagaggatccgatgatggggatggagaatcttttaatgggtctcctacaggaagcataaatttgtctttagatgacctttcaaatgtttcttctgatgactcagtacaacttcatgcctacatttcagacacaggcgtttgtaatgatcatggcaagacatatgcattatatgccatcactgtacaccggcgcaacctaaacagtgaggagatgtggaaaacctatcgtcgttatagtgacttccatgacttccacatgagaatcactgaacagtttgaaagtctctcaagcatattgaaacttcctggaaaaaagacttttaataatatggatagagattttttagaaaagagaaaaaaggatctaaatgcatatttgcagttactgttagctcctgaaatgatgaaggcatcccccgctttagctcactatgtgtatgatttccttgagaacaaagcctacagtaaaggaaaaggggattttgctcgcaagatggacacttttgtaaatccacttcgcaattcaatgaggaatgtttcaaatgcagttaaatcccttcctgatagcttggcagagggaatgactaaaatgtcagacaacatgggcaaaatgtcagaaagattaggtcaagacataaagcaatcattttttaaggtgcctcctttaattcctaagactgattcagaccctgaacatcgccgagtttcggctcaacttgacgataatgtggatgacaatattccacttagggtaatgctgcttctcatggatgaagtattcgacttaaaagaaagaaatcagtggttgcgaaggaatatcaaaaacctacttcaacagcttattagagctacatatggcgatactattaatagaaaaatagttgaccatgttgactggatgacttcacctgaacaagtagccgactcagtgaaacgtttcagagatgcattttggccaaatggcattttagcagaggctgttccatgcagagataaaagtattcgaatgagaacaagagtagcaggaaaaacgaaattacttgcaattatgccagatgagctgaagcacattattggggctgagacaacacggaaaggtattcttcgtgtttttgaaatgtttcagcacaaccaattaaataggagaatggtttatgtcttcttggaaggctttttagaaaccttatttccacagtataaattccgtgaacttttcaacaaactgcattcacggtcaaagcagatgcagaaatataaacagaaacttcaaactactcaagcgccttctttgcagaaaaggtgacactccactctatgaagctggtgttcattttgtccaggactaatggtatggacagatcttctggggcttaactcaaatactgttgtgtctgcaccagtcttttagtgtctcaaaatagattattaatacatccataagtctgtggttcttctcattctcatctataatccaccactaccaagagagatttctgtgtcttaaatgatttggtgcatattttgcaacattgagagaaaactgcccccatctcaagcaagaatggcgttggtttcttccatttcaaactaatcagcattctccagcaatgacaaagtgccagagtgtatatatgaaagctaaggaaagcacaaaacaatggttcagagataaattggctaatttgtttaacagttggagactgtgcaatgtacgacttggaggagtttgtttggcataatgattttgtaggtctgtcagcattttgatatattgtggattagccaggtgaatgatccttgaaacatctctttcaggtctggagaaagagacagaatgcccttaaagtgtgaaataaccttatacctgaattacagttttgtgatataaaataaagctgagtataaaataaaaccaatcaaacacagaatttgattggatttgttattcattggtatacaacaatttttattcttatgtgtgctttaagggctgtgttttgctcttagggtactcaattttatgtttccttttggcattctttgtgcaaaaagaagcatgtggtggctctcatttaaatttcaaaattattagttttatctttaacagattactgattatacagaagatataatttattggaagaactgccaaatacattttgtccttctaaaaatatggaaatttaaatagtagtctggaaagttaccatatgataatttttaattgtgtgatctagacatgccttaggtaactgcagaaatagcaaattaaatgattaatgagcttattagtcatagtaaacatacagattcctaattctatgacagtgtacatatatgaaaataaatgatgaaaaaagaactataatatttttaaaaatatgcttttatttatatttcacataatgtaaagttctacaaaataaagctagtaggcaagacccctcagtgtatacctttaaacccataaattaattttatatcaataaaataaaatactttctctagttttggagcttctgtatttcctatagttttctgactgtccattttatccatcttagaagtattcacatcccttctatgcaggatttctgcatagttttaaatactttcattgcctaagggtttgggtgtgtcagctttttttgttttaaaaatatttaacactaaaaccttaaaataatgaagctacttatcagaccactgagccaagatcctggtattaaaagaaagtctgggtgcttaagataaagggacagagtattggtatcccagttatttgggagctttaagattggaacaagatatcactgtcttgttttcacttagatcctacttacaaagtgagggttattaacagaataaagccttcctttaaagctttataataatcatatttattaataatgctgttgtgcatacttatagtatgcatatattcagcatatgttgcatgtcttcagaattacataaaatgaaatccctttcattgcaacttgcaagtgagaaaagatccttagtggctctggtggaagaaatagtatttcttcttctcagggtgtctccctgccttggcccctccctgagccccaggctttaaaagtgaaaatgtttgaaacatgaaacatgtctgtaggaagcatcagcatggccataagtgcagtgattttcatatatgcctctgcccatttcaaatatatttttgacatgaataaatctaacagtatacagaataattcatgtaagaccctaacgtgtacatgtgaaaaagcatttctatataatgtgaggagcactggccatcaattagggaaataaaggtcatgtaatattgcaaattttcaaaatagagccctgcaagataactgcaatcataccaaaaactatttgagtaaatggatttttaaagtaatttttgtttagaagagtttatatttcagaagcagaaaatgtcaaatgatagtctttgtaaatggtggtgcaccttctctatgcacatctgtcttttacatcagaaagagctgtggtcatgctaaaattagagataactttttgaatgacttggtcaagctgtgtgtaaaatatttaaccataagtcaagtacagtgtactatgtttaataaagttacatttaatgcatttattgcatatatgaatatatacatgaagaggctttatgtcttctggtatttgattttgaatgttttttaagtcagtggtgcctttaggcaagaactttcgaaattaatcattctttgtgttttctgatttttcaggtaacatgtacactatttagaaaccatcatagtttattcaccttaaaaaattgattgtattatttaaatatatcacttagatgggcatttcctataattaggatattccaaatagttgctgaaatcaattgtgccattgaccaatggatgcacttggttagccttaatttttttaaaaaaaaaaaaaacaaaaactttcttgaatatttcagtttgttcattttaagtttgtgctgctggtatttgggaagaaaaatcaatcagttaagtgctaccagaaagtgtaccaatttttataaaaattaagaatgatataaatttcacaatctaaaattttaattttgtgcaatattttcatttaatgcatgtgtatttgagtaattgtaagataaatgaatttttaattttttgagatgtagcttaaactgtcttcttaatccaacaacttacattccgttgttgctgcatccttttatttaaggacttgttttaaaagtctttttgtcactccttggaaaattcttttattagtagtaaattttgcttttaggagcatggctcctgtattacaagggaaaaaatatgaagagcacattttaggattataattgttaaaagataatgtgtgcatatcattgtacagtaagtgtcaactgtgtgcctaactgttctatcaatactttctttctttaacaaagaagaaacaacaatcagaatgtcagttatttttattcaactaaaaggattaaaaaatttatttggtttgtgttctgtccattagaaaatactaataaagtattaacaaaca

SEQ ID NO: 3932 - DNA, 3858 bp, Homo Sapiens
  NM_015134
gccaggccggccaggcctgcgccgccgccgccgccgccgtcgccgccgcgccgaccatgtcggcagccaaggagaacccgtgcaggaaattccaggccaacatcttcaacaagagcaagtgtcagaactgcttcaagccccgcgagtcgcatctgctcaacgacgaggacctgacgcaggcaaaacccatttatggcggttggctgctcctggctccagatgggaccgactttgacaacccagtgcaccggtctcggaaatggcagcgacggttcttcatcctttacgagcacggcctcttgcgctacgccctggatgagatgcccacgacccttcctcagggcaccatcaacatgaaccagtgcacagatgtggtggatggggagggccgcacgggccagaagttctccctgtgtattctgacgcctgagaaggagcatttcatccgggcggagaccaaggagatcgtcagtgggtggctggagatgctcatggtctatccccggaccaacaagcagaatcagaagaagaaacggaaagtggagccccccacaccacaggagcctgggcctgccaaggtggctgttaccagcagcagcagcagcagcagcagcagcagcagcatccccagtgctgagaaagtccccaccaccaagtccacactctggcaggaagaaatgaggaccaaggaccagccagatggcagcagcctgagtccagctcagagtcccagccagagccagcctcctgctgccagctccctgcgggaacctgggctagagagcaaagaagaggagagcgccatgagtagcgaccgcatggactgtggccgcaaagtccgggtggagagcggctacttctctctggagaagaccaaacaggacttgaaggctgaagaacagcagctgcccccgccgctctcccctcccagccccagcacccccaaccacaggaggtcccaggtgattgaaaagtttgaggccttggacattgagaaggcagagcacatggagaccaatgcagtggggccctcaccatccagcgacacacgccagggccgcagcgagaagagggcgttccctaggaagcgggacttcaccaatgaagcccccccagctcctctcccagacgcctcggcttcccccctgtctccacaccgaagagccaagtcactggacaggaggtccacggagccctccgtgacgcccgacctgctgaatttcaagaaaggctggctgactaagcagtatgaggacggccagtggaagaaacactggtttgtcctcgccgatcaaagcctgagatactacagggattcagtggctgaggaggcagccgacttggatggagaaattgacttgtccgcatgttacgatgtcacagagtatccagttcagagaaactatggcttccagatacatacaaaggagggcgagtttaccctgtcggccatgacatctgggattcggcggaactggatccagaccatcatgaagcacgtgcacccgaccactgccccggatgtgaccagctcgttgccagaggaaaaaaacaagagcagctgctcttttgagacctgcccgaggcctactgagaagcaagaggcagagctgggggagccggaccctgagcagaagaggagccgcgcacgggagcggaggcgagagggccgctccaagacctttgactgggctgagttccgtcccatccagcaggccctggctcaggagcgggtgggcggcgtggggcctgctgacacccacgagcccctgcgccctgaggcggagcctggggagctggagcgggagcgtgcacggaggcgggaggagcgccgcaagcgcttcgggatgctcgacgccacagacgggccaggcactgaggatgcagccctgcgcatggaggtggaccggagcccagggctgcctatgagcgacctcaaaacgcataacgtccacgtggagattgagcagcggtggcatcaggtggagaccacacctctccgggaagagaagcaggtgcccatcgcccccgtccacctgtcttctgaagatgggggtgaccggctctccacacacgagctgacctctctgctcgagaaggagctggagcagagccagaaggaggcctcagaccttctggagcagaaccggctcctgcaggaccagctgagggtggccctgggccgggagcagagcgcccgtgagggctacgtgctgcaggccacgtgcgagcgagggtttgcagcaatggaagaaacgcaccagaagaagattgaagatctccagaggcagcaccagcgggagctagagaaacttcgagaagagaaagaccgcctcctagccgaggagacagcggccaccatctcagccatcgaagccatgaagaacgcccaccgggaggaaatggagcgggagctggagaagagccagcggtcccagatcagcagcgtcaactcggatgttgaggccctgcggcgccagtacctggaggagctgcagtcggtgcagcgggaactggaggtcctctcggagcagtactcgcagaagtgcctggagaatgcccatctggcccaggcgctggaggccgagcggcaggccctgcggcagtgccagcgtgagaaccaggagctcaatgcccacaaccaggagctgaacaaccgcctggctgcagagatcacacggttgcggacgctgctgactggggacggcggtggggaggccactgggtcaccccttgcacagggcaaggatgcctatgaactagaggtcttattgcgggtaaaggaatcggaaatacagtacctgaaacaggagattagctccctcaaggatgagctgcagacggcactgcgggacaagaagtacgcaagtgacaagtacaaagacatctacacagagctcagcatcgcgaaggctaaggctgactgtgacatcagcaggttgaaggagcagctcaaggctgcaacggaagcactgggggagaagtcccctgacagtgccacggtgtccggatatgatataatgaaatctaaaagcaaccctgacttcttgaagaaagacagatcctgtgtcacccggcaactcagaaacatcaggtccaagagtctgaaggaaggcctgacggtgcaagaacggttgaagctctttgaatccagggacttgaagaaagactaggtgtgtcccatccaagttgagcacgcgccttccccagcttgcagcagcacaccccaagcgctgcttttcacctgtacctttgttttattattattattattattgctgttgttgtcatcgttaactgtgggcatggaatgcgtgaggctggcttctgggttgtccacaccactctctgctgtgttgacttcctgttgtcttcatcaaagcttttttccgtggtattctaaaattaggccagcagtgggggctgggagggcatctgtgttagtcctttcctggctgtgacccgccacactcactgtcagtattaaggcccagcagcctgttgataagctaccctgtctcaccatgtgctggtgtggaaacggggcccagccagcacgcctcaaggtagatggaatccccactggtcagagaaaaagctatgcggacactccagcttggcctgggtcacagcactgactcctcacccgctagtctggctgttaagaggagaaagtgcactgccttccagcccaggaggaggacagcattttgtatttgttccactgatgcagcttagaaccacacccctgagagtcgtggcaaacctttcacaacctggaaaatgttgaaagcaaccattcctatttttgtttgttttttattaaatcttgcacaaaaaaaaaaaaaaaaaaaaaaa

SEQ ID NO: 3933 - DNA, 6286 bp, Homo Sapiens
  NM_015135
ggcagaagggctctgttagtgcgcctctaagatggcgacgcctttggcggtaaattcggctgctagtctatggggtccttacaaagacatttggcataaagtgggaaatgctctttggagaagacaacctgaagctgttcaccttcttgataagattttgaagaaacacaaacctgacttcatctcattgttcaaaaatccgccaaaaaatgttcaacagcatgagaaggttcagaaagccagtacagagggagtcgccattcagggtcaacagggaactcgacttcttcctgaacagctcattaaagaagcctttattctcagtgacctttttgatattggagaattggcagctgttgagcttcttcttgctggagagcatcaacagccacattttcctggccttaccagaggattagtagctgttcttctgtactgggatggaaagcgatgcattgcgaattccttgaaagccttgatacagtctagacggggaaagacatggaccctagaactcagtccagagctggcttccatgacaacacgctttacagatgagctgatggagcaaggattgacttataaagttcttacgctggtgtcacagattgatgtgaataatgagtttgagaaactacagcgagagagaggtttgggcagtgaaaaacatcgcaaagaggtttctgatctcattaaggagtgcaggcagtctcttgcagaaagcctttttgcctgggcttgccagtcacctttaggcaaagaagacactctcctcctcattggacatttggaaagagtgacagttgaggctaatggctcactggatgcagtgaatctggctcttcttatggcgcttctatactgttttgatatcagttttatagagcaaagcacagaggaacgagatgatatgattcatcaacttccactgttgacagaaaaacagtacattgcaacaattcactctcgtcttcaggactcacagctttggaaactgcctgggctccaagccactgttagacttgcctgggcgctggcattgaggggaatatcccagctacctgatgtgacagctctggcagaattcacagaggcagatgaagcaatggcagaactcgcaattgctgacaacgttttcctgttcctcatggaatctgtagtggtatcagaatacttttatcaggaagaattttatattcgcagagtccataatctcatcacagatttccttgcacttatgccaatgaaggtgaaacagctgaggaatcgggcagatgaagatgctcgaatgattcacatgagtatgcagatgggtaatgaaccccccatttcacttagaagggacctggaacacttaatgcttttgattggcgagctatataaaaagaacccttttcatctggagcttgctctagaatattggtgtcccacagagcctcttcagactccgactatcatgggctcttatctaggggtggctcatcagcggccccctcaacgccaggttgtcttgtcaaagtttgttaggcaaatgggtgacctgttgcctccaactatttatattccttatttgaagatgctccagggattggccaatgggcctcagtgtgcccactactgtttcagcctgctcaaagtcaatggtagtagtcatgttgaaaatattcagggagcaggtggcagtcctgtttcctgggaacatttctttcactccttgatgctttaccacgaacaccttcggaaggatcttccaagtgcagatagtgtccagtaccgtcaccttccttcccgtggcatcacccagaaggagcaagatggattgattgcttttttgcagctcacgtctaccatcattacttggagtgaaaatgctcgcttggcactctgtgaacaccctcagtggacccctgttgtggtgattctgggactcctccaatgcagtattccccctgtcctaaaagctgagctactgaagacactcgcagcttttggaaaatctcctgaaattgctgcttccctctggcagtcattggaatacactcagatactgcagaccgtgaggattccaagccaaaggcaagctattggtattgaggttgaactaaatgaaatagaatcccggtgtgaagaatacccattgactcgggccttttgccagcttattagtactctggtggagagctcatttccttctaatttgggtgctggactgcggccccctggctttgacccttatttgcagttccttagagactctgtgtttctacgattccgtacaagagcttaccggagagcagctgaaaagtgggaagttgctgaggtggttttggaggtgttttataaattgctcagagattatgagcctcagcttgaagattttgtagaccagtttgtggaactacaaggagaagaaatcatagcctataagccacctggatttagtctgatgtatcatctgctgaatgagtcaccaatgttggagcttgctctcagtttactggaagaaggagttaagcagcttgacacctatgccccctttcctgggaaaaaacacctggagaaagcagtacagcattgccttgcacttctcaatcttactctgcaaaaggaaaatctttttatggaccttctaagagagagtcaactggctctaatagtctgtcctttagaacagcttttgcagggaattaatcccagaactaagaaggcagataatgtggtaaacattgccagatacctatatcatggcaatactaatccagaattggcttttgaaagtgccaagatcctctgttgtatctcttgcaactctaatattcagataaagttggttggagatttcacacatgaccagagtataagtcagaaactaatggctggatttgtggagtgtttggattgtgaagatgcagaagaatttgtacgtctggaagagggatcagaacttgaaaagaaattagttgcaattcgtcatgaaacaagaatccacatcttgaatcttctcattacctctctggaatgcaatccacccaatcttgctctctacctgttgggctttgaattgaaaaaacctgtcagtactacaaacctacaagatccaggagtgttaggttgccctcggacatgccttcacgccattctaaacatcttggagaaaggaacggaagggagaacaggcccagtggcggtgcgagaatctcctcagctggctgagctatgttaccaggtcatatatcagttatgtgcatgctctgatacatctggtcctactatgaggtacttgagaaccagccaggatttcttattttcccagttgcagtatctaccattttctaacaaagaatatgaaatatctatgctgaaccagatgtcatggcttatgaaaactgcctcaatagagctaagggtaacctctctgaatcgtcagcggtcacatacccagaggctcctacacctcttactggatgacatgccagtgaaaccatactcagatggtgaaggaggaatagaagatgaaaacaggtctgtttctgggttccttcactttgacactgctacaaaagtacgtcgaaaaattctaaatattcttgactcgattgacttcagtcaggagatccctgagcctttgcagttggatttttttgatcgggcccagattgaacaagttattgctaactgtgaacacaagaatttacggggacagacagtctgcaatgtcaagcttcttcatagggttcttgtagctgaagtaaatgcccttcagggtatggcagccataggacagagacctctactaatggaggaaatcagcactgtacttcagtatgtggtaggaagaaataaattgctgcagtgtcttcatgcaaaacgtcatgctctggagtcgtggaggcaactagtagaaattatactgacagcttgtccccaggacctcattcaggcagaggatcgacaactgattattcgtgatattttacaagatgtgcatgataagatactggatgatgaagctgcgcaagagttaatgcctgtggtcgccggggcagtgttcacactgactgctcacctaagccaggccgtcctcactgaacagaagcaaacatcagtcttgggaccagcagaggcccattacgcttttatgcttgatagttgcttcacctcacctcctcctgaagagaacccattagtgggttttgcttctattggagattcttcactttacatcatattgaagaaactgttagacttcattttgaagacaggtggtggattccaacgagtgaggactcacttgtatggctctctgctttattacttacagattgcccagagacctgatgaaccagacaccttagaagcagccaagaaaaccatgtgggaaaggctgacagcccctgaagatgtatttagcaaattacagcgagaaaacatagccattattgaaagttatggcgccgccctcatggaagtggtctgtcgagatgcttgtgatggtcatgagattggaaggatgctggccctggctctacttgatagaattgtctccgtggataaacagcagcagtggcttttgtatctttctaacagtggctacttgaaggtcctcgtagacagcttggtagaagatgaccgtactttgcagagcttactcaccccacagcctccccttttaaaagcactttatacttatgaatctaaaatggcatttctcacaagagtggcaaagatacagcagggtgcattagagctgctaagatcaggggtgattgtgagactagctcaatgccaagtctatgacatgcgcccagaaacggacccgcagagcatgtttggcatgagagaccctccaatgttcatccctaccccagtggatcgctaccgccagattctcctcccagctctccagctgtgccaggtcatcctcacatctagtatggcccagcacttgcaggcagcagggcaggtattgcagtttcttatttcacattctgataccatacaagcaattctgcgctgtcaggatgttagtgctgggtctttgcaggaattggctctgctgacaggaattataagtaaagcagcacttcctggaatattaagtgaacttgacgttgatgtaaatgaagggtctctaatggagctacagggacatattggaagattccagcgccagtgcttaggactactaagtcgctttggtggctctgacagactgcgtcagtttaaatttcaagacgataatgtggagggagataaagtaagcaagaaagatgagattgaactggctatgcagcagatttgtgccaatgtaatggaatattgccagtcactcatgttacagagttcccctaccttccagcatgctgtgtgtctcttcactcctagcctttcagaaacagttaatagagatggaccgcggcaagatacccaagctccagtggttccatactggcgcctgcctggtttaggcattatcatctacctgctgaaacagagtgctaatgatttcttcagctattatgacagtcatcgacagagtgtcagcaagctacaaaatgtagagcagcttcccccagatgagataaaagagttgtgtcagtctgtgatgcctgctggtgttgataaaatctccactgctcagaaatatgttctagcaagacggcgcttggtgaaggtgatcaacaatcgagctaaactgctttccctttgttcttttatcatagagacctgcctatttattctttggcgccatctggagtactacttgttacattgcatgcccacggattctcaagattccttatttgcctcgagaaccttgtttaaaagcagaagactgcaagattccttcgcctcagaaaccaatctagattttagaagtgggctggctatagtgagccaacatgatttagaccagcttcaggctgatgcaatcaacgcttttggagaatcactacaaaagaaacttctggacattgaaggattatattcaaaagttcgatctcgatatagtttcatacaggctcttgtcagacgtatccgtggcctcttgaggatatcaaggaactgagagcccgtgcttatgctcttctatgagagagatgaattggggagaattgtctccattttatagattagtttctttctaaattatgaccaaaaatattttgctatttctttctttgtatatggacatcttttctgtaaacttcttcccctagttccatcctcactagtaaaaaataaatactttttaaaaaaacaaaaaaaaaaaaaaaaaaaaaaa

SEQ ID NO: 3934 - DNA, 5038 bp, Homo Sapiens
  NM_015138
agcggagcgcgcatgcgcggtcgcctttgtgtgggtcgagcagcggcggcggcggcggcagtggcggtcccactggcaggcgggcaagaggggagtccgggcggcggccggcgtgggagccgggggaccaccatggtaaagaagcggaaaggccgcgtcgtgatcgactcggacacagaggacagcggcagcgacgagaacctggatcaggagctcttgtccctggcaaagcgaaagcgcagtgactctgaggagaaggagccgcctgtgagtcagcctgcagcctcgtcagactcggagacgtctgacagtgacgatgagtggacatttgggagcaataaaaataagaagaaaggaaaagccagaaaaatagagaagaaaggaaccatgaagaaacaggccaacaaaactgcctcctcaggcagttcagacaaagacagttcagctgagagctcagcccctgaggaaggtgaagtgtcagactctgacagcaacagctcctcttccagttcagattcagactcttcctcagaagatgaagagttccatgatggctatggagaagacctcatgggagatgaggaagacagggcccgtctggaacagatgacagagaaagagagagagcaagaactgttcaatcgcatagagaagagggaggtgttgaaaagaagatttgaaatcaagaaaaaactaaaaacagccaaaaagaaagaaaagaaagaaaagaagaaaaagcaagaagaggagcaagaaaagaaaaaactgacacagattcaagaatctcaggtaacatcccacaacaaggaacggcgttccaagcgggatgagaaactagacaagaaatctcaagccatggaggagctaaaagcagagcgagaaaaacgaaagaacagaacagctgagctccttgccaaaaaacagccattaaaaaccagtgaggtctactctgatgatgaagaggaggaagaggatgacaaatccagtgaaaagtcagaccgctcatcacgaacatcatcgtctgatgaagaagaggagaaagaagagatccctcccaaatcccaaccagtttccttacctgaagaattgaatcgggttcgattatcacggcataagctagaacgctggtgtcacatgcccttctttgctaaaactgtcacaggatgttttgtgcggattggcatcggaaaccacaacagcaaaccagtttaccgggtcgctgagattacgggtgttgtggaaactgccaaagtttaccaactaggtggcaccagaacaaacaaagggctgcaactacggcatggcaatgaccaacgcgtgttccgtttagagtttgtctcaaaccaagaattcaccgaaagtgagtttatgaagtggaaagaagcgatgttctctgctggcatgcagttgcccactctagatgaaatcaataaaaaggaattatctattaaagaagctcttaattataaattcaatgatcaggacattgaagagattgtaaaagagaaagaaaggttcagaaaagctccacccaactacgctatgaagaagactcagctactgaaggaaaaggccatggctgaggacctgggggatcaggacaaggccaaacaaatccaagatcaactgaatgagctggaggaacgggcagaggccctggaccgccagcggaccaagaacatatccgctatcagttacatcaaccagcggaaccgggagtggaacattgtagagtctgagaaggcccttgtggctgaaagtcacaacatgaaaaaccaacagatggatccctttactcggcggcagtgcaagcctaccatcgtttctaattccagagacccagctgttcaagctgccatcttggcccagctgaatgcaaaatacggttctggagtgttaccagatgctccaaaggaaatgagcaagggtcaaggcaaagataaagatttgaattctaagtcagccagtgacctctcagaagatctgttcaaagtacacgattttgatgtgaagattgacttacaagttcccagctcagagtcaaaggctttagccatcacctccaaggctccgccagccaaggatggggctccaaggagatctctgaacttggaagactacaaaaaacgacgagggcttatttgagcacacccagcctgctgcttctgaccctgcatgccccatcgcagcgtcccacctttcctcctttcctttgatttagcctctttgggctggagcagctgttgaactgggaagagactctaaactgccagtcatctgtaatataaaccatttgctgtatagacctcctttgtctgcacaccatctcccaccagcctcccctcccccagggccccacccagtgtgggcctgggctctcttgggctttatccatgtctttagatttgtgtttgccttttgtttttttaaccgcgcagttcattggccactctgcacgcattcagtattaccatggagctgggaatcttgctggagcccctggggcaatagcagcagcaccaggcggtctcctctacagactgccttggcccacccattgaacattcggcacgtgaccttgtggggggagcggggattgggcacctgcgatcctctttcctctcttcatctttctcttctgcccttctttttggaagaaggggtttcaaaaccagtttagtttccaaaaagtgtacatttgtggggggggggggtctaatttgagagcgagagtgtgtatgtgtgtgtgtgtaagtgtgtggatttttttatcatttttttaaaatgcagtactctttgtatcagtctgtcatgggtctatagctgtttcagatttttttcagctgtacttgagcatctgaaactgcaagaaagaaactcattaaatgtgattcttcttactaaacaggcctgactgctgtagctgtgtaacttccccattcccacctactcttcccatcctttcccaactttggagaaaactccccagtttagccccctgacctgcaggctgtgtcctggcaggtgtgggagggaagcccatggccaggtaccagggagggcagtgaatgtcttgctcttcccatgggtacagcccacagcttcttggctgaacgtagaacttctttttctcacccagtataccagcctcttcctggtgattctgttttgctgctttggcaagaactacattttgtttttaagagaaatttctgaatatgaatgtggagagcaaacacaaaaagatttaggttacgccgggtgcagtagctcacgcctgtaatcccagcactttgggaggcctaggcgggtggatcacctgaggtcaggagttcaagaccaatctgactaacacggtgaaaccccatctctactaaaactacaaaacttagccgggcatggtggtgcgtgcctgtaatcccagctactcggggggctgagacaggagaatcccttgaacctgggaggcggaggttgtggtgagccaagatcgtgccactgcactccagtctgggtgacagagtgagactccgcctcaaaaagatttaggttgcaaatgtttcaagcatgtgcagttttgtgtgtgtgtatacatatatatggtcagcatatatattgtgcagctagggcgaagccagcagaggtgtgtgtatgtctttatgaaatgtttgaaaagagataaactgactgcttgataatcactctcaggtgtaaagctccaagtgtaaataaaagtggcatttaacaaatctttcagaacaaagtacagctgactatatataccaagagctaagctaaaggaacagctgagagctccgatctccacgagagactaatctaaaagctctgctttgtacttcctcaccctgctttcgtacaaggaagggggacgatgggaaatcatggacttgtaagttgtatttaaacataaaaatgaacttggtaacttctgggtttagtagagcctcagtgtcgctttaacttagtttactttttttttatttttaaagcagcaatggatggttttaaaggagtattatgattgtaaaattgctaaatatgactgtaacacagctttgtggtagctgtgacacagttcacttgggcaaaggagtggtgatggactcgttaaaatcatatatacttgaatagtccattgaccgaaactctttatagactattgtgtaaatgtggaatcacagactgttaacattgcctggacttcagcagagtcctggagctgctgggacctctcctatcatgatgaacttggacttttttttttgatttctggttttaaaaaacataaaattatagaatccagataattcgctggagtcattctgatccaccatgtagatctgtatttagtatcatttggatttggagaagtgttgattacattatggctgtgtaataaaatttttattaaaactgcatcacactgtagccactttgccaccacctccccacatgtagccgctgaaacccccacgagatgccaatgcacacagcagggagaaaagccaaccaaagaagaccgaagggtatctttccacccgagtagcctctgtagtgattgggaccaagactaaggacttgtctccaatctcagctgaggcagtgcctctgaaccaagatcttggtcaggcattaagacactggctttgtcctaccaactaggatttcttggtggttcacactatttcttgtgctggggaattccctcattgggcccctcctccctccacagtgtggtttcagtgttgaagggtgcagcacccaaggttgtttttatgcattttttcagttccttccaagaagcaaaaaggccagtgtccatctgcctagttcataatgtttataggtctgtttgtctgtcttgcttctggcaggtgtagggaaagtctactgcctgccactcccttcaaaaagaatgtttttgcttttgtgaagtcctgacttgccactcaaactgtaccaatattgtaaataaatgttatgccattttaacaaagggaaaaaaaaaaaaaaaaaa

SEQ ID NO: 3935 - DNA, 4068 bp, Homo Sapiens
  NM_015141
gcagtggttcttgggagtggcgaagcgggtcctgccccgctgtcagctgcggcccccggcgccgggcgggggtggccgcgaccattggcggagaggcgaaaggggcggggccgccgccagccgctgcgggcaaggctgaacaggcggaggtgggcagccggccagggaagcacggtccaggcggctacattcggcccggccatggcagcggcgcccctgaaagtgtgcatcgtgggctcggggaactggggttcagctgttgcaaaaataattggtaataatgtcaagaaacttcagaaatttgcctccacagtcaagatgtgggtctttgaagaaacagtgaatggcagaaaactgacagacatcataaataatgaccatgaaaatgtaaaatatcttcctggacacaagctgccagaaaatgtggttgccatgtcaaatcttagcgaggctgtgcaggatgcagacctgctggtgtttgtcattccccaccagttcattcacagaatctgtgatgagatcactgggagagtgcccaagaaagcgctgggaatcaccctcatcaagggcatagacgagggccccgaggggctgaagctcatttctgacatcatccgtgagaagatgggtattgacatcagtgtgctgatgggagccaacattgccaatgaggtggctgcagagaagttctgtgagaccaccatcggcagcaaagtaatggagaacggccttctcttcaaagaacttctgcagactccaaattttcgaattaccgtggttgatgatgcagacactgttgaactctgtggtgcgcttaagaacatcgtagctgtgggagctgggttctgcgacggcctccgctgtggagacaacaccaaagcggccgtcatccgcctgggactcatggaaatgattgcttttgccaggatcttctgcaaaggccaagtgtctacagccaccttcctagagagctgcggggtggccgacctgatcaccacctgttacggagggcggaaccgcagggtggccgaggccttcgccagaactgggaagaccattgaagagttggagaaggagatgctgaatgggcaaaagctccaaggaccgcagacttctgctgaagtgtaccgcatcctcaaacagaagggactactggacaagtttccattgtttactgcagtgtatcagatctgctacgaaagcagaccagttcaagagatgttgtcttgtcttcagagccatccagagcatacataaagtgaatcatgcaacgtgttgggggaagttctgcctttctgatcaatcttttgggttcacgtggaaaccaggacttggcaacatgatgtttgactgtaatctcatcacggatatgtatgaatttttacaggttcgtttttgaattgtgagaggcagttcattagcaaagatgtactgggcagtaactaaacacacatgcaaacatgtgaatggtggtttattcctcattctgtggatgtttctatgagccaaaatttgatgtctttttttcaaaattgcttatgaaatttccacacaatcgtagcttataagattggaacgatctcagccaaatattttaggtgtaattcatatgtatttgagtggaggattttttttctcatttttctagtgttaaattttaaccagcattaacatggtagagtggaggagtgagtgtgttcaaagatcaacatatttaacttttaaacactatctcaaagccagcataattaactactttgattgtgggctgacctttgtttttttaacaatcaggcatttttaattagataatccactcatgtatttccccctcactgcagttgtctgcatttttagcctcttttctcttcgttagttgtcagaatatgccttcgtcaaggctcagaggtaacaagacagaaaattcatctgggattttcctgctgtggctggcacattcttctgattaacagacacttgtatgatgctttaggctagttagtgcattttttagcaaacatttatcttaaacatcacagatccactggggggtgcaaggggctactgttagtcctcttgttagatgcagtcactcctcctggtcacctagtgagcagggacagagccaggagtcaagtgcagtgccaaggtgcatgaccctctgagaagtcactgggctgatttgacctccgactcattggttgtgcaaatgccatgtgcagcctttcctgaggccataggagggcttcctgcagctgagatctatgcaggccatcctctcaacaagtgccactccaagggcggtcctcggtgcagcagcatcagcttcacttgtgggggggtgggggaaggggcggtctcagaaatgcaggttcccaggtcccaccctggacttctgaaggggtgtggcatctgtgtttctgatgcttactacaatatgtgaaccactactttagaaaatctgctttaacttggtattcctctaattgtgttccctaggaaatgactgtcccaagagccagtgattattccaggtgttccctggaaaggtcaagtgagtctgggaaacactatgtctgtacacctcttgaaggtgtcgaatgtatgtttatacatcagtggaacccatttttctagcctagcaagtcccaaacacattacactgaagagattttggtgaggaaacttgctggagttttcagggaacactgttctaggcttaggtgaccttaggatcactcaagtagacccttcactccctgcgagaaattaggatgaataactacctgtggcattgttggttctgaacttttacagttcaggcctgctgtgaatctttgatgaagctttaaggtgacactgttgtacaagatgtcagctttgctgaaacgcacattacctggaataagtgctttaattgtagaattagaatgggatttactgtactgttttaaatgagattggcttcagaatccattacagttaccttacatagcacttgatacgtgttaaatgaacatatgaatgtaatttatatattcctagaatttaagttactttgtgagatttgggcctgtccctcaatgccagtttaggatttctttttttctataccttgaaatgattataaaatagattttcatgggaattttaaaaactctatccaaaacatttttggagcattttaaagccccatacacagaagtatacgaaagcacacaaaacactccaagtttcagcagttttagcgccaccattaacccactttgcttgtctcatgaaaaatctttgttaaagtttgtacacaggtaacaaaaagttactttaaaagatatataaagggctgtaagctaattgtggtgtctagtaagtagcataatgagatgtgaggagttggaactttgcgtgttttgcgtattttcatctgcattcagcttcttactctgggtttgtactcgagtgttatttctttacaaatgcccttgtaattaccactctgaagtctgctgactgtgtctcttgaacatacttaggatattctgcacattatggaaaaaggtaaattttagaagtttctgctctactaactgtagatatttatgactctgcgagttatctatttttataaccacctgtggtccattgttcattttaattcacatttcttatgaagtatggtaacagggagggagacacctagattagcagctcaatttgtactacttcagccaatctgtgaatgtaaaaactacactgttgccttgctaggatccaccctcctataatatggaacaaatatctgaatgaaatccaccctaggagacggagtcaaactaaacttgtggtttttcatttaacttttgactacagcatggccccatggcatccacaccaagagggtgttgtgatgaggtgccggtgtgcaaagggaactttagtttttccactggttcttatctgctagccttttacatacatgtgtactatatttgtttatagactgtaggtggatatataatttaaaagcttgatttaataaacatttaaccccctaaacttgcaaaaaaa

SEQ ID NO: 3936 - DNA, 2835 bp, Homo Sapiens
  NM_015143
gcggcgggcccagctcctcccccgactcggtctctctcccctcccctccgcccggcagttcctccctcccgccgccgcctcttcctcggtgaggcgctcttccagcgggcaggcagcatggcggccgtggagacgcgggtgtgcgagacagacggctgcagcagtgaggccaagctccagtgtcccacttgcatcaagctgggcatccagggctcgtacttctgctcgcaggaatgttttaaaggaagttgggctactcacaagttactacataagaaagcaaaagatgaaaaggcgaagcgagaagtgtcttcctggactgtggaaggtgatattaatactgacccatgggcaggttatcgatatactggtaaactcagaccacattatccactgatgccaacaaggccagtgccaagttatattcaaagaccagattatgctgatcatcccttaggaatgtctgaatctgaacaggctcttaaaggtacttctcagattaaattactctcatctgaagatatagaagggatgcgacttgtatgtaggcttgctagagaagttttggatgttgctgccggcatgattaaaccaggtgtaactactgaagaaatagatcacgctgtacacttagcatgtattgcaagaaattgctacccttctcccctgaattattataatttcccaaagtcttgttgtacctcagtgaatgaagtcatttgccatggaataccagacagaaggcccttacaagaaggtgacattgttaatgtggatatcactctttatcgcaatggttatcatggggacctgaatgagacattttttgttggagaagtggatgatggagcacggaaacttgttcagaccacatatgagtgcctgatgcaagccattgatgcagtgaagcctggtgttcggtacagagaattgggaaacattatccagaagcatgcccaagcaaatgggttttcagttgttcgaagctattgtgggcatggaatccacaagctttttcatacagctcccaatgtaccccactatgctaaaaataaagcagttggagtgatgaagtcgggccatgtatttacaattgagccaatgatttgtgaaggcggatggcaggatgaaacctggccagatggttggactgcggtgacaagagacggaaagcggtctgctcagtttgagcacaccctcctggtcacagacactggctgtgaaatcctaacccggcgacttgacagtgcacggcctcacttcatgtctcaattttaatttctcccaagatggcacatctcagtaccttcttactgtgctatgcattttattgagagtacagaaaggaagaggaacctttttttaatcacttgttttgttttgactatagataagaaaggactacagcatttgatgtgtgtcctcaagaacttgtcttgggtctgaaaaagctgagaagaataaaggaaacattgctcaactcttcagccccctccccctgcacacctgttttctcatttgccctttgagcacttttacttaaacttgcttgtagttgcttttatcactgccgcaaaacagccatcaagagccatctgctttccaggtgaacattggaaatgagaatctttgaaacttagcaatatgtgttgcaccagattttttaaattatatatatggaaatatatatgtatacattttaagttctgtatacataattaccaaacactatgtgacctggagtttgtgttgtttctgctctgacaggtttatatgttcttacaaatggatccatagtttgcagtgatttaattcctggttgggatttggcctcccctctcccccatgctaattatttacccttgtaattgtgcatagggaagcactcacccaatgagactttctccaatgtggactctgtgtgtcagtgaatgaatgtagtaaaattcactttggaaggttatcaggcttttaaaaatctagtttatggcaaaaatagccattttccaagtggtggctgactgttgcagggaatgagaatttcataatacactgctatttcagacctctgtttggtcagaaatggaaaagaaaaagccccctttcttcccttttctgttttacttcaagggcataccttggaggtgctcagagaagcgtgaagtttgcactatggtggaggatggggaaagagttctaaagtgtctccagctgtgaacccaggaggtcaagtgggctattaaaatctaacgttgagtaaatgtgatagtgatgagaaaggaattttgtgtactgtaaccttgcagtagagatgcagctgtccttcgtgtgtggaaacacacctctcctttacatagttgggaacctcattagaaatgacctcagctgccccatatctacgttcctttcagcagttgtccaagtaggagtgtatccagtgaagacatatcaaatcacaaagtcattgtcattagagtgtacttgattactgggcatccttgtaatataatttcataccactgacacattatacttgtaagagaacatctttcccagagtgcctcagaccttattgctttaaaatataataatgttttcattacttttattatttgaatgatttagtaaagttgactgaatctggtatagactttgggagtatgtgtgtgaagtttttatcaaactgtaatatttgtgaatggaatgccttgcaatatgaatgttaatataatgtgtaaagggagattaaaaagtttgaatgattatcctaaaaaaaaaaaaaaaaaaaaaaaaaaaaaaaaaaaaaaaaaaaaaaaaaaaaaaaaaaaaaaaaaa

SEQ ID NO: 3937 - DNA, 6932 bp, Homo Sapiens
  NM_015144
ggcgatgagttcctgctgctgttcaccatggcctccaaccacccggccttcagcttccaccagaagcaggtgctgcgccaggagctcacgcagatccagagcagcctgaacggcggcgggggccacggcggcaagggcgcgcccgggccgggcggcgcgctgcccacttgcccagcctgccacaagatcactccaagaactgaggcccctgtcagcagtgtcagtaatagtttggagaatgccctgcacacatcagcacattccacggaggagtcgctgcccaagaggcccttaggaaaacacagcaaagtgagtgttgaaaagatagacctgaagggattatcacacacaaaaaatgacagaaatgttgaatgttcctttgaggtcttgtggtctgattcttcaataacatcagtaaccaaatcttcctctgaagtgacggaatttatttcaaagctatgtcagctctatcctgaagagaacttggagaaactcattccttgcttagctggtccggacgcattttatgtggagcgaaaccacgtggatctggactcaggcctgaggtacctggcctcattaccttctcacgtgttgaaaaatgaccatgtcaggaggtttctcagcacttcctctcccccacagcagcttcagagtccaagtcctggcaatccctccctttctaaagtaggtaccgtgatgggcgtgtctggaaggcctgtgtgtggagtggctggtatcccgtcctcgcagagcggagcccagcaccacgggcagcacccggccggctccgccgcccccttgcctcactgctcccatgcgggcagcgcgggctcagccctggcctaccggacccagatggacacatcacctgccatcctcatgccttccagtctgcagacccctcagacccaggagcagaatgggattctagactggcttaggaaactgcgtttgcacaagtattaccccgtctttaagcagctctccatggagaagtttttgagccttactgaagaagatctgaataaatttgagtctcttaccatgggggcaaagaagaagctcaagacccagctggagctggaaaaggagaagtcagagagacggtgcctgaacccctcggccccgccgctggtcaccagcagtggtgtggctcgagtgccccccaccagccacgtcgggcccgtgcagtcggggcggggcagccatgcagcagagctgcgggtggaagtggagcagccccatcaccagctgccccgggaaggcagttcctcggagtactccagctcctcctccagccccatgggggtacaggcccgggaagagagctccgacagcgctgaggagaatgacagacgtgtggagattcacttggagagctctgacaaggagaagccggtgatgctgctgaatcacttcacttccagttccgccagacccacggcccaggttctccctgtgcagaatgaggccagctccaatccatcaggccaccaccccctgcccccgcagatgctgagcgcagcctcacacatcacacccatccgcatgctgaattccgtgcacaagccggaaagagggagcgcggacatgaagctcctctcgtcttctgtgcactcacttttgtctctagaagaaaggaataaaggatctggaccaagaagcagcatgaaagtggacaagagctttggcagcgccatgatggacgtgctgcccgcgtccgcaccccaccagcctgtgcaggtcctctctgggctttcggagagcagctccatgtcacccacagtctcctttggtccccggaccaaagtcgtgcatgcatccacgctggacagggtgctgaagacagcacagcaaccggccctggtcgtggagaccagcacggccgccacggggacgcccagcacagtcctccacgccgcccgtccgcccatcaaactgctgctgtcgtcatctgttcctgctgattctgccatttctgggcaaacttcctgtcctaataatgtgcaaataagtgtgccccctgcaataataaacccccggactgctctgtacacagccaacaccaaagttgccttttctgcaatgagcagtatgccagtgggccccctgcagggtggcttctgtgcaaacagcaacactgcctctcccagcagccacccctccacgtcctttgccaacatggccacgttgcccagctgcccagcccccagctccagcccggcgctgtcctccgtccctgaaagcagtttctatagcagcagtggcggtggcggctccacaggaaacattcctgcctcgaatccgaaccaccaccaccaccaccaccatcagcagcccccggcacccccgcagcccgccccacccccgccaggctgcattgtgtgcacgtcctgtggctgcagcggcagctgcggctcgagtggcctgactgtcagctacgccaactacttccagcacccgttctccggtccgtccgtgttcaccttccccttcttgcccttcagtcccatgtgcagcagcggctacgtcagcgcccagcagtacggcggcggctccaccttccccgtcgtgcacgccccttacagcagcagcgggaccccagaccctgtcctgagtgggcagtccacgtttgccgtgccacccatgcagaacttcatggcagggacagcaggggtgtaccagacccaaggactggtgggcagtagcaatggttccagtcacaaaaagagcgggaacctatcttgttacaactgcggggccactggtcaccgcgcccaggactgcaaacagccgtccatggacttcaaccggccaggtacttttaggttgaaatacgcccctccagcagaaagtctggactccacagattgatatttttctctggcaacagaacgttattaagccatggagacataaggaaaattaaatacaaaactgagaagtctagttgctgttgagcttaatctttttaatccaaaggtgctttacttttcctagactggatagaaaatctagcgtagaagtgcatcaaactcgatttattgccaaaaccctagattggagcttggtgtcagaactcgcctagtgggcatctctgtggctggtgagatcggccacctccacttttggttgcagtgcagagacgccatgtctcccgaagagcattgccatcactggccctcctaggctcacacgtcaattccagggcagctacacgtggtctgaatcgagaaccgagcttggagttctccaagtggagttccacccgccggactcctgacacccctgggctagggaaaatgtcgactttgttttgttctgttcctaaagtgattagcactaatctctgggatttttaaggattgcactacagaagaatgtaccctgatgtaaatctctgcggttctgggagccaaactcctctgagaacagtcagtgcaagagactccaataatccatattgaaagagtcagcaccagcagaggctactcgacttaggacgcaacagaggttttagtatttccttccctcctccaagcacttgtagcagtttcaggtttttaatttttttctgcaaataaatctaaactacgttattaaatagaaatagtttactcgcaacaacttaatttctaagggtccaagtcccagagaatccatagtcgtcaaagctttgagagtatctttcttcccagccagtcagtggctttgagccctatcttccactacaaatgacctctcgaggggggacggcgacagcgcggctctgtgagtggctgtgaggatgctgcacgtcctcagcagagtttgcaagttgctttatctcccacgggctccccaagaacctccaaccccgaggcttatcgctagcggattcacacctgagacagacatttcaacaatgatacagtcctgtcatttatcagcaaaagattgggaattttctcctgtcaacttcttttgtattaggctgtgtattgatagttaattccgttaaaaattacttggaaaacagtgggaagtggtaggactctggaagaggccacacacccgagagctgcgagatctgtgcaagtctggttttggttaggtagtaataaaagtcctcactgtagatctctaaatttcaacccacggaaatgaaagccttttgtctgaaatttacggacttaaatcttcaaggttaaagggaattttctgctcaaataatactcttatcgaaaatgctaaagtcttcaatgttaaaatactgattggtaaaatcttgcagttgggattttgcagttggatatttattttaaaaaaaattataatattcagactattcttaaaatgggacaatcagcctcatgaaaaattgatgtaaatcagaagaataccctagaatgaggccttgtgatgtgagcgttcaatttgaagagcagttcctaacttcatagaaactaaagcagaaagttgttacattttttttatgacaggcttttagtagaattttttagttttattttagttgaattttatttctatgcaatgcagaattaacagacctcttctcctcatggtacacagtattacagtgttgaagtaatggtgatgcttattacaacagctatttaggggaatgttacgttgatctcttaaattgtaaacactacaaaatgtcaaaataatgagaactgacacaactttgccttaaagagtactagactggaccttctcatattacgtttaaggaagacttagagtgttcattgatgtttacgattttaatatttctgaaggccattacagtggcctggatatgtgctgaaagccaaacttttaaattttttggtttttttaagcaaagaaatattttaaataaatcctatttcaacactgaaattgttgaaaaccgtctcataacaaaaggaaaaaacattggaatttttgttttagtggtcagtataggggaatgaaagcgtctgttgttacccacgtaactattttgataagtattagaggttaaccttaaatccagcaaaacattaaaacagaaacttttcaacttggagcctgccattcagcgttgaggtagatgagttccgacactgtcacggctgtgttcccagcagcgaaggcctctgcggagctgccagtcgtcttgaacgtgcatgggcggcgtgtgacatctccagggaggccgtccgaagtcgagaatcgtcagctgtaagtaggagctacacagcgcagagaaaatggaaccacccatccgtgaggcctctttccggagggagccgcacacttggacttgagagtttgccagcagcgagctcggatgcatctctccaaaagccaccaaggtcggcgcgtctgaagagcgttttgcggtcatcagacttcctcatctgaaaacacagaacatactgaccctttcaagtacttagtcattttcctgaaagtgtggtctgtttcagaatgctgtggcaaccaggtaggtgtggcactggccatgtgccacgtctttgccctttgtagtctgtcagatattaaagtttctaaccctgtttttttaatctccaagaatggggaaagtggaatgtagagatggaagcagaacgtgatgtttggatacaacagctatttaatccttttttattttttaagcaaaacactcagttttctaccttattttctaatgttgatttcatggtaatactgacagttggaagtgtttaacataaaaactcattgctaaagagcactgaggaaatgggagctagcgcacttgtaataaaaataaagacaaaatattttcttgaatgcatatatgtgattgggtattttaaaaaccagtatcatctgtcatctccaaaagattacaggagtcagcttgttaatacagtagtgttagtaggttctgtatttttaattcagtacttagaattctaggtcctttattgcccaaagtcagcacagttagtttataccacagactctgtcttggggcacagtagtggggcggggtagtgactttgcctaaacatcacccagctggaacagaggctgagcggggctttaggcacttgccagatgggaactgggttgcaccctccttgctccctgtcattttcttgtcactcttcctgcttcccagtgttttattttatgccttgctcgttgtacatcatgatgactgatggtcttcaaggttgtgaggaaagccgtctccctgcttgactcgactgctgtcccagaggagagtcctgtgcgacctgagcgggggtggctgccatttccagcatgcaggtgacttccaaagaatgagtcaggtggcactgaaagccatgggttctgaagaggcgaatttgttgaaaagtcccaagggtctgaatgaaagcatctttaatcaacactcaacactcgcaatattctagaaaaccatatactgtgctggttgaggccaaaggttaacattgctccactgttcaccaaggaagggggcagtggccatccgccgcggcctcacgtgcgttgtaacaagccctcatcacatgtgtgagtcttacgtgcacaaaaagagaaggctttggtactgaaactggacaccttgtgtactcgataccttcacagcttctattggacatattttctttttaggaatgaaggaaaattctcccatttttgagccattcttttgtcaattctacaaaattgcatgtaactttataaatatttttaaaagatatagttttgtaaatatttaatattccgctaatttgattttgaattgtaaatgtcaagtattctgtttttggggtttttatgttttattatactttgttaaaaaggacaaattgtacatttttagaatgtttttatgagtaaatttaatgtactgaaaataaaaattttaaaaaaggctgaaaaaaaaaaaaaaaaaaaaa

SEQ ID NO: 3938 - DNA, 5877 bp, Homo Sapiens
  NM_015147
agggcgtggtcagcgcggccgaagggcgtggttggcgctcggtcctgccctgcgcgttttgggctgcggttggagggccgcagttgcagtcagggtccgccagctcggggccagcgcatggggctgctgagaccgctccggacgtgcgaagcgttcgcggtgcggtaggaagctgaagtcttcagcagaaccctgacctaggtagggagtctcaatggccctgggtgaagaaaaggcagaagcggaagcatctgaagacacaaaggcccagtcctatgggagagggagctgcagggagcgggagctggacatcccagggcccatgagtggggagcagcccccacgcctggaagctgagggagggctcatctcccctgtatggggggcagaagggatacctgcccctacttgctggattgggactgaccctggcggcccctctagagcccaccagccacaggccagtgatgccaacagagagcccgtagctgagaggtctgagcctgcactcagtggcctgcctcctgccaccatggggtctggagaccttctgctctccggggaaagccaggtggagaagaccaagctttcttcctccgaggagttccctcagactctgagccttcccagaacaacaactatttgctcaggacatgatgctgataccgaagatgatccatccctagcagatttgccccaggcactggacctcagccagcagcctcacagctcaggtctctcttgcctgtcacagtggaagtccgtgctgagcccaggttccgcagctcagccttccagctgcagcatctctgcttcctccacaggcagcagtctccagggtcaccaggagagggcggagcctcgtggtggttctctggccaaggtctcctcctccctggagccggtcgtcccccaggaaccttcctctgtggtggggctaggacctcggccccagtggtcaccacagcctgtgttctctgggggtgatgcttctgggctaggcaggagacgcctctccttccaggctgagtactgggcctgtgtgctgccagattccctgcctccatcacccgaccgccactcccctctctggaacccaaataaagagtatgaagatctgcttgactatacttacccactgaggcccgggcctcagctcccaaagcaccttgatagccgtgtgccagctgaccctgtcctgcaggactccggggtagacctggatagcttctctgtctctccagcaagcaccctcaaatcacctactaatgtctcccccaactgcccaccagcagaggccactgccctgccattttctgggcccagagagccaagccttaagcagtggccctccagagtaccccagaaacagggtggcatgggcttggcatcttggagccaacttgcatctacccccagagccccaggcagtagggatgctcgttgggagcgcagagagccagccctgaggggtgcgaaggaccggctgactataggcaagcaccttgatatgggctctccccagctaaggacacgggacagagggtggccctcgcccaggccagagagggagaagaggaccagccagagtgcccggcgccctacctgcacagagtctaggtggaaatcagaagaggaagtggaaagtgatgacgagtatcttgccctccccgctcggctgacacaggtttctagcctggtttcgtatctaggatccatttctaccttggttaccctgcccactggggatatcaaagggcagagccccttggaagtgtcagacagtgatgggccagcttccttcccttcaagctccagccaaagccagcttccccctggagctgccctccaaggatctggggatcctgagggccagaatccctgtttcctgcgctccttcgtccgtgcccacgactccgcaggggaaggcagtctggggagcagccaggccctcggggtctcctctggactgctgaaaacacgcccctccttgccagctaggttggaccggtggccattctcagacccagatgttgaagggcagcttcccaggaaaggaggagaacagggaaaagaatcactggtgcaatgtgtgaagacattttgctgtcagctggaagagctgatctgctggctgtataatgttgcagatgttactgaccacgggactgcagccaggtccaatcttacaagtctcaagtcttctctgcagctttaccggcaatttaagaaagatatagatgaacatcagtctctgacggagagtgtcttacagaagggggagattcttcttcagtgcctgttggagaacaccccagttttagaggatgtccttgggaggatcgcaaagcagtctggtgagctggagagccacgcagatcgcctgtatgactctatcttggcctctctggacatgctggctggctgcacccttatccctgacaaaaagcccatggcggcaatggagcacccatgtgaaggggtttaacctggcatcttctcaggcagaggtgcaacctgtcggccaaacactggctagtgagaaaaaaaaccttcaagaagtccttgcaagagccattcaacactgaagtcaagggggaaaccttcaatatactagctttaaaatgcctttctcctccctgaatggagggctgagttactatttttatttacaatgaatccttccaaactaaggttttccttttggtgcttctccacaaagagcgtgtagctttgcaatttttgataaaataagacgtgttgccttcccctctatcccattaaaaaagagcagataaagctcaaactattccacctggtagggtcatttaccaagggctggtaggagattccgaatactcaatattctcaggcatgcaagaggacctaagagactgaaaaaagtgaattgttggccagaaaccttgggtcttttcataaaaggaaatttgggcttgtcaatccctctttaaagatataggtagaaagaagagatttttaaccctttgtctgcaaaagaaaaagggttaaatgaagcatctatacagatgactttgggagattatgacaccttttgccatcttcagggcttacgtctttactttcttggctaaccagtttcttagaagaaaatgtgtcagggacttggggatctacagtcatgctttagcatggctatggagctaattatcaagcttaaagggtaactttgggaggactcctcccttcactcctagtctcccttggaagagcagtccaggctcagggaagggaacggataggatgacacagtaagtacagaaactgaagctgtcaatagtgaaggaaaaaggggaattcttcgttgctttggcattgacacataagtactttgattaaaaaaaaaaaaaactatggatcaaccattcaaagcatcaattctatagctttttgcagcaagatgatcagttattgctggtaactgcagattctacagaaaagcacttttaaagttctgttgggccatgaatgaacctggaaggaggaaagcacagtaacaatggaaactaaagtcctattattaatgtgacttttctgcttcagaatttctgagactttatagtcactggaaaatagccattaaattctttaaagattagctcttcaacagtagctacacataaaatgcagtatttcaagtgcctgatgctgctgtggtatgctttatcataatgcttaagggcatgatcaaaattaaaatggcttatgagtttgccatattaatcatcttagttccatacacactgagactttaaaagggaaaaaccactctagcaaataattgtcaattataaacctgtatgtaaaacattcttgaaaacctagagttggttaaaaaggtagagatgtctgacggcctcttcttaaattgatatattttaccttctcttagatgtacatttataagtaggaacatgtccttccactgagtatgttactgaatagcccttaggaaattaaacccatttatttactaatatttgacaggcatagaagtgtattaattagcataaaagttggagatgaaaaccctatagaaacaaattggccaatattatactaattgaatgcagaatgtggcattctattcccattcaactaataatcagcttcaactgacaggaatttgcacagaatgttacacaataccctgtttcccaagaaagtactaccttacctagagatgatctaagatatttttgttcatcctctgaataaggtgagactaaagggtgctaactccctggacctggctgtgaatgctactgaagagtatcaacacaactgttaattataccgccgtgctttaagtttaagacttaccttaaaactcaagctgaaggctgggcacggtggctcatgcctgtaatcccagcactttgggaggccgaggcgggtggatcacaaggtcaggagatcgagaccatcctggctaacacggtgaaaccccatctctactaaaaatacaaaaagaaattagccaggcgtggtgatgggcgcctgtagtcccagctacttgggaggctgaggcatgagaatggcatgaacccgggaggcggagcttgcagtgagctgagatggcaccactgcactccagcctgggcaacagagtgagactcttgtctcaaaaaaaaaaaatcaagctgaaattgtttcagcctagtaagatgctgccagcagcatttctatgagcaaacatggccaaattagagtcaagtagctgagcttgctaactgcactgtgatgccacactggaataacttagtagtcccttaaaattaatggaagttaaatccacagggaagtgatgatactcaaagctggatcagcagtttcaagatctgggttcttggagatccataggtaagctcagcaaatggaagacgacgtcaacacggctattttgaagcttaggtgggaatggaacacaaagaaggtttgaggtaagatatgctggaaaggcaagatgtaggctaagggaaattcaatccaaggtcgaagaataggaaattactgctcagaccacaatgactatcattctgaaaggatttcacagagtgtgcagctgcttagatttaagaacactcttcttcactatgtaaactaatttatggcagcaccttatatttagaacaagtggtaattccctttactaagtgaacagattattaaaacctgtagtagctttgaaccgtttgtacttgaaaatgggggtataaaggggtatatattttttccagaaccacatttattggcgtatacatagaagcaaatcttaaggcatgctgaaatttgttgtaaatcccaatctttactgccatggggaaaagaacgctggaattttccaaacttaagtctgtaaatatgctcatcttaagttcatgtaatgtttccgctaactcaccaagaataagctgacaatttaaacaacttttactgtgtaaaaatgaagtgcacggcatggcatcacagtatcttgacatttgttttgtgtcatttagctactttagaaaatagtttctgaactctttccccctttatactgtattaaggcaaaaacaaaacttctgaagcattaaagatcttcaccaaaataactattggtaacttcaggaatttgtcagttgccttatgtgaggatgaatagatccaccaagcacgcctataatacaaagtaaactatgatttttattgtgaaattttcatagatggaaaattgaatattctgtccatttcattttacaattatcttaccacttatttttgtaccatgtatttcaattgcctgtttagtgaaaaataaaaattaaaaaaacctattcaaaaaaaaaaaaaaaa

SEQ ID NO: 3939 - DNA, 4530 bp, Homo Sapiens
  NM_015148
ctcctttccgtggtgtgtagccggcttggcgtgaccctcgcctgatccagttgttagagttggaagcttggcagttggcctcccttcttcccatggaggacgggggcttaacagcctttgaagaggaccagagatgcctttcccagagcctccccttgccagtgtcagcagagggcccagctgcacagaccactgctgagcccagcaggtcgttttcctcagcccacagacacctgagcagaaggaatgggctttccagactctgccagagcaggacagcgctctctgaagacagatggagctcctattgtctatcatcactggctgcccagaatatttgtacaagtaaactgcactgccctgctgcccctgagcacacggacccgtccgaaccgcggggcagtgtgtcctgctgctccctgctgcggggactgtcctcagggtggtcctcacctctgcttccggcccctgtgtgcaaccctaacaaggccatcttcacggtggatgccaagaccacagagatcctggttgctaacgacaaagcttgcgggctcctggggtacagcagccaggacctgattggccagaagctcacgcagttctttctgaggtcagattctgatgtggtggaggccctcagcgaggagcacatggaggccgacggccacgctgcggtggtgtttggcacggtggtggacatcatcagccgtagtggggagaagattccagtgtctgtgtggatgaagaggatgcggcaggagcgccgcctatgctgcgtggtggtcctggagcccgtggagagggtctcgacctgggtcgctttccagagcgatggcaccgtcacgtcatgtgacagtctctttgctcatcttcacgggtacgtgtctggggaggacgtggctgggcagcatatcacagacctgatcccttctgtgcagctccctccttctggccagcacatcccaaagaatctcaagattcagaggtctgttggaagagccagggacggtaccaccttccctctgagcttaaagctgaaatcccaacccagcagcgaggaggcgaccaccggtgaggcggcccctgtgagcggctaccgggcatctgtctgggtgttctgcaccatcagtggcctcatcaccctcctgccggatgggaccatccacggcatcaaccacagcttcgcgctgacactgtttggttacggaaagacggagctcctgggcaagaatatcactttcctgattcctggtttctacagctacatggaccttgcgtacaacagctcattacagctcccagacctggccagctgcctggacgtcggcaatgagagtgggtgtggggagagaaccttggacccgtggcagggccaggacccagctgaggggggccaggatccaaggattaatgtcgtgcttgctggtggccacgttgtgccccgagatgagatccggaagctgatggaaagccaagacatcttcaccgggactcagactgagctgattgctggaggccagctcctttcctgcctctcacctcagcctgctccaggggtggacaatgtcccagaaggaagcctgccagtgcacggtgaacaggcgctgcccaaggaccagcaaatcactgccttggggagagaggaacctgtggcaatagagagccccggacaggatcttctgggagaaagcaggtctgaaccagtggatgtgaagccatttgcttcctgcgaagattctgaagctccagtcccagctgaggatgggggcagtgatgctggcatgtgtggcctgtgtcagaaggcccagctagagcggatgggagtcagtggtcccagcggttcagacctttgggctggggctgccgtggccaagccccaggccaagggtcagctggcggggggcagcctcctgatgcactgcccttgctatgggagtgaatggggcttgtggtggcgaagccaggacttggcccccagcccctctgggatggcaggcctctcgtttgggacacctactctagatgagccgtggctgggagtggaaaacgaccgagaagagctgcagacctgcttgattaaggagcagctgtcccagttgagccttgcaggagccctggatgtcccccacgccgaactcgttccgacagagtgccaggctgtcaccgctcctgtgtcgtcctgcgatctgggaggcagagacctgtgcggtggctgcacgggcagctcctcagcctgctatgccttggccacggacctccctgggggcctggaagcagtggaggcccaggaggttgatgtgaattcgttttcctggaacctcaaggaactctttttcagtgaccagacagaccaaacgtcatcaaattgttcctgtgctacgtctgaactcagagagacaccctcttccttggcagtgggctccgatccagatgtaggcagtctccaggaacaggggtcgtgtgtcctggatgacagggagctgttactactgaccggcacctgtgttgaccttggccaaggccgacggttccgggagagctgtgtgggacatgatccaacagaaccgcttgaggtttgtttggtgtcctctgagcattatgcagcaagcgacagagaaagcccaggacacgttccttccacgttggatgctggccctgaggacacgtgcccatcagcagaggagccaaggctgaacgtccaggtcacctccacgcccgtgatcgtgatgcgcggggctgctggcctgcagcgggagatccaggagggtgcctactccgggagctgctaccatcgagatggcttacggctgagtatacagtttgaggtgaggcgggtggagctccagggccccacacctctgttctgctgctggctggtgaaagacctcctccacagccaacgcgactcagccgccaggacccgcctgttccttgccagcctgcccggctccacccactctaccgctgctgagctcaccggacccagcctggtggaagtgctcagagccagaccctggtttgaggagccccccaaggctgtggaactggaggggttggcggcctgtgagggcgagtactcccaaaagtacagtaccatgagcccgctgggcagtggggccttcggcttcgtgtggactgctgtggacaaggaaaaaaacaaggaggtggtggtgaagtttattaagaaggagaaggtcttggaggattgttggattgaggatcccaaacttgggaaagttactttagagatcgcaattctatccagggtggagcacgccaatatcatcaaggtattggatatatttgaaaaccaagggttcttccagcttgtgatggagaagcacggctccggcctagacctcttcgctttcatcgaccgccaccccaggctggatgagcccctggcgagctacatcttccgacaactagtgtcagcagtgggatacctgcgcttgaaggacatcatccaccgtgacatcaaggatgagaacatcgtgatcgccgaggacttcacaatcaagctgatagactttggctcggccgcctacttggaaaggggaaaattattttatactttttgtgggaccatcgagtactgtgcaccggaagttctcatggggaatccctacagagggccggagctggagatgtggtctctgggagtcactctgtacacgctggtctttgaggagaaccccttctgtgagctggaggagaccgtggaggctgccatacacccgccatacctggtgtccaaagaactcatgagccttgtgtctgggctgctgcagccagtccctgagagacgcaccaccttggagaagctggtgacagacccgtgggtaacacagcctgtgaatcttgctgactatacatgggaagaggtgtttcgagtaaacaagccagaaagtggagttctgtccgctgcgagcctggagatggggaacaggagcctgagtgatgtggcccaggctcaggagctttgtgggggccccgttccaggcgaggctcctaatggccaaggctgtttgcatcccggggatccccgtctgctgaccagctaaacaccaatttcttcctgcttttctccacttggtttggaaaatcacacagttttcaggctccatctgtttggagaaaatacattctgaagcatccccaattcaccttctaaaaactcatgtgcaggtttgataaacaccagaacagaagacagtgatgctgtattattttagatttattacatagatttggaattcacttttttcatgacctagaaaaaaacattccagtgttcaactgttttatattattaaagggcttttaatttgtgaacttctgaaggcatgagtgttttctctttctacttttgtatatgtgcatgttttgtttcctctgacttggtatatgctcatctgagtgacggatatgtgaaatttgtagaactggttagtcaaatggccagactatttcattaatttatttcctcaaatgcttttcaaattaaagcacctttgttagtaaacagtt

SEQ ID NO: 3940 - DNA, 3033 bp, Homo Sapiens
  NM_015150
gcgggggcgcgtcggggctggagccggagcgcgccgggcgctgggcgcagcgagcgagagcgcggcggccgcgggctccggcgagggacagacgcaccgatcgccggagggacagacacacgaccacgcggcgccaccgcccacgcctccacccaccggcgcccaagtcctccccgcgccgcctcctctgtatggcacaaactttcctcccgggacggaacacgctgcctcagggagcccgcgaccgcgccttctcctccgccggtcccatacgctgctgaaatgggttgcggattgaacaagttagagaaacgtgatgaaaaacggcctgggaatatttattcaactttgaagaggcctcaggtggaaaccaagatagatgtgtcctatgaataccgcttcctggagttcacgactctgagtgctgcggagctccctgggtcctcagcagtgaggctggcctccctgcgtgacctgcccgcccagctcctggagctgtaccagcagggcttctcgctggcggccctgcaccccttcgtgcagcccacccatgagcgggagaagacgcccctggagcacatctttagagccatcctgatcaagaaaaccgacagatctcagaaaactgatcttcacaatgaaggctacatcttggaattagattgctgttcctccttagaccacccgacagaccagaaactcatcccagagttcattaagaagatccaggaggctgcaagccagggcctgaaattcgttggtgttatacctcagtaccattcctctgtgaactcggcaggcagcagtgctccggtgtctactgccaacagcaccgaggatgccagagatgcaaaaaacgcacgtggggatcacgcgtcactggagaatgagaaaccggggactggggatgtgtgcagtgctccggctgggagaaaccaaagcccagagcccagctcaggccccagaggggaggtgcccctcgccaagcagcccagctcaccctccggagagggagatggtggagaactttcaccacagggggtgagcaagacactggatggaccggagagcaaccccttggaggtgcatgaagagccactctcagggaaaatggagatcttcacccttttcaacaaaccgaagagccatcagaagtgccggcaatactaccctgtcaccattcctctccatgtctccaagaatggccagacagtgagcggtttggacgccaactggttagagcacatgagcgaccacttccggaaaggaggcatgctggtgaacgcagtcttctaccttggaatagtgaatgattccttacatggcttgacagatggagtattcatctttgaagctgtttccacagaagatagcaaaaccatacagggctatgatgctattgtggttgaacaatggacagtcctggaaggtgtcgaagtgcagacagactacgtgcccctgctgaactcgctggcggcctatggctggcagctcacctgtgtgctaccaactcccgtcgtcaagactaccagcgaggggagtgtatccaccaagcagattgtctttcttcagagaccttgtctacctcagaaaatcaagaagaaggaatcgaagtttcagtggcgattctccagagaagaaatgcacaacaggcagatgaggaaatcaaaaggtaaactcagtgccagagacaaacaacaagcagaagaaaatgagaagaacttagaagaccagtcttccaaagctggagacatgggaaactgtgtttcaggacagcagcaggagggtggagtctccgaggagatgaagggccctgtccaagaggacaagggagaacagctgtcccctggtggcctgctgtgtggggtgggtgtggagggtgaggctgtgcagaatggtcctgccagccacagcagggccctggtggggatttgcactgggcactccaatcctggagaggatgccagggacggggatgctgaggaagtcagagagcttggtacggttgaagaaaactgagtcttgggcaatttgtgctaaaactaggtgagttgccaaacccaaggcatcttaccaacagctggtttgggggctggtttccctggtgttgtgtgttacctaccctttggcttggcttgacctctccttgtgagctcacctgagccctcccagggccaggttcctgacagtgttggtttttgcacatccactggaaaggtgtcattaatgacccagtgttagaatgcaagaggtcaggttattctagccctcatggctgaaggcccagtcctggctccaccactcctccagccagagggtctggaccatccagtgcctgtcctcgccacagggcctccagggagcattcgggtcaaatccatggacaccctgggctacaaaccaaggctgctgttcatcccacatcgtgtggggcagtgtccatcccctgcagctacttggtgacttaacaactccaggagccctgtcagctgccctcctccacctaaaccccttcgactcttctgctttgacaaagaaaatgacattggggaggggaggtgctccgcctcccagcttttctcaaaatagtcctatagatactggtaatctggaaatgaagaagtaattctgtctctgcacctacttttgcagaatgttcaaggaagtattctgtgttagtattaatgccaaaaagttgtttttaaaggttttgtactcagcacatcatacaaaccacattacttctgtcacttcagggcatcgggactggctggcgcccttgttatgtgctattttaatcagtgtaacattggtcaagttgttacccatgtatgctgtgtttatcatgtgtatatcgtccagaaagtattaaggctttaggtagatgcaactggcgaaccttggagagggaatgctgattgtcttgaccaaacccacagcctgtctcttctcttgtttagttacttacggcaataaatcatctatgagttagtgcaccgtgaaaaaaaaaaaaaaaaaaaaaaaaaaaaaaaa

SEQ ID NO: 3941 - DNA, 7290 bp, Homo Sapiens
  NM_015151
tccgcgctcgtgcccgcgcgggtgcgttgctgtcctggccgcgcccctgtcccgccgcctcccgctcctcgcctggcggatgtaggttgttggcctgaggggagctacgtagccgaggtttgcgctgccgccgccaggcccggtccggttccagcctctgcccggacgctagccggcctggccatggctgaccgcgggtgcccgctggaggcggcgccgctgcctgccgaggtgcgggagagcctggctgagctggagctggagctgtcggaaggtgacatcactcaaaaaggatatgaaaagaaaagggcaaagctgcttgcacgttatataccgcttattcaaggaatagacccatctctgcaagcagagaatagaattcctgggccctcacaaaccacggccgctgcacccaagcagcagaagtctcggcccaccgcctcgagggatgagcgcttccggtcagatgtccacactgaagccgtgcaagcagctttggccaaatacaaagagaggaagatgcctatgccttcgaagagacgttctgtccttgtgcattcgtctgtggaaacctacacccctccagacacgtcgtctgcctcagaagatgagggctctttacggcgacccgggcgactcacctccactccgctccagagccattccagcgtcgagccctggctcgaccgggtcattcagggctcgtccacctcatcctctgcatcctccacctcatctcacccgggagggagacccaccactgctcccagtgctgcagccacgccgggggccgccgctaccactgcactcgcaggcctcgaggcccacacccacatagatctgcattctgcccctcctgatgtcaccacgggcctcgtggagcattcgtactttgagcgtccacaggtggcttctgtgagaagtgttcctcgggggtgcagcgggagcatgctggaaacagcagatggtgtccctgtgaacagcagagtgtcctccaaaatccagcagcttctgaacaccctgaagaggccaaagcgccctccactgaaggagttctttgtggatgattttgaggaattgttggaagttcagcaaccagatccaaatcagccaaagcctgagggaagcgagacgagtgtgctgagaggggagcctctcactgcaggtgtcccccgaccgccgtcgctgttggccaccttgcagcgctggggcacaacacagcccaaatccccctgtctgactgccttggatacaactgggaaagccgtctacactctcacctatggtaaactttggagtcggagtttaaaactagcttatactctacttaataaactgacaagtaagaatgaacctctacttaaacctggagacagagtggcgctcgtgtttccgaatagtgaccctgtgatgttcatggttgcattttatgggtgtctcctggcagagctggttcctgtccccatagaagtgccattaacaagaaaggatgcaggcagccagcaggttgggtttctgctgggcagctgtggagtcttcttggccctgaccacagacgcttgtcagaaaggcctccccaaggcacagacaggagaggtggcagctttcaaaggttggcccccgctctcctggctagtgattgatgggaagcatctagccaagcccccaaaggactggcaccctctggcccaggacacagggactgggactgcctacattgagtataaaaccagcaaagaaggcagtacggtgggggtcacagtgtcccacgcatccctgctggcacagtgccgggctctgacccaggcgtgcgggtactcagaagctgaaacattaacaaacgtgctggatttcaaaagggatgctggtctgtggcatggcgtgttaacaagcgtcatgaacaggatgcacgtggtcagcgtcccctacgcgctgatgaaggcgaacccactctcctggatccagaaagtgtgcttctataaagctcgggccgcgctggtgaagtcgcgagacatgcactggtctctcctagctcagcggggccagagggacgtcagcctcagctcactgcgcatgctgattgtggccgatggtgccaacccgtggtcgatctcctcctgtgacgccttcctcaacgtcttccagtccagaggtctgaggccagaggtcatctgtccttgtgcaagttctcctgaggcgctgactgtcgccatccgcaggccacctgatctgggaggaccacctccaagaaaagcagtcctgtcgatgaacggtctaagttatggtgttatcagagtggatactgaagaaaagttgtcagtccttactgttcaggacgttggtcaggtgatgcctggagctaatgtatgtgttgtgaagttagaaggtaccccttatctttgtaaaactgatgaagtgggagaaatatgcgtcagttccagtgcaactggcacagcgtactatggattgcttggaatcacgaagaatgtgtttgaggcagttccggtcaccacaggaggagcacccatctttgacaggccattcaccaggacaggcctgctgggcttcatcgggcctgacaacctggtcttcatcgtgggcaaactggacgggctgatggtcactggagttcgcagacacaatgcagatgacgttgtggccaccgcactggccgtggagcccatgaagtttgtctacagaggcaggatcgctgtgttctctgtgaccgtgctgcacgacgaccggattgtcctggtggctgagcagcggccggatgcctcggaggaggacagcttccagtggatgagccgtgtgctgcaggccattgatagcatccaccaggtgggcgtgtactgtctggccctggttcctgccaacaccttgcccaaggctcctctcggagggattcacatttctgaaaccaaacagcgctttctggaagggacgctgcacccgtgtaatgtgctgatgtgccctcacacctgtgttaccaacctccccaaacctcgtcagaaacaaccagaggttggaccagcctcaatgatcgtggggaacctggttgctgggaagagaatcgctcaggcttccgggagagagctcgcccacctggaggacagcgaccaggcacggaagttcctgttcctggctgacgtgctgcagtggcgtgcccacaccactcctgaccacccgctgttcttgctgctgaacgccaagggcaccgtcacaagcactgcaacctgtgtccagctgcacaaaagggctgagagagtggccgcggctctgatggagaagggaagactgagtgttggggaccatgtggctctggtctacccaccaggggtggacctcattgccgcgttctatggctgcttgtactgtggctgcgtgcctgtcaccgtgcggcccccgcaccctcagaacctcggcaccacactgcccaccgtcaagatgatcgtggaggtcagcaagtctgcatgcgtcctcaccacgcaggctgtcacacggctgctcaggtccaaggaggctgctgctgccgtggacatcaggacctggcccaccatcctagacacagatgacatcccaaaaaagaagatagcaagcgttttcaggcccccctcccccgatgtcctcgcatacttggacttcagcgtgtcaaccactgggatattagcgggagtgaagatgtcgcacgcggccacaagcgccttatgccgctccataaagctgcagtgtgagctgtacccctcgcggcagatcgccatctgcctcgacccctactgtggccttggttttgccctgtggtgtctgtgcagtgtctactcgggacaccaatcagtgctggtgcccccgctggagctggagagcaacgtgtccctgtggctgtcggccgtcagccagtacaaggcccgcgtcaccttctgctcctactctgtgatggagatgtgcaccaagggcctaggcgcacagacgggtgtcctcaggatgaagggggtgaacctgtcatgtgtgcgcacgtgcatggtggtcgccgaggagcggcccaggattgcgctgacccagtccttctccaagctcttcaaggacctgggcctgccggcccgcgccgtaagcaccacgttcgggtgcagggtcaacgtggccatctgcctccagggcacagctggcccggaccccacaaccgtctacgtggacatgcgggcactgcgccatgacagggttcgtttggtagaacggggttctccgcacagcctgccattgatggagtctggaaagatcctccccggcgtgaaggtcatcatcgcacacaccgagaccaaaggacccttgggagactcacacctgggagagatctgggtaagcagcccccacaatgccaccgggtactacaccgtttacggggaggaggcgcttcatgccgaccacttcagtgcccggctgagttttggagacacacagaccatctgggcaaggaccggctaccttggcttccttcggcgaacagagctcactgatgccagtggagggcggcacgatgcactgtatgtggttgggtctctggatgaaactctggagctcagaggcatgcggtaccaccccatcgacattgagacctctgtcatccgagcacacaggagcatcgctgagtgtgccgtattcacctggaccaacctgctggtggtggtggtggagctggatgggctagagcaggatgccctggacctggtggccctggtgaccaacgtggtgctggaggagcactacctggtcgtgggagtggtggtcatcgtggacccaggggtgatccctatcaactctcggggtgagaagcagcgcatgcacctgcgggacggcttcctggctgaccagctggaccccatctatgtcgcctacaacatgtgagcgcagcacaccggcccaggtgccggagatgaatgagccccagcagtccaaggtgtgatgtgggaagacaccgcagagctcactcaccgggactcgcccttcctgtgctcttacagatccctctcaacaatccccgcatctccttttagaaagcacttcctgaattatttaaagaaatattttgaatctgccaagtacatttacaaaaacacggatgctggtattttaacagatggagagacaaggaaaggaaaggaaaggcctggcatgggcattgtgaggaatcacaggcaccgaggttgttctctgctgtactgcaagtttgcactttctttaggctaaaaatatagttcctgatttttaaaattcagttatttattcccacttcaaatgacaagttcatatatagaatttacgggagaaacttgagaccatttacggggagaaacttgattctgggaagatagcagagtacaaaccagctgcctcacttctgtttcacagggaggctgatggaaaaaggaagcaagctggacccatcctccctgctcacagagggcactgtggtcacacacagtgcctcctctgccagttcctttattgaaagaggtgtgctggctggccacggtggcttacacctgtaatcccagcactttgggaggccgaggcgagcagatcacgaggtcaggagaccgagaccatcctggctaacatggtgaaaccctgtctctactaaaaatacaaaaaattagccgggtgtggtggtgggcgcctgtagtcccagctacttgggaggctgaggcaggagaatggtatgaaccagggaggcggagcttgcagtgagccgagatcacgctactgcactccagcctgggtgacagcacgagatgccgtcttaaaaaaacaaaaaagaggtgtgctgcttgtcagcatgtattgtcacggacactcaataagtgccattttggactgtcaaatttagatgctttgtttcagaaagataagccagcatttagttttaaatcactttcctggtttgtaacttgatgctgtttagttaaattgctagttttcctaacactacaatattaattcttctcgtggaagtgtactgatttattatttttattccaagtcagcagatttggaagcattgtggtaaagtctaaggttttcatatccatagtgctgtttggtgagtaccggcagtacagttgaggggagcagggaacagcattgccccgtattgaaggtggagatggttacattcttcactgctttttgcattttgagttgtgtgcctataaaatttggccaaaccattttattattttgttcaaacttgactaagctgagtgatctaaaattatacagaacctaaatcaaagaagagaatgtaaagtcctttagttacttctaagaatttgaagtcaagcacgaatctaagacatagattatttttatatagctaatgaagagtatgttacgaaattgttgggtttttggggtattgagggtggcaaattttgtgaatcatgcatgcttcacagaaacaaccaggtttttccagaattagtctggatcagtgcctaacaaagctgttattaattctccacacatgagtctggctaactgggccagctctcatgttttactcctgtctggctacaaatagcactgtgcatagtagccctgtttccccatggtgttggactgtggtaaagtatgttgtgacatactggaattctaataatcctgttgtaagtatgtacagaatctatgtaacttattgttgacatacagaggtttgggaagtagtctaatggacattccttacaatagaatggctgggaagggaaagaaaaaaaaaaaaaaactacctaactccaatcttaatgttgtagttttatagcaaacaaaaattgtcagctttttgtattgaaaggtcagtggtggtaagacaaggtgtcttgtaaattaagattttaagaagtgcattaaaatgttttagaattactctgggaattctgtatatcacactaaaatttttatatcattatgttaataaaagttattgactttgtaattctgcattttgaaatgtgtgaaaagggtctttaaattaccccgaataggttgtatcttattttgctttttttctgactataaaagcagttatgcttatagcataaaatctagaaagcacattaaagtataaagaaaattaaaatttcttataattctacctctgagtaaacagcagcattcgtatgtaacataaaccctctcagggatttattttttctttttaaaaattttttacaaaattaggatcaagtgcttttttaaataatttgcttttgtacttaataaattatagactttaaaatc

SEQ ID NO: 3942 - DNA, 5083 bp, Homo Sapiens
  NM_015158
ggtccgcggcggagcgagcgagcggccggcaggttgggaggagcggccgaaggttgaatgcctttgagaacttgatgcataaaatttgcatgactcctcactcctttctggatctctcattggactcaagccagcatggctcacaccacaaaggttaacggcagtgcctcaggaaaagcaggtgatattctcagtggagaccaggacaaggaacagaaagacccttactttgtggagaccccctatggttatcaactagacttagatttcctcaaatatgtggatgacatacagaagggaaataccatcaaaagactgaacatccagaagaggcggaagccgtccgtgccatgcccagaacccaggaccacatctggtcagcaaggtatatggacttccactgaatccctctcatcctccaacagtgatgacaacaagcagtgccccaacttcctcatagccagaagtcaagttacatcaactccaatctcaaagccacctccccctctggagacctcactcccttttcttaccatcccagaaaatcgacagctgccacctccctcaccacaactcccaaagcataaccttcatgtcaccaagacactgatggagacccggagaagactggaacaggagagagccaccatgcagatgacaccgggtgagttcagaaggcccaggctggccagttttggaggcatgggcaccacaagctccctcccttcttttgtgggttctggaaaccacaatcctgccaagcaccagcttcagaatggataccaaggtaatggggattatggtagctatgccccagctgctcccaccacttcctccatggggagctccatccgccacagccccctgagctcagggatctccaccccagtgaccaacgtgagccccatgcacctgcagcacatccgcgagcagatggccattgctctgaaacgcctgaaggagctggaggagcaggtgcgaaccatccctgtgctccaggtaaagatctctgtcttgcaagaagagaaaaggcagttggtctcacagctgaaaaaccaaagggctgcatcccagatcaatgtctgtggtgtgaggaagcggtcctatagtgcggggaacgcctcccagctggaacagctctcccgggcccgaagaagtggcggggaattatacattgactatgaggaggaagaaatggagaccgtagaacagagcacgcagaggataaaggagttccggcaacttacagcagacatgcaagccctggagcagaagatccaggacagcagctgtgaggcctcctcagagctcagggagaatggagagtgccggtctgtggctgtgggtgccgaggagaacatgaacgacatcgtcgtgtaccacagaggctccaggtcctgtaaggatgcagctgtagggacacttgttgagatgagaaattgtggggtcagcgtgacagaggccatgcttggagtgatgactgaagctgacaaagaaattgagctgcaacagcagaccatagaatccttgaaggaaaagatctatcgcctagaagtacagcttagagaaaccacccatgaccgggagatgactaaactgaaacaagagctgcaggctgctggatcgaggaaaaaggttgacaaagccacgatggcccagccgcttgttttcagtaaggtggtggaggcagtggtgcagaccagagaccaaatggtcggcagtcacatggacctggtggacacgtgtgttgggacctccgtggaaacaaacagtgtaggcatctcctgccagcctgaatgtaagaataaagtcgtagggcctgagctgcctatgaattggtggattgttaaggagagggtggaaatgcatgaccgatgtgctgggaggtctgtggaaatgtgtgacaagagtgtgagtgtggaagtcagcgtctgcgaaacaggcagcaacacagaggagtctgtgaacgacctcacactcctcaagacaaacttgaatctcaaagaagtgcggtctatcggttgtggagattgttctgttgacgtgaccgtctgctctccaaaggagtgcgcctcccggggcgtgaacactgaggctgttagccaggtggaagctgccgtcatggcagtgcctcgtactgcagaccaggacactagcacagatttggaacaggtgcaccagttcaccaacaccgagacggccaccctcatagagtcctgcaccaacacttgtctaagcactttggacaagcagaccagcacccagactgtggagacgcggacagtagctgtaggagaaggccgtgtcaaggacatcaactcctccaccaagacgcggtccattggtgttggaacgttgctttctggccattctgggtttgacaggccatcagctgtgaagaccaaagagtcaggtgtggggcagataaatattaacgacaactatctggttggtctcaaaatgaggactatagcttgtgggccaccacagttgactgtggggctgacagccagcagaaggagcgtgggggttggggatgaccctgtaggggaatctctggagaacccccagcctcaagctccacttggaatgatgactggcctggatcactacattgagcgtatccagaagctgctggcagaacagcagacactgctggctgagaactacagtgaactggcagaagctttcggggaacctcactcacagatgggctccctcaactctcagctcatcagcaccctgtcgtctatcaactctgtcatgaaatctgcaagcactgaagagctgaggaaccctgacttccagaaaaccagtctgggtaaaatcacaggcaattatttgggatatacctgtaagtgtgggggccttcagtcaggaagtcccttaagctcccagacatcccagcctgagcaagaagtggggacctcagaaggaaagccaatcagcagcctggatgccttccccactcaggaaggtacgctgtctccagtgaacctgacagacgaccagatcgccgctggcctctatgcatgtacaaacaatgaaagtacactgaagtccatcatgaagaagaaagatggtaacaaagattcaaatggcgcaaaaaagaatcttcagtttgttggcattaatggagggtatgaaacaacttcaagtgatgattccagctcagatgaaagctcttcttccgagtcagatgacgagtgtgatgtcattgagtatcctcttgaagaagaggaggaggaggaggatgaagacactcggggaatggcagaagggcaccatgcagttaatattgaaggtttgaagtctgccagggtggaagatgaaatgcaggttcaagaatgtgaacctgagaaggtggaaatcagagagaggtatgaattaagtgaaaagatgttgtctgcatgcaacttactgaaaaatactataaatgaccccaaagctttgaccagcaaagatatgaggttctgtctgaacaccctccagcacgagtggttccgcgtgtccagtcagaagtcagccattccagccatggtgggggactacatagctgcttttgaggccatttccccagatgtcctccgctatgtcatcaacttggcagacggcaacggcaacacagccctccattacagcgtgtcccactccaacttcgagattgtgaagctgctgttagatgccgatgtgtgtaatgtggatcaccagaacaaggcaggctacacccccatcatgttggcggccctcgccgctgtggaagcagagaaggacatgcggattgtggaagaactcttcggctgtggggatgtgaatgccaaagctagtcaggcgggacagacggccctcatgctggcggtcagtcacggacggatagacatggtgaagggccttctggcctgtggggctgatgtcaacatccaggatgacgagggctccacggccctcatgtgtgccagcgagcacgggcacgtggagattgtcaagctgctgctggcccagcccggctgcaacggtcacctagaggacaacgatggcagcactgcgctctcaatcgccctggaagcaggacacaaggacatcgctgttcttctgtatgcccatgtcaactttgcaaaagcccagtctccgggcacccctaggcttggaaggaagacgtctcctggccccacccaccgaggttcatttgattgattgtatgcaaatagccctttatttacatgccactattaagctgctaattgttcctgttggggtgacagatactgaatgtatacgtattgtgcctgagctcaccagcaaacagaagcatcaagcccaggggtaaaggctgaagctttcacagtgcagagactgctagcctgggcacacacacctcctttctggccgtcttctgtgtagggcacactttaacccagtctctgttgctgttgagtctctgctccgttttgtacagtcacagggaattctgatctgaaggggcaccttctgttcactcccacaaagtggtgtctggttctcactgagacgttttaagatttttccacaaatatttatatgtactaaatgtggaaccattagaaagttcttccaaaatctcattccagcatagttttggatttttcttttgtcttattttaaaataaggaagtcgagatgactttgatcattggtaacttgggcctgggccagacaaagtataaaacttacaaaagaatattctcatttggtcttaactaggtagatgtaatatatgactttttataaaaagggtatctatatgaacttgacacagtattttcagcttttgtattccatactaaagccatgaagaactacacgtaacatcatcatttgtattaattgcacaactccaatgctaaaggttggattgtgttagaggaatcggctctgtatttgcctctagagaaacacagtgttctctttgtatttatggattcctttttaccgtgtcacatttactttggtcctctatgtatttaaatgtttgaagtgccttagactcttgccatattttcaaaataaaattccattaagctctaaaaaaaaaaaaaaaaaaaaa

SEQ ID NO: 3943 - DNA, 2097 bp, Homo Sapiens
  NM_015160
gcaagatggcggctgtggtgctggcggcgacgcggttgctgcggggctcgggttcttggggctgttcgcggctgaggtttggacctcctgcgtacagacggtttagtagtggtggtgcctatcccaacatccccctctcttctcccttacctggagtacccaagcctgtttttgctacagttgatggacaggaaaagtttgaaaccaaagtaaccacattggataatgggcttcgcgtggcatctcagaataagtttggacagttttgtacagtaggaattcttatcaattcaggatcgagatatgaagcgaaataccttagtggaattgctcactttttggaaaaattggcattttcgtctactgctcgatttgacagcaaagatgaaattctgcttacgttggaaaagcatgggggtatctgtgactgccagacatcaagagacaccaccatgtatgctgtgtctgctgatagcaaaggcttggacacggtggttgccttactggctgatgtggttctgcagccccggctaacagatgaagaagtcgagatgacgcggatggcggtccagtttgagctggaggacctgaacctgcggcctgacccagagccacttctcaccgagatgattcatgaagcggcttacagggagaacacagttggcctccaccgtttctgccccacagaaaacgtagcaaagatcaaccgagaggtgctgcattcctacctgaggaactactacactcccgaccgcatggtgctggccggcgtgggcgtggagcacgagcatctggtggactgtgcccggaagtacctcctgggggtccagccggcctgggggagcgcagaggccgtggatattgacagatctgtggcccagtacactggggggattgccaagctagaaagagacatgtccaatgtcagcctgggcccgacccccatccccgagctcacgcacatcatggttggactggagagctgctccttcctggaggaggacttcatcccctttgcagtgttgaacatgatgatgggcggaggtggctccttctcggctggtgggcccggcaagggcatgttctccaggctctacctcaacgtgctcaacaggcaccactggatgtataacgcgacctcctaccaccacagctacgaggacactggcctcctttgcatccatgccagcgccgacccaagacaggttcgagaaatggtagaaatcatcacaaaggagtttattttaatgggcggaaccgtggacacggtggagctggaacgagccaagacgcagctgacatcaatgctcatgatgaacctggaatccaggcctgtgatcttcgaggatgtggggaggcaggtgctggccactcgctccagaaagctgccgcacgagctgtgcacgctcatccgcaacgtgaagccggaagatgtgaagagagtcgcttctaagatgctccgagggaagccggcagtggccgccctgggtgacctgactgacctgcccacgtatgagcacatccagaccgccctgtcgagtaaggacgggcgcctgcccaggacgtaccggctcttccggtagaaccgctccccggcctgacagacccagggagctgcagctggagcccgttcccgtgcgtgttagtttggacacgaatttagtctaaaaagctgtctggttgtataaacggtgcaaacaatgtcgccacagcacccacgcggtttgcattcttttggaactcaatgtgccgatcagtggagtcagtatcgagcctgaccaccgcaagccaggaagcaggtgaagtgcccagcgctggagtgcagcgtgccacgaggagggcggtcggtgcttccctcctcgggctgtgggcacatggggccccgcaggttccttggaggagccctgagctgggaggcagcaaaggctgacctatcaaagcctcccggaggccaccgtgctgggtaccaggactcacctctgacaagcaggagaaggtaagggcccggtcagctccaaggagcgcgctccacgcgcgtgcacacagcttccctggtaataaagagctggcatctttcttaaaaaaaaaaaaaaaaaa

SEQ ID NO: 3944 - DNA, 1834 bp, Homo Sapiens
  NM_015167
ggggcggggcggtgacgcagccgacgtgaccttcccaacatggcggaggcccgccgtatgtgaaggagtaccccaggggagccaaagccaatggaaaaccgcgagaggcgtcggggcggggaagacggcggccgcttgcccaacccgaggctcgggaggtggctggggagtgaattttctggaaggcgactttaaaggcgccgggactgagcgaagggcgtttgggtactgccgtcgccgccgcccaggccggggaggggtgcgttagtgtcaggaagcgggctgcgccgaggtcgtagcggaaccagctggcgaccccgcagaatgaaccacaagagcaagaagcgcatccgcgaggccaagcggagtgcgcggccggagctcaaggactcgctggattggacccggcacaactactacgagagcttctcgctgagcccggcggccgtggcggataacgtggaaagggcagatgctttacagctgtctgtggaagaatttgtggagcggtatgaaagaccttacaagcccgtggttttgttgaatgcgcaagagggctggtctgcgcaggagaaatggactctggagcgcctaaaaaggaaatatcggaaccagaagttcaagtgtggtgaggataacgatggctactcagtgaagatgaagatgaaatactacatcgagtacatggagagcactcgagatgatagtcccctttacatctttgacagcagctatggtgaacaccctaaaagaaggaaacttttggaagactacaaggtgccaaagtttttcactgatgaccttttccagtatgctggggagaagcgcaggcccccttacaggtggtttgtgatggggccaccacgctccggaactgggattcacatcgaccctctgggaaccagtgcctggaatgccttagttcagggccacaagcgctggtgcctgtttcctaccagcactcccagggaactcatcaaagtgacccgagacgaaggagggaaccagcaagacgaagctattacctggtttaatgttatttatccccggacacagcttccaacctggccacctgaattcaaacccctggaaatcttacaaaaaccaggagagactgtctttgtaccaggaggctggtggcatgttgtcctcaatctcgacactactatcgccatcacccaaaattttgccagcagcaccaacttccctgtggtatggcacaagacggtaagagggagaccaaagttatcaaggaaatggtataggattttgaagcaagagcaccccgagttggcagtcctcgcagactcggttgaccttcaggagtccacagggatagcttccgacagctccagcgactcttccagctcctccagctccagttcgtcagactccgactcagagtgcgagtctggatccgagggcgatgggacagtgcaccgcaggaagaagaggaggacgtgcagcatggtgggaaacggggacaccacctcccaggacgactgtgtcagcaaagagcgcagctcctccaggtgacccagcaaggctgttgtctgtatggaaggacacgctcgcggcaagggcagggcctggggagggtggcctgtccagtcctgcagacaaggggaggcctgacagagcccaagaatgaggacaccctcggcacgggaacccattcacttagcgtttgctccagtagctttccctctgctaccaatgcagataaacgcggcttgttttactcaggcaagagaatgtgaatagtgccaagaaaatcctttacattatttaataaaaattgaatccattttctatcttggaaaaaaaaaaaaaa

SEQ ID NO: 3945 - DNA, 6131 bp, Homo Sapiens
  NM_015168
ctccgactctcggcacctggcctccagctttcggaactatggaggccgcgcccgggacccccccgccgccgccatcagagtcgccgccgccgccatcgccgccgccgccatcaacgccttcgcctcctccgtgttcccccgacgcccgcccggccaccccgcacctcctccaccaccgcctcccgctccctgacgacagggaagatggagagttggaagaaggtgaattggaagatgatggggcagaggagacccaggatacctccggagggcctgagagaagccggaaagaaaagggggagaagcatcacagtgattcggatgaggagaagtcccacaggagactgaagcggaaacggaagaaagagcgggagaaagagaaaaggaggtcgaagaagaggaggaaatccaagcacaaacgccatgcttcttctagcgatgacttctctgacttctcagatgactcggatttcagccccagtgagaaaggtcaccgcaagtacagagagtacagccccccatatgcgccgtcccaccagcagtaccccccatcgcatgccacgcccctgcccaagaaggcatactccaagatggacagcaagagttatggcatgtacgaggactacgagaatgagcagtatggggaatatgagggcgacgaggaggaggacatgggcaaggaggactatgacgacttcaccaaagagctgaaccagtaccggcgtgccaaggagggcagcagccgcggccgaggcagccgaggccggggccggggctacaggggccgaggaagccgtggaggatcgcgaggccgcggcatgggcaggggcagccgaggcaggggcagaggctctatgggaggagaccacccggaggatgaagaggatttctacgaggaagagatggactatggagagagtgaggagccaatgggagacgacgactatgacgagtactccaaggagctgaaccagtaccgccgctccaaggacagccgaggccgagggctaagtcgaggccgtggcaggggctcccgaggtcgagggaaaggaatgggtcggggccgaggccgaggtggcagccgaggagggatgaacaagggcggaatgaacgatgacgaagacttctatgacgaggacatgggcgacggtggtggtggaagctaccggagtcgtgaccatgacaagccccaccagcagtcggacaagaaaggcaaagtcatttgcaagtacttcgtggaagggcgctgcacctggggagaccactgtaattttagccatgacatcgaactcccaaagaagcgagaactgtgcaagttttacatcactggattttgcgccagagctgagaactgcccttatatgcacggtgatttcccgtgtaagctgtaccacaccactgggaactgcatcaatggtgacgactgcatgttttcccacgaccctctgaccgaagagacgagggagctcttggataagatgttggccgatgatgcagaagcaggtgccgaggatgagaaggaggtggaggaactgaagaagcagggcatcaaccccctgcccaaaccgccccctggtgtgggcctcctgcccacccctcctcggccccctggcccgcaggctccaacctctcccaacggcaggcccatgcagggtggccccccgcccccgccccctccccctcccccaccgcccgggccccctcagatgcccatgccggtgcatgagccactgtccccgcagcagctgcagcagcaggacatgtacaacaagaagatcccctccttgtttgagatcgtggtgcggcccacgggacagctggctgagaagctgggtgtgaggttccctggacccggtggacccccagggccaatgggccctgggcccaacatgggacccccagggccaatgggcggtccaatgcatcctgacatgcaccccgacatgcacccggacatgcaccctgacatgcacgcagacatgcacgcagacatgccgatgggccctggcatgaatcctggcccacccatgggccctggcggccctccaatgatgccctacggccctggagactccccacattctggaatgatgccccctatcccgccagcccagaacttctatgaaaacttctaccagcagcaggagggcatggagatggagcccggactcctgggggatgcagaggactacgggcactacgaagagctgccaggggagcctggggagcacctcttccctgagcaccctctggagcccgacagcttctctgagggagggcccccaggccggccgaagccaggcgccggtgtccctgacttcctgccctcagcccagagggccctgtacctgaggatccagcagaagcagcaggaggaggaggagagagcgaggaggctggctgagagcagcaagcaggaccgggagaatgaggaaggtgacaccggaaactggtactcaagtgatgaggatgagggtggaagcagtgtcacctccatcctgaagaccttgaggcagcagacgtccagccgacccccggcttcagttggggagctgagcagcagtgggctgggggacccccgcctccagaagggacaccccacaggaagccggctggctgaccctcgcctcagccgggaccccagactcacccgccatgtggaggcttctggcgggtctggcccaggtgattcgggaccctccgatcctcggctggctcgcgccctgcccacctccaagcccgaaggcagccttcattccagccctgtgggccccagcagttccaaggggtctgggccgcccccaacggaggaggaggaaggggagcgggccctgcgggagaaggccgtgaacattcccctggacccactccccgggcaccctctgcgggacccacggtcacagctgcagcagttcagccacatcaagaaggacgtgaccctgagcaagcccagcttcgcccgcaccgtgctctggaatcccgaggacctgatccccctacccatccccaagcaggacgcagtgccccccgtgcccgcggccctgcaatccatgcccaccctggacccccggctgcaccgcgctgccacggcagggccccccaacgcccggcagcgcccgggcgcctccacggattccagcacacagggcgccaacctccccgactttgaacttctgtctcgcatcctcaagacagtcaatgccaccggctcctcggccgcccccggttccagcgacaaacccagtgacccccgggtgcggaaggcccccaccgaccctcggctgcagaaacccacagactctacggcctcctcccgggctgccaagcccggccctgctgaggcgccctctcccaccgccagcccgagtggggatgcctccccaccagccaccgctccctacgacccccgcgtgctggcggccggtggactgggccagggcggagggggcgggcagagcagtgtgctgagcggtatcagcctctacgacccgaggactcccaacgcggggggcaaagccacagagccggctgctgacacgggtgcccagcccaagggtgctgagggcaatggcaagagctcggcctccaaggctaaggagcccccgttcgtccgcaagtctgccctggaacagccagagacagggaaggccggtgctgatgggggcacccccacggacagatacaacagctacaaccggccccggcccaaggctgctgcagcccccgctgccaccaccgccaccccaccccccgagggtgccccaccccagcccggggtgcacaacctgcccgtgcccaccctcttcgggacggtgaagcagacacccaagacgggctcaggaagcccatttgctgggaacagtccggcccgcgagggtgagcaggatgcggcatccctgaaggatgtttttaaaggcttcgaccccacggcctcccccttttgccagtagtgtccagccagagctgcggctccagccacccttcctagggtggcattcagggcagcacccagggtagggaacttgggggcaaggggaggcaggctgggtgttccttttttcttttctttttcttttgctttccgtctcttttatttttttttaaagtagtactttctttgagatttgtaaattgtatataaccatcttaagttctggtcagtgtggcgggctcaggggctcctgctgagcaaaccgactcatgcccgcaaacctgtgaactttcgccagtgcctggcctcagactctgtgggctctgcgtggccgggccttgctggaggcccagtgggttttctgggcaaagcatggccccttttccccaggacaaagggaacagttggtgtctgggaaggtattgaacgctcctcaccctgtgcccgaagagacccggaaccaagaccatggcagggcctgcgtggaagcaggtccaggcgtttctagaaccctagggtgcaccatcactgtcttttcagtgcaggctgtaacaacccactcaggagacagtgagagtgaaaaggtattaaggaaaaagcccccagcggcactatgggggctccctggcgcatgcctgctcctgtccctggattaccacacgtgccctccctgccaccctccgtctagagcaagcggatgccccccagcctgcagcagaagcctccacagtgagaactggacccaaaggtagtgggggccggtgtggggcagagtcctgaagagccacctctaggaggcagcccctaggagcacgcacgttctgtcagtattaccccacctgtcctatcaggtgggccacaccctgcttgcccacaccagggtctgtcctggtcctcaagccacgcacccgctatgcctgcactgcagcccagccccggacagctccaggatccgtgcagtggctgcgccgccaggccccaacaatggggaccctggggtggctcctggccaagtgttctctgttttcctcgcacctccttacactgtgtgacctgcagggcatgaggtattgatgtgttcgggtttcctttcccaagccagcagatgcaggtgttccaaggtgtgttgctctgtgggatttgtggacacttaagaaacggactgagtgggaaccctgcagccaggggatggggagcctctgctccccccatgctcccaccctggctgagggccagcctcatctgcagagccctggaggaggcccacctatggacacagcccgagagatgggcgcaaggggtgctgggggaggcctgctatcctgcctctgggccacttgaggggcctcaggaagtgtgtgcttgtggctgcatctgcccgtctccctggcccaccatgtggctgcaggccaagctcttcattgctgaccatgaagagacctagttacctgccaagggattccccttccctcctcctcagggtggggtgaacaaggctcctatcccaccccaccccaaaaagagaaaaatgaaaaactcatagtttggagccaggaggcagggtgtcctacagggctgcacagccctgaggggtcagtgctgggatctggttggttggtttgtctttttgtctttttttttttttttttttttacacaatcattaatgagatttgtcttcagccaccagtgttggccttgaagcagagggcacagcccttggtgtttgtaaaataagtatgaatacacagtgtggcagtgttgtggtttttgttgttgtttttcctctccttttgagaattttcttttgtaaaagaaaaatattttttaaaccgaaatctgtggatgaaatagaagctggagccctcctcttggaatattcagcctaagaacctcataggactatgaattcacccgaaattctcatttgccatcaggccgagcttttaaagaaaaattgttctctaaccaggattgtaacaaaagtgtaaatactgtttcagagttgagagttggtggtgcaaatatgtatataatgaactgtatttttacaatgatcgccgcatgactatttcacaccctttttatactccatatctgtcttccagaaacgtcacctgcctttctcctgtggtctcttaatccagtaattgtattactgccattaaaggatgcagttattttaaaaaaaaaaaaaaaaa

SEQ ID NO: 3946 - DNA, 1724 bp, Homo Sapiens
  NM_015169
gcatcccggcatctgcacgtggttatgctgccggagtttgggccgccactgtaggaaaagtaacttcagctgcagccccaaagcgagtgagccgagccggagccatggagggccagagcgtggaggagctgctcgcaaaggcagagcaggacgaggcagagaagttgcaacgcatcacggtgcacaaggagctggagctgcagtttgacctgggcaacctgctggcgtcggaccggaaccccccgaccgggctgcggtgcgccggacccacgccggaggccgagctacaggccctggcgcgggacaacacgcaactgctcatcaaccagctgtggcagctgcccacggagcgcgtggaagaggcgatagtggcgcggctgccggagcccaccacacgcctgccgcgagagaagcctctgccccgaccgcggccacttacacgctggcagcagttcgcgcgcctcaagggcatccgtcccaagaagaagaccaacctggtgtgggacgaggtgagtggccagtggcggcggcgctggggctaccagcgcgcccgggacgacaccaaagaatggctgattgaggtgcccggcaatgccgaccccttggaggaccagttcgccaagcggattcaggccaagaaggaaagggtggccaagaacgagctgaaccggctgcgtaacctggcccgcgcgcacaagatgcagctgcccagcgcggccggcttgcaccctaccggacaccagagtaaggaggagctgggccgcgccatgcaagtggccaaggtctccaccgcctctgtggggcgctttcaggagcgcctccccaaggagaaggtgccccggggctccggcaagaaaaggaagtttcaaccccttttcggggactttgcagccgagaaaaagaaccagttggagctgcttcgtgtcatgaacagcaagaagcctcagctggatgtgactagggccaccaataagcagatgagggaggaggaccaggaggaggccgccaagaggaggaaaatgagccagaagggcaagagaaagggaggccggcaggggcctgggggcaagaggaaagggggcccgcccagccagggagggaagaggaaagggggcttgggaggcaagatgaattctgggccgcctggcttgggtggcaagagaaaaggaggacagcgcccaggaggaaagaggaggaagtaatagtttctaactgtcggacccgtctgtaaaccaaggactatgaatactaaatgttaagttctaggcaattatacggggactcagaaggacctggccgctgccttcattgagtttaaagggacaggattgcccttccgtcaagaaagtatgtaagtgttggactgcacaaattaatgtttttcccacaaccgagactttggagattaagaacttatttgaggatttaagaattagggaaataatttggtggaaaccgggaatgagttctattcttaaacagcctttttttttctttttaatgttggatatacggcgaggtagagttggccatatttcagagacttagattgacgtatatgtttctgcattatttttacaacaagtttgtgtatcagagcgggagtgcgggggagggaaagaaaacaaacagtttcagaattgaataggcaagtgactgttttaaagattaagtaataaagatgtcttatctagtgtgacttttaaaaaaaaaaaaaaaaaaaa

SEQ ID NO: 3947 - DNA, 4422 bp, Homo Sapiens
  NM_015171
ggcagtggccgtgtgggttgaggctgcgaggacagcgcgggcccccgggcctctcccctgagccggccgcctgggccgcgcggtcgaggcctgtcagcctccgcccgttcagcctcggggccggggccgccgccacctctgcccgcggaggccggggagcccctgcctgggcccgcagcctcccccgcgggggtcgggcccgggcgggggtcccgagcagctgccctcctcgccggcatccgagcctcatttcctgctttttcagtttccttggggaggggcgggtgggtctggatgaattgtctcggggtcccccgatgaggcgacccgggcggccctgccctttttagagggtcccctcggggcccggtggggaaggggttgtctttgcatgggtgggggacttcccgagtctgccgggaccatgacctgaactgtgcgagcgggacgtgtccgaagcccaagaaccagctcatctgagccgccccctccccggccagcatggcatctgaagaagcctctctcagggcattggaaagtctgatgacagaattttttcacgattgtacaaccaatgaaagaaaacgtgagatagaggagcttcttaataactttgcccagcaaataggagcctggagattctgcctgtactttctctccagcactaggaatgactatgtaatgatgtacagtttaacagtttttgagaatctgatcaataaaatgtggcttggggtcccatctcaggataagatggaaatccgtagctgtctgcccaaactccttttggctcaccataaaaccttaccttactttatccggaacaagctctgcaaagttattgttgatattggacgtcaggattggcccatgttctaccacgacttttttactaacattttacagttgatccagtcccctgtgacaaccccccttgggctgatcatgttgaagacaacttcagaagagctggcttgtccccgtgaggacctcagtgtggctcggaaggaggagttgcggaagctgctactggaccaggtgcagacagtgcttgggctactgacaggtatcttggagactgtctgggacaaacacagtgttactgctgccactccaccaccatccccgacctcaggagaaagtggtgacttactgagtaacctgttgcagagtcccagttcagccaaactgttgaatcagccaattcccatccttgatgtggagagtgagtatatctgttccctggctttggagtgcctggcccatctcttcagttggattcctctgtctgccagcatcaccccatccctccttaccaccatcttccactttgcacgatttggctgtgacatccgggccagaaagatggcgtcagttaacggcagcagccagaactgtgtctcgggtcaggagcgcggccggctgggggtcctggccatgtcctgcatcaatgaactcatgtccaagaactgtgtgcctatggaatttgaggagtatttactgcgtatgttccagcagactttctacctcctgcagaaaatcaccaaggataacaatgcccacacagtgaagagcaggctagaagagctcgatgagagctatatcgagaagtttactgactttcttcggctctttgtgagtgttcacctaagaagaatcgagtcttactcccagttccctgtggtggagtttttgacacttttgttcaagtacacatttcatcagcctactcatgaaggttacttctcttgtttggatatctggacgctgtttttggactatctgacaagtaaaattaaaagtcgtcttggagacaaggaagcagttctcaacaggtacgaagatgccctggtgctcctgctcacagaggtgttgaatcgaatccagttcagatacaaccaagcccagctggaggagttggatgatgagactctggatgacgatcagcagacggagtggcagcggtacttacggcagagcttggaggtggtggccaaagtgatggagctcctgcccacgcacgccttctccacactgttccctgttcttcaggacaatttagaagtttatttgggattacaacagtttatagtcacttcagggtcaggacacaggttgaacatcacggcggagaacgactgccggcggctgcactgctccctgagagacttgagctccctgctgcaggccgtgggccgcctggccgagtactttatcggggatgtgtttgctgcacggttcaatgatgccctcacagtcgtggaaaggttggtcaaagtcactctgtacggatctcagataaaattgtacaacattgaaactgctgtgccatcagtattgaaacctgacctcattgatgtgcatgctcagtccctggctgcgctgcaggcttactctcactggttagcacagtattgcagtgaagttcaccggcagaacacgcagcagttcgtgacactcatctctactaccatggatgcaatcacacctctaatcagcaccaaggtccaagacaagctgctgctatctgcgtgccacttactggtctcactggccaccaccgtgcggcccgtctttctgatcagcatccctgcagtgcagaaagtattcaacagaatcactgatgcctctgccctgcgacttgtcgataaggcccaggtgttggtgtgccgagccctctctaacatcttgctgcttccgtggccaaaccttccagagaatgagcagcagtggcccgtgcgctccatcaaccatgccagcctcatctctgcactctcccgggactatcgcaacctgaagcccagtgctgttgccccacagagaaagatgccactggatgacaccaaactgattatccaccagacactcagcgtcttagaagatattgtggagaatatctcgggggagtccaccaagtctcgacagatttgctaccagtcgctgcaggaatctgttcaggtctccctggccctctttccagcttttatccatcagtcagatgtgactgatgagatgctgagcttcttcctcactctgtttcgaggccttagagtacagatgggtgtgcctttcactgagcaaatcatacagactttcctcaacatgtttaccagagagcagttagccgagagcatcctccacgagggcagcacaggctgccgggtggtggagaagtttctgaagatcctgcaggtggtggtccaggagccaggccaggtgttcaagcccttcctccccagcatcatcgccctgtgcatggagcaagtgtatcccatcattgccgagcgtccctcccctgatgtgaaggccgagctgtttgagctccttttccggacgctccatcacaactggaggtacttcttcaagtccaccgtgctggccagtgtccagagggggatcgctgaggagcagatggagaatgagccccagttcagtgccatcatgcaggctttcggacagtcctttctccagcccgacatccacctttttaaacaaaatctcttctacttggagactctcaacaccaagcagaagctgtaccacaagaagatcttccggactgccatgctgttccagtttgtgaacgtgctgctccaggtcctggtccacaagtcccatgatcttctgcaggaggagattggcatcgccatctacaacatggcctcagtcgactttgatggcttctttgccgccttcctcccagagttcctgaccagctgtgatggtgtggatgccaaccagaaaagtgtgctggggcggaatttcaagatggatcgggacctgccctcattcacccagaatgtgcacaggctggtcaacgacctgcgctactacagactctgcaacgacagcctgccccctggcactgtgaagctctaggcctgctactgcctggggacacggacttctgctgctgccacctgcgccagccctaccttccaccacagatgtctcccagatgggccttggtcacactccttggcttctcccaccgcaagcaacgctgcctgcctctgccgctcctccacatcttgccgctgcccagcagagctggcttctgggtccacctgagcactggacggtgctcccagggcgttggagcaggcggaggggtgtgtggccaggtactaggaggcaccaggaaatcccgcggggtggcccatgcagaccaggcgcacgtggctcatggggcagaattgccaaggacagctcacgacagtgccaccttctcaccattccagccaaggagagatgtgacgttggaactgctctggcacttctgtcaagcctcccccgccccaattgccttgagatctctgctctttgtcagagatttgcaaagactcacgtttttgttgttttctcatcattccattgtgatactaagaaactaagaagcttaatgaaaagaaataaaatgcc

SEQ ID NO: 3948 - DNA, 8843 bp, Homo Sapiens
  NM_015175
agcagacttgggtggctctgcgccgcggaggccacagccgcagacttccccagtagtaccgcgccgctccgccccggagtgacgccctccgcccatgggcctggccgagggcaaccggcgggcggcgcggaggaggcggcgacaggtggcgcgcagcagggccggagccgggccgggccatggccgcctcggagcggctgtacgagttgtggctgctctactacgcgcagaaggacctgggttacctgcagcagtggctgaaggcctttgtaggtgccttcaagaagagcatctcactgtcctctctggagccacgaaggccagaggaggcaggtgcagaggtcccgctgctaccactggatgagctgcatgtgctggccgaacagctgcaccaggctgacctggagcaagccctcctgctgctcaagctcttcatcattctctgcaggaacctggagaacatagaggcaggccggggccaagtgctagtgccccgagtgctggcactgttgaccaagttggtggcggagctgaaaggatgcccaccaccccagggccgaggcacgcagttggagaatgtggccctacatgctctgcttctctgcgagggcctctttgacccttaccaaacctggcggcgccagcgcagtggggaagtcatcagctccaaggagaagagcaaatacaagttccctcctgctgctttgccccaggaattcagcgccttcttccaagagagcctacagaatgcagaccacttgcctcccatactgctgttacgtctcatccacctcttctgcgccgtcctcgctggaggaaaggagaacgggcagatggctgtaagtgatggctctgtgaagggcctgctgagtgtggtgcggggctggagccgtgggccagccccggacccgtgcctagtgccactggctctagaggcactggtaggtgcagtccatgtcttgcatgccagccgcgcacctcctcgtggcccagagcttcgtgccctgcttgagagctacttccatgtccttaatgctgactggccagctggtctgagctcaggccccgaagaggcccttgtcaccctccgggtcagcatgctcgacgccatccccatgatgctggcatgtgaagaccggccagtgctgcaagccaccttcctcagcaacaattgctttgaacacctcactcggctcattcagaacagcaagctgtacctgcagtcccgggcgccccccgagggggacagtgacctggctacccggttactgactgagcccgatgtccaaaaggtcctggaccaagacacagacgccattgcagtccatgtagtcagagtgctgacctgcatcatgagtgactccccctcggccaaggaggtgtttaaggagcgcatcggctaccctcacctgcaggaggttctgcagagccatggtccccccacccatcggctgttgcaagagctgctcaacatggctgtggagggtgaccacagcatgtgcccacctccaccaatccgcaacgagcagccggtactggtgctggcgcagtggctgccgtcattgcccaccgctgagctgcggctcttcctagcgcaacgcctcaggtggctctgtgacagctgccctgccagccgtgccacctgtgtgcaggcaggcctggtgggctgcctgttggagacactcagcacagggctagccctggaggcccgctgccaagagcagctgctggcactgctacaagcactgggccgtgtatcaataaggcccatggagctgcgtcacctgctgcgcccccggccaggattggactcggaaccaggcggagctgaggctggaaaggcccgacacgcaggtgctgtcatccgcacattatcaggcatggccaggcaccagggtcctgcacgtgctctgcgctactttgacctcacgcccagcatggcgggcatcatggtaccccctgtacagcgatggccagggcctggcttcacctttcatgcctggctctgtctgcaccctatggatacagcacctacccctgcccccacccgaccactccagcgaaagcagctgtacagcttctttaccagcagcggctcagggtttgaggccttcttcacggcggccgggaccctggtggtggctgtgtgcacacggaaggagtatttgaccatgagtttgcccgaagtgtcctttgccgactctgcctggcactgcgtggctatcgtccatgtgcctgggcgccggcccttcagccagaacctggtccatgtctacaaagacggccatctggtcaagacagcaccccttcgctgcccctccctcagtgagcctttctcctcctgctgtatcggctccgctggataccgcacaacgaccaccaccacagggctgcccacaccaccagtccccgccaccctggcctacactcaccccgccctcacccgctcccagtcagtcccagcctccacagggcttggctgggggtccgggctggtggcccccctgcaggagggcagcatcgactctaccctcgcaggcacccaggacactcggtggggcagccccacatccctggagggtgagctgggggctgtggccatctttcacgaagccctgcaggcgacggctctgaggaccctgtgcaccctggggcccaatgagacggcacccttcaagcctgagggggagctgcatgagctcagcaccaggctgctcctccattactcacctcaggcttgtaagaacaacatctgcctggacctgtcccccagtcatgggcttgatgggcgcctgacgggccacagagtggagacctgggatgtgaaggatgtggtgaactgcgttgggggtatgggtgccctgctgcccctgctggagcgagtagctgcacagcccaaagaggctgaagcaggtccagctgaaacgcatgacctcgtgggtcctgaactgacctctggtcacaacacccagggcctggttctcccattgggtaaatcttcagaggaacggatggagaggaacgcagtggctgcttttctgctgatgctgcggaacttccttcagggtcacatggtgaaccaagagagcctggtgcagtgccaggggcctgccatcatcggggccctcctgcgaaaggtcccaagctgggccatggacatgaacgtgctcatgtccgcccagctgctgatggagcaggtggcagctgagggcagcgggcccctcctgtacctactctaccagcatttgctcttcaactttcacctctggaccctcagtgacttcgccgtgcgcctcggtcacatccagtacatgtccagcatagttcgggagcacagacagaagctgcggaagaagtacggcgtccagtttatcttggatgctctgcgcacccactacagcccgcagcgggagcgccccctggctgctgacgacctacgcaccgtgcagacctccctcctgggcctggcgagggagttcctggtgcggagtctctcagcagatgacgtgcaggtcacgcagaccatgctgagctttttggcggccacaggcgatgacggtcaggcggtgggtgcgctggacctgctgctggccctgctgcacggttccctggtgcaggagtccttggctgtctttctgttggagccagggaacctcgaagtgctactggccctgctagtgcggccagggtcactgcccctgctgcccgatcgagtctgcaagatcctgcgcagactgcagcagaatgagcggctacctgagcggagccgccagcgcctccggctgcgggagtgtggtctccagggtctggttgcctgcttgcctgaggggactgtttccccccagctctgccagggcctctacaagctgttcctgggggcagattgcctgaacctctcagatctgctggctgtggtacagctgtccctccaggctgacctcagcgttcgcctagacatctgtcgccagcttttccacctcatctacggacagccagatgtagtgcggcttctggcccgacaggctggctggcaagatgtgctgacccggctatatgtcctggaggctgccacagccggcagcccccctccgtcttccccagagtcacctacctcccccaagccagccccacccaagccacccactgagtcacctgctgagccttcagatgtcttcctgccctcagaggccccctgccctgaccctgatggcttttaccatgctctctccccattctgcacgccctttgacctgggcctggaacggtctagtgtaggatcaggcaacactgctggtggtggcggcagcagtgggactcttactccagccagccagcccggcactccttcgccactggatgggccgcggccctttcctgctgctcctggccgccacagctccagtctctccaatgtgctggaggacggcagcctcccggagcccaccattagcggggatgatacctcgaacaccagcaacccacagcaaacctctgaggaagagttgtgcaatctgctcaccaacgtgctgttctcggtgacgtggcgtggcgtggaaggcagcgatgaggctgcctggcgggagcgtggccaggttttctcagtgctcacccagctgggggcctcagccacacttgtgcgcccaccagactgcatcaagcgcagcctcctggagatgatgctggagtcagccctgaccgacatcaaagaggcccccgtgggggtcctggccagcctcacccagcaagcgctttggctgctgcgtctgctgcaggacttcctgtgtgctgaaggccatggtaaccaggaactgtggagtgagaagctctttgaaggtgtatgcagcctacttgatcgcctgggagcctggccccacctggccaacggcacagctgatctccgtgagatggcgcagattggcctacggcttgtacttggctacatcctgctggaagacccacagctgcatgcccaggcctacgtgagattgcacatgctgctacagactgcagtgccagcccgccgcgaggaggcctgctatgtgctctccaagctggaggctgcactggggcgggtgctgaacacctcttccttggagtcagccactgatgaggcagggtccccacttgcagctgcagcagctgcagcagctgcagagcgctgctcctggctggtgccactggtgcgcacgctgctagaccgtgcctatgagccgctggggctgcagtggggactgccctccctgccacccaccaatggcagccccaccttctttgaagacttccaggctttttgtgccacacccgaatggcgccacttcatcgacaaacaggtacagccaaccatgtcccagttcgaaatggacacgtatgctaagagccacgaccttatgtcaggtttctggaatgcctgctatgacatgcttatgagcagtgggcagcggcgccagtgggagcgcgcccagagtcgtcgggccttccaggagctggtgctggaacctgcgcagaggcgggcgcgcctggaggggctacgctacacggcagtgctgaagcagcaggcaacgcagcactccatggccctgctgcactggggggcgctgtggcgccagctcgccagcccatgtggggcctgggcgctgagggacactcccatcccccgctggaaactgtccagcgccgagacatattcacgcatgcgtctgaagctggtgcccaaccatcacttcgaccctcacctggaagccagcgctctccgagacaatctgggtgaggttcccctgacacccaccgaggaggcctcactgcctctggcagtgaccaaagaggccaaagtgagcaccccacccgagttgctgcaggaggaccagctcggcgaggacgagctggctgagctggagaccccgatggaggcagcagaactggatgagcagcgtgagaagctggtgctgtcggccgagtgccagctggtgacggtagtggccgtggtcccagggctgctggaggtcaccacacagaatgtatacttctacgatggcagcactgagcgcgtggaaaccgaggagggcatcggctatgatttccggcgcccactggcccagctgcgtgaggtccacctgcggcgtttcaacctgcgccgttcagcacttgagctcttctttatcgatcaggccaactacttcctcaacttcccatgcaaggtgggcacgaccccagtctcatctcctagccagactcccagaccccagcctggccccatcccaccccatacccaggtacggaaccaggtgtactcgtggctcctgcgcctacggcccccctctcaaggctacctaagcagccgctccccccaggagatgctgcgtgcctcaggccttacccagaaatgggtacagcgtgagatatccaacttcgagtacttgatgcaactcaacaccattgcggggcggacctacaatgacctgtctcagtaccctgtgttcccctgggtcctgcaggactacgtgtccccaaccctggacctcagcaacccagccgtcttccgggacctgtctaagcccatcggtgtggtgaaccccaagcatgcccagctcgtgagggagaagtatgaaagctttgaggacccagcagggaccattgacaagttccactatggcacccactactccaatgcagcaggcgtgatgcactacctcatccgcgtggagcccttcacctccctgcacgtccagctgcaaagtggccgctttgactgctccgaccggcagttccactcggtggcggcagcctggcaggcacgcctggagagccctgccgatgtgaaggagctcatcccggaattcttctactttcctgacttcctggagaaccagaacggttttgacctgggctgtctccagctgaccaacgagaaggtaggcgatgtggtgctacccccgtgggccagctctcctgaggacttcatccagcagcaccgccaggctctggagtcggagtatgtgtctgcacacctacacgagtggatcgacctcatctttggctacaagcagcgggggccagccgccgaggaggccctcaatgtcttctattactgcacctatgagggggctgtagacctggaccatgtgacagatgagcgggaacggaaggctctggagggcattatcagcaactttgggcagactccctgtcagctgctgaaggagccacatccaactcggctctcagctgaggaagcagcccatcgccttgcacgcctggacactaactcacctagcatcttccagcacctggacgaactcaaggcattcttcgcagaggttgtcagtgatggtgtacccctggtgctagccctggtcccccaccggcagccccactccttcatcacccagggttccccagacctgttggtgactgtgagtgccagtgggctgctgggcacccacagctggttgccctatgaccgcaacataagcaactacttcagcttcagcaaagaccccaccatgggcagccacaagacgcagcgactgctgagtggcccgtgggtgccaggcagtggtgtgagtggacaagcactggcagtggccccggatggaaagctgctattcagcggtggccactgggatggcagcctgcgggtgactgcactaccccgtggcaagctgttgagccagctcagctgccaccttgatgtagtaacctgccttgcactggacacctgtggcatctacctcatctcaggctcccgggacaccacgtgcatggtgtggcggctcctgcatcagggtggtctgtcagtaggcctggcaccaaagcctgtgcaggtcctgtatgggcatggggctgcagtgagctgtgtggccatcagcactgaacttgacatggctgtgtctggatctgaggatggaactgtgatcatacacactgtacgccgcggacagtttgtagcggcactacggcctctgggtgccacattccctggacctattttccacctggcattggggtccgaaggccagattgtggtacagagctcagcgtgggaacgtcctggggcccaggtcacctactccttgcacctgtattcagtcaatgggaagttgcgggcttcactgcccctggcagagcagcctacagccctgacggtgacagaggactttgtgttgctgggcaccgcccagtgcgccctgcacatcctccaactaaacacactgctcccggccgcgcctcccttgcccatgaaggtggccatccgcagcgtggccgtgaccaaggagcgcagccacgtgctggtgggcctggaggatggcaagctcatcgtggtggtcgcggggcagccctctgaggtgcgcagcagccagttcgcgcggaagctgtggcggtcctcgcggcgcatctcccaggtgtcctcgggagagacggaatacaaccctactgaggcgcgctgaacctggccagtccggctgctcgggccccgcccccggcaggcctggcccgggaggccccgcccagaagtcggcgggaacaccccggggtgggcagcccaggggggtgagcggggcccaccctgcccagctcagggattggcgggcgatgttaccccctcagggattggcgggcggaagtcccgcccctcgccggctgaggggccgccctgagggccagcactggcgtctgcggccgcagcagcactttttgcacagtctggggcggggttccccggcttccaagtcgctgtttcgtcaaagcacgagggccgcctgtggccttaattcctaacggcggccccggttctcccttctcggcaataaaccaggcctagttttgtagcaaaaaaaaaaaaaaaa

SEQ ID NO: 3949 - DNA, 4449 bp, Homo Sapiens
  NM_015179
agtaatgcacacgaatccggaagtgacgccagaagaagaggaagtgaaggctacagggtatccacgtgggttctgagcgtgtttctacgtccctggaagccggtcatttaagctcattcctcgccacggcttagtcaacatgggtcgctcgggaaagttgccttctggtgtctcagctaagttgaagcgctggaagaaaggccacagcagcgacagcaaccccgccatctgccgccaccgtcaggccgcccgcagccgcttcttcagccggccgtcaggaaggagtgacctgacagtcgatgctgtgaagttacataatgagctgcagtcagggtccttgcgcttgggcaaaagcgaagccccggagacgcccatggaagaagaggcggagctggttctcaccgagaagtcctcgggtaccttcctgagtggcctttccgactgcacaaacgtcaccttcagcaaagtacagcgcttctgggagtccaactcggctgcccacaaggagatctgtgctgttctggctgctgtcactgaggtgattcgctcccagggagggaaggagacggagactgagtacttcgctgctctgatgacaacaatggaagcagtggagtccccggagtccctggccgccgttgcttacctgctgaaccttgtcctgaagcgtgttcccagccctgtgcttattaagaagttctctgatacctccaaagccttcatggatatcatgtcagctcaggccagcagcggctccacctctgtcctccgatgggtcctttcctgcctggccacccttctgcggaagcaagacctggaggcctggggctaccccgtgacccttcaggtgtaccatgggctgctgagcttcacggtgcatcccaagcccaagatccggaaggctgcccagcatggagtatgctcagtcctcaagggcagtgaattcatgtttgaaaaggcccctgcccatcatcctgctgccatttccactgccaagttctgcatccaggagattgagaagtctggaggctccaaggaggccaccaccacgctgcacatgctgacgctgctgaaggacctgctgccctgcttcccggaaggcctggtgaagagctgcagtgagactctcctcagggtcatgaccttgagccatgtgctggtgacagcctgtgccatgcaggcctttcacagcctcttccacgccaggcctggcctgagcaccctgtcagcagagctcaacgcccagatcatcacggccctgtacgactatgttcccagtgagaatgatttacaacccctgctagcctggcttaaggtcatggagaaagcccacatcaacctggtgaggttgcagtgggacctggggctaggccacctccctcgcttttttggaactgcggtgacctgcctcctttccccacactcgcaagtgctgactgctgctacgcagagcctcaaggagatcctgaaggaatgcgtggctccccacatggctgacattggctccgtgacctcctcggcctcaggccctgcccaatctgttgccaagatgttcagggcagtggaggagggcctgacgtacaaattccatgcggcctggagctccgtgttgcagctgctgtgtgtcttcttcgaggcgtgtgggagacaggcccaccctgtgatgaggaagtgcctccagtccctgtgtgacctgcgcctctcccctcatttcccccacacggcggctcttgaccaggcagtgggggctgcggtgaccagtatgggacctgaggtggtgctgcaggctgtgcctttggaaattgatggctctgaggagactctggatttcccacggagctggctgctgcctgtcatccgagaccatgttcaggaaacgcgacttggttttttcaccacctacttcttgcccctggctaacaccctgaagagcaaagccatggacctggctcaggcaggcagcacagtggaatctaagatctacgacacactccagtggcagatgtggacactcctgcctgggttctgcacaaggcctacagatgtggccatctccttcaaagggctggcacggacgctgggcatggccatcagcgagcgtccagacctgagggtcaccgtgtgccaggccctgcgcaccctcatcaccaagggctgccaggcagaggctgaccgtgctgaagtgagtcgctttgccaagaactttctgccgatcctcttcaacctgtatgggcagcccgtggcagccggggacactccagcccctcgccgggctgtgctggaaaccatcagaacttacctcaccatcactgacactcagttggtgaacagtctcctggaaaaagccagtgagaaggtgctcgaccctgccagctctgactttaccagattgtctgtcctggacctggtcgtggccttggctccgtgtgctgacgaagctgccatcagtaagctatactccaccatccggccctacctagagagcaaggcccacggggtgcagaagaaggcctaccgagtgctggaggaggtgtgtgccagtcctcagggccccggggccctcttcgtgcagagccacctggaggacctgaagaagacactgctggactcgctgcggagcacctcctcacccgccaagaggccccgtttgaagtgcctcctacacatcgtgaggaagctctcagctgaacacaaggagttcatcactgccctcatcccagaggtgatcctgtgcaccaaggaggtgtcggtgggcgcacggaagaacgcttttgcactgctcgtggagatgggccatgctttcctaaggtttggctcgaaccaggaagaggccctgcagtgctacctcgtcctgatctaccctggcctggtgggcgcggtgaccatggtcagctgcagcatcctggccctgacccacctccttttcgagtttaaaggtctgatggggaccagtacagtggagcagctgctggagaatgtgtgcctgcttctggcctcccgcacccgtgacgtggtcaagtctgcactgggcttcatcaaggtggcagtgactgtcatggacgtggcgcacctggccaaacatgtgcagctggtgatggaagccattgggaagctttcagatgacatgcggcggcacttccgcatgaagcttcggaacctgttcaccaagttcatccgcaagtttggatttgagctggtgaaaaggctgttgcccgaggagtaccacagagtcctggtcaacatccggaaagctgaggcccgggccaagaggcaccgagccctgagccaggctgccgtggaggaggaagaagaggaggaggaggaggaggagcccgcccagggcaaaggtgacagcattgaggagattttagctgactcagaggacgaggaggacaatgaggaggaggaaagaagccgaggcaaggagcagcggaagctggcacgacagaggagccgggcatggctgaaagagggcggtggggacgagcccctcaacttcctggatcccaaggtggcccaacgagtcctggccacgcagccagggccaggccggggcaggaagaaggaccacggcttcaaggtgagcgccgatggccggctgatcataagggaggaggcagacggcaacaagatggaggaagaggaaggtgccaaaggcgaagatgaagagatggctgacccaatggaagatgtgatcatcaggaataaaaagcaccagaagctcaagcaccagaaagaggctgaggaggaggagctggagataccccctcagtaccaagctggaggctctggcattcatcgccctgtggccaagaaggctatgcctggggctgaatacaaggccaagaaagcaaaaggtgatgtgaagaagaaaggccggccggatccctatgcctacatccccctcaacagaagcaagctcaaccgcaggaagaagatgaagctgcagggacagttcaaaggcctggtgaaggctgcccggcgaggttcccaggtgggacacaaaaaccgcagaaaggatcgtcgaccctgaggcccagggcccctgggctgccctgtggtccagtctgaggccctttcagcccccaggctgccttgccaccagctccaggtgctcaagattctggcagagcctggactcaggatgacttggaactagggcttggctctcagaagtcctggattttggaaactccaaatggaatcacccttcagagacatccctggtgcctggagatgggaatgtggcctcagtgcctctgagtaggtgccatgaggcacctttgctttctgcccagagtggccatgagcaccagaacagatgatctccatttccgccagctgcctgtagccacgtggcatcctgcctgtggtctgggtgagatttactgtgaccagatgtagaataaatgtgtctcatcctgcaaaaaaaaaaaaaaaaaaaaaaaa

SEQ ID NO: 3950 - DNA, 1450 bp, Homo Sapiens
  NM_015190
cgaaaaagaagcagtcctgggctgtacccggcgcagctgggagcggctgcttcctccggggtcgtatctccgcccggcatggggctgctggacctttgcgaggaagtgttcggcaccgccgacctttaccgggtgctgggcgtgcgacgcgaggcctccgacggcgaggtccgacgaggctaccacaaggtgtccctgcaggtacacccggaccgggtgggcgagggcgacaaggaggacgccacccgccgcttccagatcctgggaaaagtctattccgttctcagtgacagagaacagagagcagtgtacgatgagcagggaacagtggacgaggactctcctgtgctcacccaagaccgagactgggaggcgtattggcggctactctttaaaaagatatctttagaggacattcaagcttttgaaaagacatacaaaggttcggaagaagagctggctgatattaagcaggcctatctggacttcaagggtgacatggatcagatcatggagtctgtgctttgcgtgcagtacacagaggaacccaggataaggaatatcattcagcaagctattgacgccggagaggtcccatcctataatgcctttgtcaaagaatcgaaacaaaagatgaatgcaaggaaaaggagggctcaggaagaggccaaagaagcagaaatgagcagaaaggagttggggcttgatgaaggcgtggatagcctgaaggcagccattcagagcagacaaaaggatcggcaaaaggaaatggacaattttctggctcagatggaagcaaagtactgcaaatcttccaaaggaggagggaaaaaatctgctctcaagaaagaaaagaaataatggaatttttctcttcaaaggtccttaggtgtaaattgatgccatcgtaggcaaggtgcaggcaagatttgaaggcaaaagtcaattcagctcttgagaaaaggtgtctttccagcctgaatttttcagattgactagaccaagcagaatctctcaacctgatcttagtatttcctagaaagcacttgacattgtgtgaggtctcacctgaaggaacttggtggtgacatttgggagggtggagggaggcagtgtccttcctgacagcacttgcctccatggatcttctgtacacagaactcttatctaggatgtggttctgttcatgctgctttctgcgatgtgcgtgtctgttagaataggctctctacccagctagaacaccttccagacacttgctggacagctatcttccacatacttcccagtttacatttggtcttaatgatcttgaatagatcctctcttcattttactcagccaggttttgtactgatgtacaggtgttaaattacttcaagcatttttgtaagaggtgtatataattcaataaaaaaggtaagacatgatgattaaaaaaaaaaaaaaa

SEQ ID NO: 3951 - DNA, 6705 bp, Homo Sapiens
  NM_015192
cagatggccggggctcaacccggagtgcacgccttgcaactcaagcccgtgtgcgtgtccgacagcctcaagaagggcaccaaattcgtcaagtgggatgatgactcaactattgttactccaattattttgaggactgaccctcagggatttttcttttactggacagatcaaaacaaggagacagagctactggatctcagccttgtcaaagatgccagatgtgggagacacgccaaagctcccaaggaccccaaattacgtgaacttttggatgtggggaacatcgggcgcctggagcagcgcatgatcacagtggtgtatgggcctgacctcgtgaacatctcccatttgaatctcgtggctttccaagaagaagtggccaaggaatggacaaatgaggttttcagtttggcaacaaacctgctggcccaaaacatgtccagggatgcatttctggaaaaagcctatactaaacttaagctgcaagtcactccagaagggcgtattcctctcaaaaacatatatcgcttgttttcagcagatcggaagcgagttgaaactgctttagaggcttgtagtcttccatcttcaaggaatgattcaatacctcaagaagatttcactccagaagtgtacagagttttcctcaacaacctttgccctcgacctgaaattgataacatcttttcagaatttggtgcaaaaagcaaaccatatcttaccgttgatcagatgatggattttatcaaccttaagcagcgagatcctcggcttaatgaaatactttatccacctctaaaacaagagcaagtccaagtattgattgagaagtatgaacccaacaacagcctcgccagaaaaggacaaatatcagtggatgggttcatgcgctatctgagtggagaagaaaacggagtcgtttcacctgagaaactggatttgaatgaagacatgtctcagcccctttctcactatttcattaattcctcgcacaacacctacctcacagctggccaactggctggaaactcctctgttgagatgtatcgccaagtgctcctgtctggttgtcgctgtgtggagctggactgctggaagggacggactgcagaagaggaacctgtcatcacccatggcttcaccatgacaactgaaatatctttcaaggaagtgatagaagcaattgcggagtgtgcatttaagacttcaccttttccaattctcctttcgtttgagaaccatgtggattccccaaagcagcaagccaagatggcggagtactgccgactgatctttggggatgcccttctcatggagcccctggaaaaatatccactggaatctggagttcctcttccaagccctatggatttaatgtataaaattttggtgaaaaataagaagaaatcacacaagtcatcagaaggaagcggcaaaaagaagctctcagaacaagcctccaacacctacagtgactcctccagcatgttcgagccctcatccccaggagccggagaagctgatacggaaagtgacgacgacgatgatgatgatgactgtaaaaaatcttcaatggatgaggggactgctggaagtgaggctatggccacagaagaaatgtctaatctggtgaactatattcagccagtcaagtttgagtcatttgaaatttcaaaaaaaagaaataaaagttttgaaatgtcttccttcgtggaaaccaaaggacttgaacaactcaccaagtctccagtggaatttgtagaatataacaaaatgcagcttagcaggatatatccaaaaggaacacgtgtggattcatccaactatatgcctcagctcttctggaatgcaggttgtcagatggtggcacttaatttccagacaatggacctggctatgcaaataaatatggggatgtatgaatacaacgggaagagtggctacagattgaagccagagttcatgaggaggcctgacaagcattttgatccatttactgaaggcatcgtagatgggatagtggcaaacactttgtctgttaagattatttcaggtcagtttctttctgataagaaagttgggacttacgtggaagtagatatgtttggtttgcctgtggatacaaggaggaaggcatttaagaccaaaacatcccaaggaaatgctgtgaatcctgtctgggaagaagaacctattgtgttcaaaaaggtggttcttcctactctggcctgtttgagaatagcagtttatgaagaaggaggtaaattcattggccaccgtatcttgccagtgcaagccattcggccaggctatcactatatctgtctaaggaatgaaaggaaccagcctctgacgctgcctgctgtctttgtctacatagaagtgaaagactatgtgccagacacatatgcagatgtcatcgaagctttatcaaacccaatccgatatgtgaacctgatggaacagagagctaagcaattggctgctttgacactggaagatgaagaagaagtaaagaaagaggctgatcctggagaaacaccatcagaggctccaagtgaagcgagaacgactccagcagaaaatggggtgaatcacactacaaccctgacacccaagccaccctcccaggctctccacagccagccagctccaggttctgtaaaggcacctgccaaaacagaagatcttattcagagtgtcttaacagaagtggaagcacagaccatcgaagaactaaagcaacagaaatcgtttgtgaaacttcaaaagaaacactacaaagaaatgaaagacctggttaagagacaccacaagaaaaccactgaccttatcaaagaacacactaccaagtataatgaaattcagaatgactacttgagaaggagagccgctttggaaaagtccgccaaaaaggacagtaagaaaaaatcggaacccagcagccctgatcatggttcatcaacgattgagcaagacctcgctgctctggatgctgaaatgacccaaaagttaatagacttgaaggacaaacaacagcagcagctgcttaatcttcggcaagaacagtattatagtgaaaaataccagaagcgagaacatattaaactgcttattcaaaagttgacggatgtcgcagaagagtgtcagaacaatcagttaaagaagctcaaagaaatctgtgagaaagaaaagaaagaattaaagaagaaaatggataaaaagaggcaggagaagataacagaagctaaatccaaagacaaaagtcagatggaagaggagaagacagagatgatccggtcatatatccaggaagtggtgcagtatatcaagaggctagaagaagcgcaaagtaaacggcaagaaaaactcgtagagaaacacaaggaaatacgtcagcagatcctggatgaaaagcccaagctgcaggtggagctggagcaagaataccaagacaaattcaaaagactgcccctcgagattttggaattcgtgcaggaagccatgaaaggaaagatcagtgaagacagcaatcacggttctgcccctctctccctgtcctcagaccctggaaaagtgaaccacaagactccctccagtgaggagctgggaggagacatcccaggaaaagaatttgatactcctctgtgaatgctcctgccaggccttcagaaattgcatggccactccagcgtcatcggactctctcttattacaaagatcactgcccaggaccatcttcccgagaagcatcccttagcctaaaatccacaccaaagggagagttccagaggaatccatgaagaattcccatgcccaggctccatgtgtcatgtggaaacctccacaggtctgctagtgaagaatgcatgtatgtgagatttttgttttctttccaatagcaaattcaaagcaagcaacttgcaggctccatggaacttttaatgaaggacagtgtcttctttgaagaaaatcaagctcgtgtttttattcgaagctctggtgtaaaatatttcaaagtcatagaaatagtttgagaaatgcatagcattatttaacactattgaacagccgactttgagcattgtttcttctaactgcccctcaactaccattatcttcaagtcaacatgcatattacattttcatcctttgctttgcaagcactggtggcttgcagtttgctaatttatttatcatagagtcatcaatgtatttgttgctgacatggttttattagatactgtagtgattcaaataagttttctatttgaaaaaaaaaatcacttgattgtatccttgcccagtgaagccatcctaagacttagcaatatggattgtacatttggctgcatgagcaagtcggccgcacacttccagacagtgtgctgtttgaattgactatttgcactcaaagtctgggtattcattggttattggcctgaaatgatcaaataactacaaatgatctgttgaataaaaatagttgagctgatatatgttaagcagatattcaatcagaatgaacaggttccggtggttattttgccgtttgacattttttatggttcatttatttttaatatagagaggaagattgaatatttatctagagaatacaaagacccacatgtaaatgataggtattatctccatgtatatatgtacccacttagtcatgtaagtgcatatacacatacacacacatgagtgtagacatgtgtttattaattgacaatgacccaaatctcttccacaagacttaaaaccaaattcagggacaaatggatagagaagaaaagggtcaaacatcgagattacatggatgttaaattatatggagacgctaagaaataattgatggagccattgatgcaaaccgaagtagatttagaacttatatgaatttgatttatattttgcaagatcaaaaattagatgttaagtatcagattttaagcttgttttaatggtcaaaaaattaggacagaaataatatggacatttattagtatcttccataatttttaagtctgacacatttctattttattctaacataaaaaaacttccattatatatttactaagtatatttaattcacttaactctgtctttataagttcctattttagatggaataagagaaacaaattatatcaaggtaaaactgatcaaaagcataattgaaagttctgaaaaaagaaaaataataatatgtagaaaaatgtaacttagagagtaacacatgaacattgaagttaaaacccagaagccagatgctcacagttttattttactttaaaataaacctgtctgactgtagctttgtgaaatatcttaaaacgcaaaaaccaattgtgtcctgaaaattgtttcaagaatttaatatttttatgaaaattattttatttaactttaagcaataactagagattacaattaaattttaatcaaaatgaaggcttagttcaaacataaggaaacagtgtttgattaaaaaaaacacatctagtaagacgtaaggggaaaatcacatcctctttggagatgattatattttgatctgaagggtttggggtgttcattagacacttaataaaacttaacttccaatgaaaaagaaatcttttgtaaatcattctacttttgcactttgaaagaaaggcgttaatcataaagaagcaagaatggtcaaaatcgaatgctgcatttttataaacaaaattacagactgtctgaaattgaagaagaatgaactaataatagcattcataaccaaacacaatgatgattattgcagaacattgtatcacattttagtccagagatagaataaagttgaataaccttgacttacacaaaactgttttggtagttggatttcattatcttagtgaatttagtcattttacaatatgtttgtatttggccatttactgtaatcacatttttatatctgtacaatgacactttttgcagttgtggggtagtgtgtaacactgtccatcttgcatcattgaaactactacaatgatactatcatttaataatattaatattacttgaaatagactaagataaagaaaaggggtctgtatgatgtgcagttttgtgcctttatgtatttgccttgttctttgtcgaatgtgtgaaattccgtactgtggtttttcctataatagaaagtagagctgtgtattaaattagactgtgtctctctgatacctttacactactgagaatagcatggttttggccatgtaaaccaattttcaaagttctaatgacatagccatgtgtttttggttttttatatttcattttaaaatttgagtatcaccatacattaattaatactcctgtagtagataagctgtcattaagtaattcccaaaaaaagggccatttgcttgcattactttgaatttaatgttgcgcttgtgcactgtgttaatattgtttgtgatggattggacgttgtgactcttgccttttaagaagaaaaaaaagataggacaaagtatttgaagctcttaaaatgtacatattttggttcttctatctcaaattatttaaaatgcataattcacatttttgtaataattctatgcaattttgtggcatgatgtttcttccacttgtaattttatgtgctttcatcacaaatccaaaggaaagaataaaaatttcttaacacaa

SEQ ID NO: 3952 - DNA, 6320 bp, Homo Sapiens
  NM_015197
ggccgcagctcgtcgccgcccgcgggcctgtccgacgccggggcccggcccgtcccctccgccgcccggcagccatgtgaccgcgccgccgccctccgcgcgcccggcccgcccgccgcgcgtccgcggcccggccgcagccccaggccgccgagggagcggcggggccggcgccatggccgagcgaggccgcctcggcctccccggcgcgcccggcgcgctcaacacgcccgtgcccatgaacctgttcgccacctgggaggtggacggctccagccccagctgcgtgcccaggttgtgcagcctgactctgaagaagctggtggtcttcaaggagctggagaaggagctgatctccgtggtgatcgctgtcaagatgcagggctccaaacgaatcctgcggtcccatgagattgtgctgccccccagtggacaagtggagacagacctggccctgaccttctccttgcagtatcctcacttcttgaagagggaaggcaacaagcttcagatcatgctgcagcgcagaaagcgctacaagaacagaaccatcctgggctacaagacgctggccgcgggctccatcagcatggctgaggtgatgcaacacccgtctgaaggtggccaggtgctgagcctctgcagcagcatcaaggaggcccccgtcaaggcggccgagatctggatcgcctccctgtccagccagcccattgaccacgaagacagcaccatgcaggccggccccaaggccaagtccacggataactactccgaggaggagtatgagagcttctcctccgagcaggaggccagtgacgacgccgtgcaggggcaggacttggacgaggacgactttgacgtggggaagccgaagaagcagcggagatcgattgtaagaacgacgtccatgaccaggcaacagaacttcaagcagaaagtggtagcgctgctgcggaggttcaaagtgtccgacgaggtcctggactcggagcaggaccctgcggagcacatccccgaggcagaggaggacctggacctcctgtatgacaccctggacatggagcaccccagcgacagcggccccgacatggaggatgacgacagcgtcctcagcacccccaagccgaagctgcggccatactttgaaggcctgtcgcactcgagctcgcagacggagattgggagcatccacagcgcccgcagccacaaggagcccccaagcccggctgacgtgcccgagaagacgcggtccctgggaggcaggcagccgagcgacagtgtctctgacacggtggccctcggtgtgccaggcccgagggagcaccctggacagcctgaggacagccccgaggctgaggcctccaccctggatgtgttcacggagaggctgccgcccagcgggaggatcaccaagacagagtcccttgtcatcccctccaccaggtccgaggggaagcaggctggccgacggggccggagcacatccttgaaggagcggcaggcagcacggccccagaatgagcgggccaacagcctggacaacgagcgctgcccggacgcccggagccagctacagatccccaggaagactgtgtatgaccagctcaaccacatcctcatctccgatgaccagcttcccgaaaacatcatccttgtcaacacctcggactggcaggggcagttcctctccgacgtcctgcagaggcacacgctccccgtggtgtgcacgtgctctcctgcggacgtccaggcggccttcagcaccatcgtctcacggatacagagatactgcaactgcaattcccagcccccgacccccgtgaagatcgccgtggcgggagcgcagcattacctcagtgccatcctgcggctctttgtggagcagctgtcccacaagacacccgactggctcggctacatgcgcttcctggtcatcccactgggctcccaccccgtggccaggtacctaggctccgtggactaccgctacaacaacttcttccaggacctggcctggagagacctgttcaacaagctggaggcccagagtgcggtacaggacacgccagacattgtgtcacgcatcacgcagtacatcgcaggggccaactgtgcccaccagctccccatcgcagaggccatgctgacctacaagcagaagagccctgacgaagagtcctcccaaaagttcattccctttgtcggggttgtgaaggttggaattgtggagccatcctcggccacatcaggcgactcggacgacgcggccccctcgggctctggcacgctctcctccaccccgccgtccgcatctcctgcggccaaggaggcctcacccaccccgccctcctccccgtcggtgagcggaggcctgtcctcccccagccagggtgtcggcgccgagctgatggggctgcaggtggactactggacggcagcacagcctgcggacaggaagagggacgccgagaagaaggacctgcctgtcaccaaaaacacgctcaagtgcactttccggtccctccaggtcagcaggctgcccagcagcggcgaggctgcagccacgcccaccatgtccatgaccgtggtcaccaaggagaagaacaagaaggtgatgtttctgcccaagaaagcgaaggacaaggacgtggagtctaagagccagtgcattgagggcatcagccggctcatctgcactgccaggcagcagcagaacatgctgcgggtcctcatcgacggcgtggagtgcagcgacgtcaagttcttccagctggccgcgcagtggtcctcgcacgtgaagcacttccccatctgcatcttcggacactccaaggccaccttctagccccacccaccagggggcccacctcctgccccatgctgtgaggggcccagctgcatttctgttaacatttcagtttactacagagacagacgcttaaaacacaaagagaaacagtcttaagtatgaatgtgctcacaacgtggaaactaacgggggagctcctgccaggagccgaataactgctctgcttattaacccgaacgttcggcccggggctgggaagccagaaggacgatgctgagccatggatcgcggaaggcgtcctctggcctcaggagccacccagagcctcacaggctgagttcttgcctctgtgtcctgtccttcctggaagtcaggactctgcttcctcagggagcccggggaaggcggagctcagtggccacaggccgagggccatggggccgctcagtcccgttggggttgtcctgagttgagcctgggggggccgtcctgcccgcctaagagatgcccccagcaccgcacactcgtggttcccaataaactcctgcctgcggcggaggttttatagcagcagatatttttaatgcttttcaatacatgttctaatgtagctgccaaacatgttgctcttctgaagtccccctggggctgggcagagccagcagagcctgcccccacttccccagcccctgccccaccccgcctcacaccttccccactctcaggctgttcttgaaacaccatgaggcttctgcgtgtagtccctgccccaaacttagcaagcacaggggcctccacagcccaggtggccccagaaaatgttccagagcccagcttggtacatagtgagatgctgctggggttggcctgaggtgggggccacttcctccaccccagtgggtatgtctgaggtcagccatggggatatctgggttgagattcaggttttggtgaatatggggcaggcgtccagatgtgtttgtgtcacctgctgcaacgctgtagccaatgaagattccagcgggatggcctgaccagcggggccggcactttggagccgtgggtgcagccaggtaccccgtgcagggcctgggaggctctccaggccacagtcctcagagcgtgttgggtcccatgttgtgtgtgggttccatgccctccacacagcaggagagggcttccctgaccacacctgccccctcagtcctgcttctccccagtaagcctgcactgtggggtctccataggaggagctggggaagctggggccctcccaggggtcctgatcgaccctgggggctcttggcctggtttcgtaagatggagcactgcaaaaggccatgctcagaaagcaaacgcagggcagggtgggcctcgagccggggctggaggggtctccacccttgctggcctgagagatggcccacatttcttacttgtgaccgccctgctcttcctggccgccccccccaggtggctgaacagggtgattttgttgtggtgaggggccaggatgtggcctggtgtgcagcctcagctccctgggttcaggcctcagaggtagcctgtgtgcaggaggcagagccccagcccctcccagccagagcccctccacaccagggactcctccttcacctgggaccaggagcctggggcacaccccagggtgggggagagggtaggaaggtctcccattgaatcctggcttcaggctctgccccgagaagtgtctgcggtgagggtgtgagccccgggctgatggcctctgaccccggcaacaggtgggaccctgactgactcgttcagctgcccccaagctgggctgcagagcatctgtttttctgctctccagtttcttttctttttttttttttttttttttgagatggagtcttgctctgttgcccaggctggagtgcagtggcatgatctcagctcactgcagcctccgtctcccaggttcaagcagttctcctgcctcagcctcccgagtagctgggattacaggcgtgtgccaccacacctggctattttttttgtatttttagtagagatggggttttgccatgttggccaggctggtcttgaactcctgacctcaagtgatccacccgcctcggcctcccaaagtgctgggattacaggcgtgagtcaccgcgtcctgcctgctcttcctgtttctttcccaagggtcacactcagtagggagatgaaggtggaaacatccttgctgtggctttctggcctcagagcaggttttagaggaaggggccacaggctgcctagtgcatcctggctgtgggcagcccctttcctggagccctcctgcctaccccgtacctcccatctggctgcacagctccatccttagccacgcaaggggagaacatgggcagagtctccatccagcagctgggggttctggtggcactccctgtgcccctgctgctgctgggctgtgggtctgccctgcacccaggagccccacggtccatcccccacaccatgcccagcaccagggaggttgggcagacaagacctgggccatgccagccctctgtgcctcggttttcccactggttacacaggatggtcgcattttccctgcctacctcacagagctgttctgagggtgcatggaggagcactctgtcccaccaaggacaactagaaaccaaagccatctgacagccagtgcggtaagggcgggggatgtgtgtgtgaggtgtgcacaccccccgagaacctggccctggactggcctcacaggacaggaggcagccccttgtagagctagggctcagccccatcagtctcaaaggttaagccaccagtcaccaccgaggcacccctcaggcctggtggccactgtccactattacgtagacagaccccaccctcacccaggccagctgtgggccagtcccgccctgcaatctggtctgctgccttcctcttccatgttggtccccttggccactgtctctgggcatgcaagccagtgtcctggttcagtgcctcggccagagctggggcaggagaggggcctctgggtgagagctgggggtgtctctgcagggtactggcagccttgccacactgtcctcattcccagatggaaagacctgagtgcctctcgccttcctccgggaatgaattcctcatgaaaatgaccaggccacttcttccgagggccaggccgccccctccccgagacctgtcctgccgtccgcgggtgtgtggcctgtaggggactgagagctgggcttgctgggcacctctggaatctgaccctgtgggccaaagaagcaccactgtagtttctgcagacccccatgcggttcattgtgcattgtttggtttctaggatgtatgtgttgctagttttttttaatgaaaccctggattaatgtaaatagctttttggggaacggattctaatgtcacgtatgtgaccgtgtggactatttcaaggtgctgatgcaacactaataaacctggaggggccggc

SEQ ID NO: 3953 - DNA, 6726 bp, Homo Sapiens
  NM_015200
ccggctcccggggcacggacggccgggcgcgcgcctctgcgaggggcgtccgggtccgagtcggcggtccgggccggcgcgaggtgcgtgcgggcgggccgcgggggtcccggacggacacaagcgcacacactcccggaagatcgcttaccctccgggggtaaaagagatcaccgacaagatcaccacggacgagatgatcaaacgcctgaagatggtagtgaaaacctttatggatatggatcaggactcagaagatgaaaaacagcagtatctcccactagccttgcatcttgcatctgaattcttcctcaggaaccccaataaagatgtgcgtctccttgtagcatgttgtttggctgatatctttcgtatctatgccccagaagctccatatacttcccatgataaacttaaggacatatttttgtttattaccagacaattaaaaggtttggaggatacaaagagtccacagtttaatagatacttttatttattagagaatttagcttgggttaaatcatataacatctgctttgaattggaagattgcaatgaaatttttattcagctttttagaactctcttctcagtgatcaacaatagccacaataagaaggtacaaatgcacatgctagatttgatgagttctatcatcatggaaggtgatggagttactcaagaattattggactccattcttattaacctcattcctgcacataagaacttaaataaacagtcctttgaccttgcaaaagtgctattgaaaagaacagtccagactattgaggcatgcattgctaattttttcaatcaagtcctggtgctgggaagatcatcagtaagtgatttgtcagaacatgtatttgatctgattcaggaactttttgctatagatcctcatttattattatccgtcatgccacagcttgaattcaaactaaagagcaatgatggagaagagcgattagctgttgttcgacttctagctaaattgtttggctccaaagattctgatttggcaacacagaatcgtcctctttggcaatgttttcttggacgatttaatgatattcatgttcctgtgagattagaaagtgtgaaatttgccagtcattgtttaatgaatcacccagatttagcgaaggatctcacagaatatttaaaggttagatcacatgatccagaagaagctattcgtcatgatgtcattgttactataataacagctgccaagagggacctggccttagtaaatgatcagctgcttggctttgtaagggaaagaacactggataaacggtggcgagtaagaaaagaagctatgatgggtctggctcagctttataagaaatactgtcttcatggtgaagcaggaaaggaagctgcagagaaagtcagctggataaaggacaaacttctgcatatttattatcagaacagcattgacgacaaactgttggtagagaaaatctttgctcagtatcttgtcccccacaacctggaaacagaagagagaatgaaatgcttatattacttatatgctagtttggatccaaatgctgtaaaagctctcaacgaaatgtggaagtgtcagaacatgcttcggagccatgtacgcgaactattggatttgcacaagcagcctacatcagaggctaactgttctgccatgtttggaaaactgatgaccatagcaaagaatttgcctgaccccgggaaagcacaagattttgtgaagaaatttaaccaggttctcggcgatgatgagaaacttcggtctcagttggagttattaattagcccaacctgttcttgcaaacaagcagatatttgtgtgagagaaatagcccggaaacttgcaaatcctaagcaaccaacaaatccttttctagagatggtcaaatttctgttggaaagaatcgcacctgtgcacattgattcagaagccataagtgcactagtgaaattgatgaataagtcaatagaggggacagcagatgatgaagaggagggtgtaagtccagatacagctatccgttcaggacttgaacttcttaaggttctgtcttttacacatcctacctcgttccactctgcagagacatatgagtccttgttacagtgcctaagaatggaggatgacaaggtagcagaagctgctattcaaatttttagaaatacaggtcacaaaatagaaacagaccttccccagatacgatcgaccttaattcccattttacatcaaaaagcaaagaggggtactccacaccaagcaaaacaggctgtgcactgtatacacgccatattcacaaataaagaagtccagcttgcacagatttttgagccactcagtaggagtctgaatgctgatgtgccagaacaacttataactccattagtttcattgggccacatttctatgttagcaccagatcagtttgcttccccaatgaaatctgtagtagcaaattttattgtgaaagatctgctaatgaatgacaggtcaacaggtgaaaagaatggaaaactgtggtctccagatgaagaggtttcccctgaagtactagcaaaggtacaggcaattaaacttctggtaaggtggctgttgggtatgaaaaacaaccagtctaaatctgccaattcaacccttcggttattatcagcgatgttggttagtgagggtgacctgacagagcaaaagaggatcagtaaatctgatatgtctcgcttgcgattagctgctggtagtgccataatgaagcttgctcaggaaccttgttaccatgaaattattaccccagaacagtttcagctctgtgcacttgttattaatgatgagtgttaccaagtaaggcagatatttgctcagaagctgcataaggcacttgtgaagttactgctcccattggagtatatggcgatctttgccttgtgtgccaaagatcctgtgaaggagagaagagcacacgcacgacaatgtttactgaaaaatatcagtatacgcagggaatacattaagcagaatcctatggctactgagaaattattatcactgttgcctgaatatgtagttccatacatgattcacctgctagcccatgatccagattttacaagatcacaagatgttgatcagcttcgtgatatcaaagagtgcctatggttcatgcttgaagttttaatgacaaagaatgaaaacaatagccatgcctttatgaagaagatggcagagaacatcaagttaaccagagatgcccagtctccagatgaatccaagacaaatgaaaaactgtatacagtatgtgatgtggctctctgtgttataaatagtaaaagtgctttgtgcaatgcagattcaccaaaggacccagtcctcccaatgaaattttttacacaacctgaaaaggacttctgtaacgataagagttatatttcagaagagacaagagtacttctgttaacaggaaagccaaagcctgctggagtactaggtgcagtaaataagcctttatcagcaacgggaaggaaaccctatgttagaagcactggcactgagactggaagcaatattaatgtaaattcagagctgaacccttcaaccggaaatcgatcaagggaacagagttcagaggcagcagaaactggagttagtgaaaatgaagagaaccctgtgaggattatttcagtcacacctgtaaagaatattgacccagtaaagaataaggaaattaattctgatcaggctacccagggcaacatcagcagtgaccgaggaaagaaaagaacagtaacagcagctggtgcagagaatatccaacaaaaaacagatgagaaagtagatgaatcgggacctcccgccccttccaaacccaggagaggacgtcgacccaagtctgaatctcagggcaatgctaccaaaaatgatgatctaaataaacctattaacaagggaaggaagagagctgcagtgggtcaggagagccctgggggtttggaagcaggtaatgccaaagcacccaaactgcaagatttagccaaaaaggcagcaccagcagaaagacaaattgacttacaaaggtaaaaatgcatttgcaaagggagaaaatgaaggccaaacagaagcaggctccagcttctgcaaaaacttggattcacaaatgtccctgaacagaaaatgaagctcacttcagaacacacactctctgccttgaaaactaaagagactattacttccttttcacatgaccacaagtcctctgatggaaatgtacagcagaaactcttgagagagaggctaaaagcaactctgttctcccccttcccctagacttttcttacgaaaagtcaataattaagcaaattgcttaacacttggttccagttcctgcctatctggagtttaaatgcgtaatacaccattaatttccacgctgcagtttttattttaaagaaagtaacaagatgtctttacactgacactgaaaattcatccattttagagccaggaattcccatgttacacaggaaaaaatagaagtctactgaattaattttttaaaagaaaagagatcagattaaatatttctttgtttttccttttggaaacttttatgtataattctttctgcctgcctacttttctgcaaaaatgagatgtacagatttcggttccctgctatgaaaagtgatgtggtagcaattttataaatgttgctttctgatttttatcagagtgagaaaattaaaattattgatttgcaagtagtaaacagttcatattttgatttcccctcattttagtttaatataatttgcaataaatgtacatattgttgtttgtttcataaagcatatcactttaaaatggtttttactcctgtgattatgttggaatatttggaattttaaaggagtaaagactgtccagcatttggttttataatgtttgtcaccagatttttattaatgtaaaaaaaatcaatttttaaaaaatagttggactttggcagcttttaaggaaagttggaggtgttttaggattgctatcaattttcagcattgtgctatttggaaataagtgttttgcttttgtctgatggtctgggctcatttttatgtttattttagaaaactgttgcatcaatatattatgtttcttggcattgttcagcataggtaatgtgtgcactttatgtgtacacataatcatatttaagttttttgcataaaataaatgcttctagatgtcatggcagtctttttaatctttttatcatatgctttcttgtgaattttttcatgttaaagagctaaagtcataacatgattacagtcaactctccattatctatataaaatagtgactaagcctcaggtttttaattttgtgataacaaaataacgaaggcatgtaagacctgattctggaggaacatgaaatttgtcttttctcatgtccagagttctatcctgcccccactgtccactgtagggtcatccgcaaagccctagcagaatgtgctcactccatttccttacacgtttctagcatgggtcagaggaaacaacatttgtgttataacttcgtcttgataggctgtagtgtacatgggatgtaaaacaaacaagtgtatcaaaggtggatgattctgttagagtgaagtttgagagtaaatgtcacttacgtttctcatagataatcaagagttggctgtgtattgactgaaagatgggtaattattttaaatatgcatttacacacatttaggtatcagaagatgcttagggaacaatggataccaatgatagaaaatgatacctttacaggggcagaaaaatccccactcttccttattgcctcttcagaaccctttagaaagtataaaatattgcctccaacatgctgaaaaagagtatctatgcataagtatcagagaagtccctcaagcaatcagtaggtgtgttctatttagagagagtttaaagttctcttagcatcagacaacttgattcctaaggtttccagtgtgtcaccaacaaaaagtgcattgatagggacctttgtctcttcctccctttgattaattgcccggcatcacagtttactagattaccaagtgttacatcatattaaataaaatgtagcagaaccatctgcatcaatatattcctgtttagatttttgcaggagagaagttaaaaggatttgctccttgtatgatgtaagtggcccaccccaattttgtaacatgatgcaagtgtctggcactaagggaagcaagagtagggttgtggaaagaccaagctgatggggagggacttgtttacgggaatttttttagttttccttttcaaaggaaaacattaaaatcccttaggaatttggtattcacatctcagagaactacaacacaaaagtgcagacttatatttgagaattaatgttaaccctttgtgtctagtttgaagcttcttgtatttgtctaaaacaacaagccagaattttgtatctcctttgataaaaagtgtgtataatgtaaagtagttttgcatattcttgtgctgcacatgggctgaatttttaaattttttttaaaaacttgaagcagaaccttgtaatttgtgtaaatgacaagtgtaaaatcctaccataaaatgctaaaaatatgcactgtttcaaataaaaccaagaaatgcagcattaaaaaaaaaaaaaaa

SEQ ID NO: 3954 - DNA, 2422 bp, Homo Sapiens
  NM_015201
ctcctgcgcacgcggcccggtcgctgtcggaagcggctgtgcgggtggcggccggcgcgcggtggggcatggcgggttcgcggggtgcggggcgcacggcggcgccgagcgtgcggccggagaagcggcggtctgagcccgaactggagcctgagcccgagccggagccccccctcctctgcacctctcctctcagccacagcaccggcagcgattctggcgtctccgacagcgaggagagtgtgttctcaggcctggaagattccggcagtgacagcagtgaggatgatgacgaaggcgacgaggagggagaggacggagcccttgatgacgagggccacagtgggattaaaaagaccactgaggagcaggtgcaggccagcactccttgcccgaggacagagatggcgagcgcccggattggggatgagtatgcggaggacagctctgatgaggaggacatccggaacacggtgggcaacgtgcccttggagtggtacgatgacttcccccacgtgggctacgacctggatggcaggcgcatctacaagcccctgcggacccgggatgagctggaccagttcctggacaagatggacgatcctgactactggcgcaccgtgcaggacccgatgacagggcgggacctgagactgacggatgagcaggtggccctggtgcggcggctgcagagtggccagtttggggatgtgggcttcaacccctatgagccggctgtcgacttcttcagcggggacgtcatgatccacccggtgaccaaccgcccggccgacaagcgcagcttcatcccctccctggtggagaaggagaaggtctctcgcatggtgcacgccatcaagatgggctggatccagcctcgccggccccgagaccccacccccagcttctatgacctgtgggcccaggaggaccccaacgccgtgctcgggcgccacaagatgcacgtacctgctcccaagctggccctgccaggccacgccgagtcgtacaacccaccccctgaatacctgctcagcgaggaggagcgcttggcgtgggaacagcaggagccaggcgagaggaagctgagctttttgccacgcaagttcccgagcctgcgggccgtgcctgcctacggacgcttcatccaggaacgcttcgagcgctgccttgacctgtacctgtgcccacggcagcgcaagatgagggtgaatgtagaccctgaggacctcatccccaagctgcctcggccgagggacctgcagcccttccccacgtgccaggccctggtctacaggggccacagtgaccttgtccggtgcctcagtgtctctcctgggggccagtggctggtttcaggctctgacgacggctccctgcggctctgggaggtggccactgcccgctgtgtgaggactgttcccgtggggggcgtggtgaagagtgtggcctggaaccccagccccgctgtctgcctggtggctgcagccgtggaggactcggtgctgctgctgaacccagctctgggggaccggctggtggcgggcagcacagatcagctgttgagcgccttcgtcccgcctgaggagccccccttgcagccggcccgctggctggaggcctcagaggaggagcgccaagtgggcctgcggctgcgcatctgccacgggaagccagtgacgcaggtgacctggcacgggcgtggggactacctggccgtggtgctggccacccaaggccacacccaggtgctgattcaccagctgagccgtcgccgcagccagagtccgttccgccgcagccacggacaggtgcagcgagtggccttccaccctgcccggcccttcctgttggtggcgtcccagcgcagcgtccgcctctaccacctgctgcgccaggagctcaccaagaagctgatgcccaactgcaagtgggtgtccagcctggcggtgcaccctgcaggtgacaacgtcatctgtgggagctacgatagcaagctggtgtggtttgacctggatctttccaccaagccatacaggatgctgagacaccacaagaaggctctgcgggctgtggccttccacccgcggtacccactctttgcgtcaggctcggacgacggcagtgtcatcgtctgccatggcatggtgtacaatgaccttctgcagaaccccttgctggtgcccgtcaaggtgctgaagggacacgtgctgacccgagatctgggagtgctggacgtcatcttccaccccacccagccgtgggtcttctcctcgggggcagacgggactgtccgcctcttcacctagctgttctgcctgcctggggctggggtggtcgtgctgaagtcaacagagcctttaccctgtgctgaaaaaaaaaaaaaaaaaaaaaaaaaaaaaaaaaaaaaaaaaaaaaaaaa

SEQ ID NO: 3955 - DNA, 7819 bp, Homo Sapiens
  NM_015203
gtgtaggagctgccagcgtgcccagcagctggtgttcccgtccgtacctccagaagagcccagcgcgtgcaccatccccaccccctagcttccctccccacctacggctttcacgcactcgcagtgattgttttgcccgctcccgccgccgccgccgccgccgccgccagaggagcagcagcgcttgtgcaaaccgggaagatggcggccggcggcggcggaggcagcagtaaggcctcctcctcgtcggcctcttcggcaggggctctggagtcctcgttggatcgaaaattccagtcggtaaccaacaccatggagtccattcaaggcttgtcgtcttggtgtatagagaacaaaaaacaccacagtactatcgtctatcattggatgaagtggctccggagatctgcatatccccaccgtttgaatctcttttaccttgccaatgatgtcatacagaactgtaaaaggaaaaatgcaatcatattccgtgaatcatttgctgatgtacttcctgaagcagctgctctagtgaaggatccatctgtctctaagtctgtagaacgaatctttaaaatctgggaagatagaaatgtatacccagaagaaatgattgtggcattgagagaagctttgagtaccactttcaaaactcagaagcagctgaaagaaaatctgaacaaacaaccgaataagcagtggaagaaatcacaaacatctacaaatccaaaagctgctctcaagtctaagatagttgctgaatttcgatctcaggccctaattgaagagctgttgctatacaagcgctcagaagatcagatagaactgaaggaaaagcagttgtcaactatgagggtggatgtgtgcagcacagaaactctcaaatgcttaaaagataaaacaggtgggaagaagttctccaaagaatttgaagaggcaagctccaagctggaagaatttgtgaatggattagataagcaggtgaaaaacggaccctcattaacagaagcactggaaaatgctggaattttctatgaagcacaatacaaagaagtaaaagtggtggctaatgcatataaaacctttgctaaccgagtaaacaatttaaagaagaagttggatcaattgaagtcaacccttccagatcctgaagaatcaccagttccttccccaagcatggacgctccctccccgactggttctgagtctccttttcagggaatgggaggtgaggaatcccagtcaccaaccatggagagtgagaaatctgccacacctgaacctgtgacagataatcgtgatgtggaagacatggaactctcagatgtggaagatgatgggtcaaaaatcattgtcgaggacaggaaggaaaaacctgcagagaagtcagctgtatccacttctgtacctacaaagccaacagaaaatatctcaaaggcctcttcatgtaccccagtgcctgtgaccatgacagcaactccacctcttccaaagcctgtgaatacttctctttccccttccccagcattggctttgccaaacctggctaatgtggatctggcaaagatcagttccatccttagcagtttaacatcagtcatgaaaaatactggggtcagtcctgcatcaagaccttctccaggaacgcccaccagccccagcaacctcaccagtggcctgaaaacacctgcacctgccacgacaacatctcacaaccctctggcaaatatcctctccaaggtggagatcaccccagagagcattctgtctgcactttccaaaacccagacacagtcagcccctgcactgcaaggcctgtcatctttacttcagagtgttactgggaacccagttccagccagtgaagctgcctcacagagcacttcagcctcccctgccaacaccacagtctctaccataaagggaagaaatctgccctccagtgcccaaccttttattcccaaaagcttcaactattctcctaactcatcaacttctgaagtctcttcaacttcagccagcaaggcctcaattgggcaaagcccagggctcccaagcactacttttaaactaccttccaactctttggggtttacagctacccacaatactagccctgctgccccacctactgaagttaccatctgccaatcttcagaggtctccaagccaaagctggagtcagagtccacctccccaagcctggaaatgaagattcacaacttcttaaaaggtaatcctggtttcagtggcttaaacttaaacatcccaatcctgagcagtttggggtccagcgccccatcagagagccatccctcagacttccagcgtggccctactagcacctcaatcgacaacattgatggaacccctgtacgggatgaacggagtgggacacccacccaggatgagatgatggacaagcccacatccagcagtgtagatactatgtccctgctttctaagatcattagccctggttcctcaacacccagcagtacaagatcaccaccccctgggagagatgaaagctacccccgagagctctccaattctgtatctacatatcgaccctttggtctgggcagtgaatctccctataagcagccttctgatggaatggagagaccatcttccctgatggactcttcacaggaaaagttctacccagatacttctttccaagaagatgaggattaccgagattttgagtattcagggcctccaccctctgccatgatgaacctagagaagaaaccagccaaatctatcctgaaatcaagcaagctgtctgataccaccgagtaccagccaattctgtccagttatagccacagagcccaagaatttggggtaaagtctgccttccctccatctgtaagggccctcctggactctagtgagaactgtgaccgtctctcatcttcccctgggctatttggtgccttcagcgtaagagggaatgaacctgggtctgaccggtcaccatcaccgagtaagaatgattcatttttcacccctgactccaaccacaatagcttgtctcaatctaccactgggcatctcagtttgccacagaagcagtacccagactctcctcacccagtcccacatcgttcccttttctctccgcagaacacccttgccgctcccacgggtcacccacccacgtcaggcgtggagaaagtcctggcctccaccatttccaccacgtcgacgattgaatttaagaatatgcttaaaaacgcctcacgtaagccctcagatgataagcattttggccaggctcccagcaagggcactccaagtgatggtgtcagtctctcaaacctcacccaacccagcttgaccgccactgatcagcagcaacaagaagagcactaccgcatagaaacccgcgtctcctcctcctgcttagacttgcctgatagcacagaagaaaagggggcccctatagaaaccttgggttatcacagtgcatccaataggaggatgtcaggggagccgatccagaccgtagagtccatccgagttcctgggaagggaaatagaggacatgggcgtgaggcttcaagggtgggttggtttgatctgagcacatcaggtagctcttttgacaatggcccttcaagtgcctctgagttggcatcccttgggggtgggggcagcggaggcctcactggctttaaaacagcaccatacaaggaacgggcacctcaatttcaggagagtgtcggcagctttcgttccaacagtttcaactcaacatttgagcatcatcttcccccatcccccttggaacatgggacacccttccagagagagccagtggggccatcatctgccccacctgtccctcctaaggatcatggtggtatcttctctcgagatgcacccactcatctaccctctgtggatctttcgaaccccttcacaaaggaggcagccctggcccatgctgccccaccccctcctcctggagagcacagtggaattcctttccctaccccacctcctcctccccctcctggggaacatagcagcagtggtgggagtggtgtccccttttctactccaccccctcctccaccccctgttgaccactctggagttgtacccttcccagccccaccactggcagagcacggagtggcaggggctgtggcagtatttcccaaggaccatagttccctccttcaagggaccctggctgagcattttggggtactcccaggacccagggaccacgggggccccacccaacgggacctcaacggccctggccttagccgtgtacgagagagcctcaccctaccctcccattctctggaacacctgggcccaccccatggaggaggaggtgggggaggcagcaacagcagcagtggcccccccttgggtccctcacacagagacaccatcagccggagtggtataatcttacggagtccccggccagactttcggcctagggaaccttttctcagcagagacccatttcacagtttaaagagacccaggccaccttttgctaggggccctccgttctttgcaccaaaacgcccattcttccctcccaggtactgatggaaaccaagggaaaggcattttgaacagtctagagaacattggaagtaggagtttggtttattgttgttgtttttatttgttttctctttctcgattttttttttattataacaaagggcctctcttccaaagtaagaaatcacatacgcttacgttttactattcaattcaatcctccctcccattgcacttatctaccttccccaagttgtttgtattaaaaaaaaaaaaaaaaaaaaaaagtaaagaaacacaaccaaagccatttcatttggctggggggttggggagtggggaggaaaacaatctttattttaccccatctattgaagagtattattacatttgaaataaaacttccatcagtacagataaccacatgtgcaatgttgggatgttattttgggcttggcttatcgagtagtcaatggaaggattcccgtcccctctctcggcagcttagtaactgctgtagccagctcggctcccttccctgtgtatctgtgtcctgctaacagccaagagatgttgcaagggaggaaatgtgagagaccttgaacctgtcaggtttatttgttttgtttttaaaggcatgttgaagtttagttctttacccttctcctaaaatctttttttaatcagcctcaaggttaaaataaggagtgactacagtatgtaaaataaggaaaggaagcattaatggtgtgatgtgacctgcctgtttttttgtaaacaagagaataggaaatgttttcaaggtagtttcacatgtcttgcaccaagctcatgcctcttgcttttcctttttgactttatctccctcagtttttcttctgctgtggccagaaagacagtcactacagttgactattgatacaaaggtgcaacagaaatattatccctgcatttttaaatataagaagtagacattaattttaccatggtgcctccctaatgtaagtgatatttattggtggttttcaacaaaggttaactattaaagaaagaaatatttgtctttatcttccttttccccttgcctcagtcgtgttattcacccctattcttgatattttaaaggaggagattcagtagcattttcctttatattatacacatgtgtctatcccatttcaaggctcaagtcttacccccacctctcgctcccaataggaaataaagaccatttctgcccttagttgttttacatgcaagataagtgctttccttctccctggactgaaagacttgtttgtatttctacatctagtacttgggaaatagacaatcactgtactttgagtgtttatatctttatatctagggacactgaaaagtaaatgttgctttactacaatttttttttaatttagtgtcttaccccaaggcatactcaactgataatctccagctagatgagtaaaacagtatgtgtttagttttccagagaattctggcaagtttcatattttcttccaagttagtatagaactaactataggaagtatggggttgctttttcctccagtagaatattaaagatgggggagggtgggcaatgtagtgacagaaaatgattctctcagaatgaacttttcagagaaagagcagcataaaccaggtgcacatcatgatttgggagtttttgcgtaatttattctgttatttatttgggctcgccatgtgttctggggttaggatgctgcaggtcattcatcttcttaatgcctgtctggtcttaagccaactgttctttctttcctcgaccctctctgccctgtagctctccccacaaaaatgcatgataccatgaccttacgtgtgggatggggtatgtagtgtagcaaagaaaagaaagtatagttatattgagtcctaagacatttgttagggaaaagcataagagaaaatggggtgggaggtggggaaatgatatttgactttcaaaattgaaataggttttttttttgcagaaattaaatgggatgtttttcattctagaataaaagaatgtgaattctctttgctgctcttgtttaagctaaaagtagtgtttacttgataaggctctctgaccatttaatttttatcagaaaatgtggggatgtcaggaaagtggcttcctgaacgttggggcgggataattgtcctcaaaagtatgatggttaatacatgaaaggaagactttgttggacagtttcgaaggtgggcttttaaggagttgggtttttgtggggtacttttttgttttttaagccacaaaatcctcaatatgtttgttttaggatggaagtgaggatttgtatgagactgtcagctattaattttaaggaaatcttaaaatttacatttacatcagtaaatgaagatgacagtgtgtatatatgtgataaatagtgaaacagaaaagacagttctggtattcataacgtgaaagaaaggggttttattctttctgtgtctgtgatttaaaactccgtgaccatgctctgacttttgtatttcaacctgagtttaaacaaataaacaagatattttttaaagaaagcataacatagtgtgtcttagcaaggacatgattcatatggaagcagaatgtgagaagttgtaaggtccttggtactcactgtaaaatcacagacagagaattggtaggggttgtgaatacactagtaccacttaaagttcagtgatacagttcagaaatagggtccttaagtattttgaaagagtttactcttcagtcagcttagatgagagctctctccctgctcccctctaccctctcaaaagttgagagtaaatagaatttggtttgattccagggaggggaaaataagcagagaataggacttttatactttccaataccaggaataaaatgtttgtgatatatatgggtccagcaaacctatcgagataatgtgaatacgataaacttcctaatggcaggatattcactctcaatcctgaagttaccggttcctgcagaattgagcttcagctgttactgttttgaagccgctgtaaattactgctttccccagttcccccactattttttttaagtgggcgggggcgcctgttaagatctaaaatagatatgttggattgatattctcacgtgttcggtgtggaaaacaaaacaagtacatgctttagaagcaacaacaatgaaatccttttgaaatgtgtgttaatatcgtttaataaaataactagtttgaaa

SEQ ID NO: 3956 - DNA, 4965 bp, Homo Sapiens
  NM_015213
cgctctcggctagctgcagcggcggcggcgcggaggggaaggcatccaggatgcggtgcggggcggcccggtgcccccccgccccgtcacggcagccgcggcggccgaggggaccgggccagggccgggggcggcggcccgagccgcggtagcggcggcggcgggaggggcggcctgagggcggacgggcgggcgcccgggttgcgggggctcggtgccgctccgcactgcccggccggtctcggccccggcgccatgagtggcggcggcggcggagggggctcggcgcccagtcgcttcgccgactactttgtcatctgcggactggacacggagaccgggctggagccggacgagctgtcggcattatgccagtacatacaggcttctaaagccagggatggtgccagccctttcatttcaagtacgactgaaggagaaaattttgagcagacaccattgagaagaacattcaaatctaaggtccttgcacgatatcctgagaacgtagaatggaatccctttgaccaagatgcagtaggaatgctatgtatgccgaaagggctggcattcaagacccaggctgatcccagggagccccaattccatgcctttattatcacaagggaggatggctctcggacatttgggtttgccctcacattttatgaagaggtgactagcaagcagatctgcagtgcaatgcagaccctctaccacatgcacaatgctgagtatgatgtcctacatgctccccctgctgatgacagagaccagagcagcatggaggatggtgaagacactcctgtgaccaaactgcagcgcttcaactcctatgacattagccgggacactctctacgtctctaagtgcatctgcctcatcacacccatgtctttcatgaaggcatgtcggagcgtgctggagcaactccaccaggcagtcacttcacctcagccccctccactgccccttgagagctacatatacaacgtactctacgaggtgccgctcccacctcctggccggtccttgaagttttctggggtctatgggccaataatctgccagagaccaagtaccaatgagcttcccctatttgactttcctgtcaaagaggtttttgaactgctcggggtggagaatgtgtttcagctttttacttgtgcccttctggagtttcaaatcctgctctactcacagcattaccagagactgatgactgtggcggagacgattacagctctcatgtttcctttccagtggcagcatgtctatgtccctattctcccagcttctctcctgcatttcttagatgctcctgttccatacctgatgggtttgcattccaatggcctggatgaccggtcaaagctggagctgcctcaagaggctaacctctgctttgtggacattgacaaccacttcattgagttgccagaggacttgccacagttccccaacaaattggagtttgtccaggaagtctctgagattctcatggcatttggaattccccctgaagggaatcttcattgcagtgagagtgcctccaagctgaagaggctgcgggcctctgagcttgtctcggacaagaggaatgggaacattgctggctcccctttgcattcctacgagcttcttaaggagaatgaaactattgcccggctgcaagccttggtcaagagaactggggtgagcctggaaaagttggaagtgcgtgaagaccccagcagcaataaggatctcaaagttcagtgtgatgaagaagaactcaggatttaccagctaaacattcagatccgggaagtttttgcaaatcgtttcactcagatgtttgcagattatgaggtgtttgtcatccaacccagccaggataaggaatcctggtttaccaacagggagcaaatgcaaaactttgataaagcatcttttctgtcagatcagcctgagccctacctgcccttcctctcaagattcctggagacccagatgtttgcatctttcattgacaacaaaataatgtgtcatgatgatgatgataaagaccctgtactccgggtatttgattcccgagttgacaagatcaggctgttgaatgttcggacacctactctccgtacatccatgtaccagaagtgtaccactgtggatgaagcagagaaagcaattgagctgcgtctggcaaaaattgaccatactgcaattcacccacatttacttgacatgaagattggacaagggaaatatgagccgggcttcttccctaagctgcagtctgatgtactttccactgggccagccagcaacaagtggacgaaaaggaatgcccctgcccagtggaggcggaaagatcggcagaagcagcacacagaacacctgcgtttagataatgaccagagggagaagtacatccaggaagccaggactatgggcagcactatccgccagcccaaactgtccaacctctctccatcagtgattgcccagaccaattggaagtttgtagagggcctgctgaaggaatgccgcaataagaccaagaggatgctggtggaaaagatgggccgagaagctgtggagctagggcatggggaggtgaacatcacaggggtggaagagaacaccctgattgccagcctttgtgatctcctggaaaggatctggagtcatggactacaagtgaaacaggggaaatcagccttatggtcccacctgttacattatcaggacaaccggcagagaaaactcacatcaggaagcctcagtacctcaggaatacttcttgattcagaacgtaggaagtctgatgccagctcactcatgcctcccctgaggatctccctgattcaggatatgaggcacatccagaacatcggggaaatcaagactgatgtgggaaaggccagagcatgggtgcgactgtccatggaaaaaaagttactttccagacacctgaagcagctcctctcagaccatgagctcaccaaaaagttatataagcgctatgccttcctgcgctgtgatgacgagaaggagcagttcctctatcacctcctgtctttcaatgccgtcgattacttttgcttcaccaatgtcttcacaactatcctgatcccgtaccacattctgatcgtaccaagcaagaagctggggggctccatgttcactgccaacccatggatctgtatatcaggagaattgggtgagacacagatcatgcagattcccaggaatgtgctagagatgaccttcgagtgccagaacttggggaagcttactactgtccagattggccatgataactctgggctgtatgccaaatggctggtggagtatgtgatggtcaggaatgagatcacaggacatacctacaagttcccgtgtggccggtggttagggaagggcatggatgatggaagcctggagcggatcctagttggggagctgctcacatcccagcctgaggtggatgagaggccatgccggaccccgccgctgcagcagtcccccagtgtcatccggaggcttgttaccatctcacccaacaacaagcccaagctgaacactgggcagatccaggagtccatcggggaggcagtcaatggcattgtgaagcacttccataagcctgagaaagagcgaggcagtctgacgctgttgctctgtggagagtgtggccttgtctcggccttggaacaggctttccagcatggatttaaatcgccccggctcttcaaaaatgtcttcatttgggatttcctggaaaaagcacaaacctattatgagacattagagaagaatgaagtagtccctgaggaaaactggcatacaagagcccggaacttctgccgatttgtcactgcaatcaacaatactccccggaacatcggcaaggatggcaagtttcagatgctggtgtgcttgggagccagagatcacctcctacaccactggattgccctgctggctgactgccccatcactgcacacatgtatgaggatgtggcactgatcaaagaccatacacttgtcaattccttgattcgtgtgctgcagacattgcaggagttcaacatcacgctggagacgtcccttgtcaagggcatcgacatctgacctcccagcaccagccagcagcaggactgagaaagactcaccctgcagctctgaccttttttcccaaagggacttaagcgattgtgcaggagtaggagacaaaatgtacactcactgtaaaaagaaaactagaggatttttggaataaataatctattttagagtttatttgctgatttgctttttacacactttcatgtgaaagagtgatagggagagggagcgaggctggtgccgcttattttgaagctggtgccctccctcgccgtggccacatgctggaagcctgaggcctccctggactgagcctgtggcactgcgtgcgggacagttatgtttccttgccccgtcgcattaatgaggcccttccacatcatttttaaactaatgtttttctatattaacattattatggatatttggctttcataggccacacacaggtgtgctgcgcgggaagccccatgctccaatcaaagggatttttagtagtgcctctaagcaagcaccgatgagtcagtcccacgtattttcttttttgtcagtattgtttgggaaggagacatgccgggatgtgtcatcgtgccaaataccacatttcctgttggcacagtttcacagaagtaaacataagcatgttttaacaggtttttcttttcttttttcttttttaaaatgttttatttatttaacccgccattgtgtgtttttaagtattttctttttttaaggaaaggaaaagcttgtcacaatctaactggctatgttattattattaaatttatgttttgcaacttagaaaccagctacagtatggcccacttaataaaacacctgaaacaaaaa

SEQ ID NO: 3957 - DNA, 8444 bp, Homo Sapiens
  NM_015215
gacgctcctcccggagagtagtgagacccctggtgcggggcgattggcggcgggagcgatgagtggcagccgcacggcccaacgggagctgtgcgtgggccgcggggcggggccagggcgggtgcgcggcggcggcggggtggctgggccggcggcggcggcggtacgaggcgcgcgctcggggtcccggtcgcgaggaggaggaggatgtggcgcgcggaggggaaatggctgccgaaaacaagccggaagagcgtttcccaaagtgtattctgcggaactagcacctactgtgttctcaacaccgtgccacctatagaagatgatcatgggaacagcaatagtagtcatgtaaaaatctttttaccgaaaaagctgcttgaatgtctgccgaaatgttcaagtttaccaaaagagaggcaccgctggaacactaatgaggaaattgcagcttatttaataacatttgagaaacacgaagaatggctaaccacctcccctaagacaagaccacagaatggctcaatgatactctacaacaggaagaaagtgaaatacaggaaagatgggtattgctggaaaaagaggaaagatgggaaaacgaccagagaggaccacatgaaactcaaggtccagggagtggagtgcttgtacggctgctatgtccattcctccatcatccccaccttccaccggaggtgctactggctccttcagaaccccgacatcgtcctggtgcactacctgaacgtgccggccatcgaggactgcggcaagccttgcggccccatcctctgctccatcaacaccgacaagaaggagtgggcgaaatggacgaaagaagagctcatcgggcagctgaaacccatgttccatggcatcaagtggacctgcagcaatgggaacagcagctcaggcttctcggtggaacagctggtgcagcagatcctcgacagccaccagaccaagccccagccgcggacccacaactgcctctgcaccggcagcctgggagctggcggcagcgtgcatcacaagtgtaacagcgccaaacaccgcatcatctcgcccaaggtggagccacggacaggggggtacgggagccactcggaggtgcagcacaatgacgtgtcggagggcaagcacgagcacagccacagcaagggctccagccgtgagaagaggaacggcaaggtggccaagcccgtgctcctgcaccagagcagcaccgaggtctcctccaccaaccaggtggaagtccccgacaccacccagagctcccctgtgtccatcagcagcgggctcaacagcgacccggacatggtggacagcccggtggtcacaggtgtgtccggtatggcggtggcctctgtgatggggagcttgtcccagagcgccacggtgttcatgtcagaggtcaccaatgaggccgtgtacaccatgtcccccaccgctggccccaaccaccacctcctctcacctgacgcctctcagggcctcgtcctggccgtgagctctgatggccacaagttcgcctttcccaccacgggcagctcggagagcctgtccatgctgcccaccaacgtgtccgaagagctggtcctctccaccaccctcgacggtggccggaagattccagaaaccaccatgaactttgaccccgactgtttccttaataacccaaagcagggccagacgtacgggggtggaggcctgaaagccgagatggtcagctccaacatccggcactcgccacccggggagcggagcttcagctttaccaccgtcctcaccaaggagatcaagaccgaggacacctccttcgagcagcagatggccaaagaagcgtactcctcctccgcggcggctgtggcagccagctccctcaccctgaccgccggctccagcctcctgccgtcgggcggcggcctgagtcccagcaccaccctggagcagatggacttcagcgccatcgactccaacaaggactacacgtccagcttcagccagacgggccacagcccccacatccaccagaccccctccccgagcttcttcctgcaggacgccagcaaacccctccccgtcgagcagaacacccacagcagcctgagtgactctgggggcaccttcgtgatgcccacggtgaaaacggaggcctcgtcccaaaccagctcctgcagcggtcacgtggagacgcggatcgagtccacttcctccctccacctcatgcagttccaggccaacttccaggccatgacggcagaaggggaggtcaccatggagacctcgcaggcggcggaagggagcgaggtcctgctcaagtctggggagctgcaggcttgcagctctgagcactacctgcagccggagaccaacggggtaatccgaagcgccggcggcgtccccatcctcccgggcaacgtggtgcagggactctaccccgtggcccagcccagcctcggcaacgcctccaacatggagctcagcctggaccactttgacatctccttcagcaaccagttctccgacctgatcaacgacttcatctccgtggaggggggcagcagcaccatctatgggcaccagctggtgtcgggggacagcacggcgctctcacagtcagaggacggggcgcgggcccccttcacccaggcagagatgtgcctcccctgctgtagcccccagcagggtagcctgcagctgagcagctcggagggcggggccagcaccatggcctacatgcacgtcgccgaggtggtctcggccgcctcggcccagggcaccctaggcatgctgcagcagagcggacgggtgttcatggtgaccgactactccccagagtggtcttacccagagggaggagtgaaggtcctcatcacaggcccgtggcaagaagccagcaataactacagctgcctgtttgaccagatctcagtgcctgcatccctgattcagcctggggtgctgcgctgctactgcccagcccatgacactggtcttgtgaccctacaagttgccttcaacaaccagatcatctccaactcggtggtgtttgagtacaaagcccgggctctgcccacgctcccttcctcccagcacgactggctgtcgttggacgataaccagttcaggatgtccatcctggaacgactggagcagatggagaggaggatggccgagatgacggggtcccagcagcacaaacaggcgagcggaggcggcagcagtggaggcggcagcgggagcgggaatggagggagccaggcacagtgtgcttctgggactggggccttggggagctgctttgagagccgtgtggtcgtggtatgcgagaagatgatgagccgagcctgctgggcgaagtccaagcacttgatccactcaaagactttccgcggaatgaccctactccacctggccgctgcccagggctatgccaccctaatccagaccctcatcaaatggcgtacaaagcacgcggatagcattgacctggaactggaagttgaccccttgaatgtggaccacttctcctgtactcctctgatgtgggcgtgtgccctagggcacttggaagctgccgtcgtgctgtacaagtgggaccgtcgggccatctcgattcccgactctctaggaaggctgcctttgggaattgccaggtcacggggtcatgtgaaattagcagagtgtctggagcacctgcagagagatgagcaggctcagctgggacagaaccccagaatccactgtcctgcaagcgaagagcccagcacagagagctggatggcccagtggcacagcgaagccatcagctctccagaaatacccaagggagtcactgttattgcaagcaccaacccagagctgagaagacctcgttctgaaccctctaattactacagcagtgagagccacaaagattatccggctcccaaaaagcataaattgaaccctgagtacttccagacaaggcaggagaagctgcttcccactgcactgagtctggaagagccaaatatcaggaagcaaagccctagttctaagcagtctgtccccgagacactcagccccagtgaaggagtgagggacttcagccgggaactctcccctcccactccagagactgcagcatttcaagcctctggatctcagcctgtaggaaagtggaattccaaagatctttacattggtgtgtctacagtacaggtgactggaaatccgaaggggaccagtgtaggaaaggaggcagcaccttcacaggtgcgtccacgggaaccaatgagtgtcctgatgatggctaacagagaggtggtgaatacagagctggggtcctaccgtgatagtgcagaaaatgaagaatgcggccagcccatggatgacatacaggtgaacatgatgaccttggcagaacacattattgaagccacacctgaccgaatcaagcaggagaattttgtgcccatggagtcctcaggattggaaagaacagaccctgccaccattagcagtacaatgagctggctggccagttatctagcggatgctgactgccttcccagtgctgcccagatccgaagtgcatataacgagcctctaaccccttcttctaataccagcttgagccctgttggctctcccgtcagtgaaatcgctttcgagaaacctaaccttccctccgccgcggattggtcagaattcctgagtgcatctaccagtgagaaggtagagaatgagtttgctcagctcactctgtctgatcatgaacagagagaactctatgaggctgccaggcttgtccagacagctttccggaaatacaagggccgacccttgcgggaacagcaagaagtagctgctgctgttattcagcgttgttacagaaaatataaacagtacgcactttataaaaagatgacacaggctgccatccttatccagagcaaattccgaagttactatgaacaaaaaaaattccagcagagccgacgggctgctgtgctcatccaaaagtactaccgaagttataagaaatgtggcaaaagacggcaggctcgccggacggctgtgattgtacaacagaaactcaggagcagtttgctaaccaaaaagcaggatcaagctgctcgaaaaataatgaggtttcttcgccgctgtcgccacagccccctggtggaccataggctgtacaaaaggagtgaaagaattgaaaaaggccaaggaacttgaagacatacagcagcatcccttagcaatgtgacattgcttttcagactgttttcatttctgtttttagcagagacatgcaacaacaacacacacgcacacacgcacacacacacacgtacacacacatacaaaatccctctgcagttttggggagatcagctgcaggattttaacaggaatgttttggtcattgcatttgcactttcatggacaacttttaatttgatcagcaagacatcttggaactcaatcttctgttggatcacgggaaatcaagacacccaggaggaattgaaagaggcttcctcttctcaggaagaagccatttccttctcatatagggctgtattcaaacatcgtgtggaactgtacaaatatttataccaaaaatatagataagaaaaggtggggctatactagcaacaaaaaaagaatgctgttcctgcacctgccggttatttccaagaagctgaatctttgggactgattctcagtggagggcttagatcatacaaaaatctttattgggtccgtgtgttctcatttccttcactgtttatttttgtttgtttgtttgtttgttttaatctctacagcacatttaatgcaacttttgaaatctgcaggtttttaatgtcttgtggaaatttgcagaggggcaggtgtgtggtaaacgggtaatgcatgggaaataatgagaagcagctcacagagtttaaactattttcttgtccccaccaccttccaagaacctgcgagggtagtaatcatcttgtcccctttttcatgttcagcactttaatttttttgccttactttcatgtgcaatgagaattacttaagaattggtaacgcatgtagccttttttagtaaccttggaagctgtagtaattctaaggaatcatgaaccttgcctggacatttgccacctaaacgatcagtgtggtgctgcgttctggccagtaaattccatgtttttggctatatctcatccaaactgagcagtttctgtgtatatatagaaggtagaaatgaaaagtgagaaaatatttgaaagggattatattaattgctaaatattttattcacaaaggtcaataacatggcaagataaaattatttgtatagttttgtctgaatgagcgagaaaaatgtggatgtactgtttgtatatattgtatatattaaaacagagatatgtgcatgaaatcaagaaaaaagaaatgaacaaaagcaaagcattagtggctatggtctgtaaaatgaaacaaaaaaactttatttcactataagagtactttattttaaatgttctttaggagaacattttgctaaagcatgactaaactgcaaaaaaaaaaaaagagctactgtatttagacttaggaaaaaaggcagagtaacattacttaaaaaaaaaaggatatgtttacatttaattttggctaccaggagtttagtttattttatttaaaatttttttgccaatggtgccaagtaatgtgaatgctaatactgcttaagaaaattaagttacttttgcaaaacagataatcataagatgaatcagtatgtagcttaacaccatccactcactccaacaaagaacacttagaatgataaaaaaaaaaaaaaaaaacctgacaaaagaaatagtatgaaaagtagaaaaatgtcacgtttccatatctcctgctggaaatcagaaaatataataaaattgcacaaaaaaaaaaatgaaaaagatgcagactggtcttttagagacggcatggtatattactatttccacataatgaggagccaaagaaatctgatgtttttaacaattaaactgctaatgttaaattgagagaataaagttcgtatttgctgatgccagtttaaaattcccaggttacgtctgaggatcagttggtgtaaagctgagatgttttttcttggttctggctgccaactgtgagttaaaactcaaggcttgttgtgaagcctaaaaatattcacaaataagcttttaaactggtgtctttggaaggaaggtagatacaaaaagattgtggtaaaaactggggtcagtgctcttggtgccttttctataattgtacttgttttttaattacttcctttcactgccaacctcgaattactgtacagtatatgtctttctgcttgtgatcagctttgacaacagtgacagccccacaactagtagccacctgtacatttgtaaactgacctgactccattttgtttttaaatgtgtgggttatgttgcagctgttgcagtcccccagatacctattattttacacaatttgacctataggaggacactgagtaatttacaaacacaactgcattcataaatgggaatagaacgtgaaagccagctctttcagaatatcctctattaatactgaatttagatatctttattccatttattatggtacaaataactgatgttttaaccagagtaatgacctcagtggatttgctttaaccctcacattttttttttaatgtttcacatgttacattattagctgaatacgttagaaaatgacagatggtagagacttccatagaattaagagggttctcatggaggggataggaagtaggtttaaagcctaccagtgtaacctaccagtacaactgtgaatcctaggcaaggcaaaaatgcacttccactgaaacgaagcatttctgaccgctttttcttggttatgaatcttaatttcgaatataagatgataggtaagcgcagctttcttggataatctgaattcccaagtgccaggagtaggatttcattataaaattaatagctaatcttattctatctcctgaagatttaattgctattgttacccattcgaaatcagctgtactgtgtgaacgaaataaagacaataatacgaacccctctctggctgcacggtcgcttatggcagttccacacagtagttggcgcccaatggggggtccctgagacttgcatgtaaaactagtctagatgtcttctttttttgtaagttttatttttgtaattgtgcatgtaaagcatcattgaatcaatggatctgttgaagaactcagctgctggaaaccatgcaaaatgttttgaattgcccttaaaatatggaaaatgttttctgaatgctttatattctttctgctgtaaattaaaaatgaagaaaatttccccata

SEQ ID NO: 3958 - DNA, 12602 bp, Homo Sapiens
  NM_015225
ggagggagcagtcggtcgctgcgccccggcgggccactttcccgggaccccgctcgtcttccttgggccgagattttccactgcgcccctccgagtacccgggttccaaacccctagccacgacatggaagaatttttgcaacgcgccaaatctaaactgaatcgaagcaaacgcttggagaaggtccatgtggttattgggcctaaatcgtgtgacttggattctctcatttctaccttcacatatgcttactttctagacaaggtcagtccaccaggggttctgtgtttaccagtgctgaacataccaagaactgaattcaactacttcaccgagacgaggtttattttagaagagctaaatatttccgaatcattccacatattccgggatgaaattaacctgcatcagctaaatgatgaagggaagttatcgataacacttgttggcagcagtgtgctggcgagtgaagacaaaactttagaatcagcagttgtcaaagtcattaatccggttgagcagagcgatgccaacgttgagttccgagagtcttcctcttctctcgtgctaaaggagattctccaagaggctcctgagctcatcaccgagcaactggctcatcgcctcagaggtagcattcttttcaagtggatgaccatggaatcagagaagatctcagagaagcaggaggaaattctttctatcctggaagaaaaatttcctaacttgcctccaagagaggacatcatcaacgtcctacaggagacccagttcagtgctcagggtttaagtattgaacagacaatgttgaaagatctaaaggagctgtcagatggagaaataaaagtggccattagtactgtgagcatgaaccttgagaattgtctatttcacagcaatattaccagtgacttgaaagcatttacagacaagtttggttttgatgtcctcatcctgttctccagctatctgtcagaggagcagcagccgagacgacagattgctgtgtactcagaaaacatggagctgtgcagtcagatttgctgtgagctggaagagtgtcagaacccttgcctagaactggagccctttgactgtggctgtgatgagatcctggtgtaccaacaagaggacccttcagtgacttgtgatcaggtggttctcgttgtcaaggaagtcatcaacaggaggtgtccagagatggtctccaatagccggacatcctcaacagaagccgtggcaggcagtgcccccctctcccaggggtcttctgggattatggaattgtatggttctgacatagagccacaacccagctctgtgaatttcatagagaaccctccagatctcaatgattctaaccaggctcaggtggatgccaatgtagaccttgttagcccagacagcggactggctaccattaggagcagccgctcatccaaggagagctctgttttcctcagtgacgacagccccgtgggagaaggtgctgggcctcaccacacccttctcccagggcttgactcctacagccccatccctgaaggggcggtggcggaggaacatgcatggtctggagaacacggtgagcacttcgacctcttcaattttgacccagcacccatggcttctgggcagtcccagcaatcttctcattctgcagactactccccagcagatgacttcttccccaacagtgacctgtcagaaggacagctccccgctgggcctgaaggacttgatggcatgggaaccaacatgtctaattattcatccagttcacttttgtcaggggctggcaaagatagccttgtggaacatgatgaggagtttgtccagagacaagacagtcccagagataactctgaaagaaatttgagcctgacagattttgtgggagatgaatccccttccccagaaaggctaaaaaatactggaaagaggatcccaccaacacccatgaatagtttagtagaaagctcgccatccactgaagaaccagcctcactctatacagaagatatgacccaaaaagcaactgacacaggtcacatggggccacctcagacccatgcacggtgcagcagctggtggggtggtttggaaattgactccaaaaatattgcagatgcgtggagttccagtgaacaggaatctgttttccagagccctgaatcatggaaagagcataagccaagctccattgataggagagcctcagattctgtatttcaaccaaagagcctcgaatttacaaagtcaggtccctgggagtctgaatttggtcagcctgaactgggtagcaatgatattcaagacaaaaatgaggaaagcttgccgttccagaacctgcccatggagaagtcacctttgccaaatacatctccccaaggaacaaaccacctgatagaagactttgcttctttgtggcattctggtcgctctcccacagccatgcccgagccctggggaaatcctacagatgatggtgaaccagcagctgtggcgccattcccagcctggagtgcatttggtaaagaagatcatgatgaagctttaaaaaatacctggaatttgcacccaacaagcagcaagacaccttctgttagggacccgaatgagtgggccatggcaaaaagtgggtttgccttttcttcttcagaactactggacaattcacccagtgagataaacaatgaagcagctccagaaatctggggcaagaaaaacaatgactccagggatcacatctttgcacctggaaatcccagttctgatctggatcacacatggactaattctaagccaccaaaagaagatcagaatggtttagtggatcctaaaactaggggcaaggtatatgaaaaggtagattcctggaacctttttgaggagaatatgaagaaaggagggtcagatgtcctagttccttgggaagattccttcttatcttacaaatgttctgattacagtgcatccaacctaggagaagattcggtgccttcccccttagataccaattattccacctcagactcttacacatcaccaacatttgctggagacgaaaaggaaactgaacacaagccatttgctaaagaggaaggttttgagtcaaaagatggtaactccacggcagaggagactgacattcctcctcagtcactgcaacagtcatctcgaaatcgaatcagttcaggtcctgggaacctagacatgtgggcttcacctcatacagataacagttctgaaataaataccactcacaacctggatgaaaatgaactcaagacagagcacacagatggtaagaatatctccatggaggatgacgtcggggaaagcagccagtccagttacgacgaccccagcatgatgcaactgtacaatgaaacaaaccgacaactcacacttttgcacagcagcaccaactcccggcagacggcccctgacagtctcgacttgtggaacagagtgattttggaggatactcagtccactgcaacgatctcagatatggacaatgatttggactgggatgactgcagtgggggtgcggcaatccccagtgatggtcaaacagaaggatacatggctgaaggttccgagccggaaacccgatttacagtgagacagctggaaccctggggcttggagtatcaggaagcaaatcaggtagattgggagctccctgcctctgatgagcataccaaggacagtgctcccagtgaacatcacacattgaatgagaaaagtgggcagctaattgcaaacagtatttgggattctgtcatgagagataaagacatgtcatcattcatgttaccaggctcctcacatatcacagattcagagcaaagggaattgcctcctgaaatccccagccattcagcaaatgttaaagacactcattccccagatgcgccagcagcctctggaaccagtgaatcagaggcacttatatctcatcttgacaagcaggacacagagagggaaaccctgcaaagtgatgcagcatccttggcgactaggcttgagaatccagggtattttccacacccagatccatggaaaggtcatggcgatggacaaagtgaaagtgagaaggaagcccagggagccactgacagggggcaccttgatgaagaggaggtgatcgcctctggtgtggagaatgcctcagggatttctgaaaaagggcagagtgaccaggaactgtcttctctggttgcatctgaacatcaggaaatctgcattaaatcaggcaaaatcagctctcttgctgtcactttcagtcctcaaaccgaggaaccagaggaagttttagagtatgaggaggggtcttacaatctagactcccgtgatgtgcaaacagggatgtccgcagataacctgcagccaaaagatacccatgaaaaacacctcatgagtcaaagaaattcaggtgaaactactgagacttcagatgggatgaatttcacaaaatatgtatctgtacctgaaaaggatcttgagaaaactgaagaatgtaactttctagagccagagaacgtgggtggagggccacctcacagagttccccgaagtcttgattttggggacgtccctatagacagtgatgtgcatgtcagcagcacatgttctgagataaccaaaaatcttgacgttaaggggtctgaaaatagccttccaggagccggttcgtctggaaattttgacagagatactatttctagtgagtatactcattcaagtgcatcaagtcctgagttaaatgactcttcagttgcactgtcctcctggggccagcaacccagttctgggtatcaagaagaaaaccaaggcaactggagtgaacagaatcaccaagaatctgaactaattaccactgatggccaagtagaaatagttaccaaagtgaaggatttagagaaaaacagaataaatgagtttgaaaagagctttgatcgcaaaactcctacatttttagagatctggaatgactcagttgatggtgattccttttcctctttatccagtcctgaaacaggcaaatattctgaacattcagggacacatcaggaaagcaatctaattgctagctaccaggagaaaaatgaacatgacatttctgcaactgtgcagccagaggatgccagggtcatttcaacaagctcaggttctgatgatgacagtgtcggtggtgaagagtcaatagaggaagagatccaggtggccaactgccacgttgctgaggatgaatccagagcttgggattcattgaatgaatctaataagttcttggtcacagctgatcctaagtctgaaaatatttatgactacctagacagctcagagccagcagagaatgagaataagtcaaacccattctgtgacaatcaacaaagcagccctgatccctggactttctcaccattaacggagactgaaatgcagattacagcagtggagaaggagaagagatcttctccagaaacagggacaacaggagatgttgcatggcaaatatctcccaaagcttcgttcccaaagaacgaagataattctcaactggaaatgctgggcttctcagctgatagcactgagtggtggaaggcctcaccccaggaagggagactaattgaaagtccatttgaaagggagctgtctgactccagtggtgtgttggagataaattcttcagtacaccaaaatgccagtccctggggagtaccagttcagggtgatattgagcccgtggaaacacactatactaatccttttagtgacaaccatcagtcaccctttctggaaggtaatgggaagaactcccatgagcaactctggaacattcaaccaaggcagccagacccagatgctgacaagttcagccagcttgtaaaattagaccaaattaaagaaaaggactcaagagagcaaacctttgtgtctgctgctggtgatgagctgactcctgaaacacctacccaagagcagtgtcaggacaccatgctgccagtctgtgatcatccggacacagcctttactcacgcagaggaaaatagttgtgttacatctaatgtttcaactaatgaaggtcaagaaacaaatcagtgggaacaagaaaaatcatacctaggtgagatgacaaattcaagcattgccacagaaaattttcctgctgtcagttctcccacccaactgataatgaagccaggctctgaatgggatggctctaccccaagtgaggactcccgaggtacctttgtgccagatattttacatggcaactttcaagagggtgggcagctggcctctgccgcgcctgacttgtggatagatgctaagaagcccttcagtttgaaagcagatggtgagaatcctgatatcctgacgcactgcgaacatgacagcaattctcaggcttccgacagccctgatatatgtcacgattctgaagcaaagcaagagactgagaagcacctcagtgcttgcatgggacctgaagtggaatccagtgagctttgtctcactgagccagagatagatgaagaacccatttatgagcctggacgggagtttgtcccatccaatgcagaactcgattctgaaaacgcaactgtgctgcctccaattggctatcaagcagacataaagggctcctctcagcccgcctctcataaaggttcacctgaaccttctgaaataaacggtgacaacagtacaggtttacaagtatcagaaaaaggagccagcccagatatggcaccaattttggaaccagttgacagaagaatcccaaggattgaaaatgtggcaactagcatttttgtaactcaccaagagccaactccagaaggtgacggttcttggatatcagacagcttttctcctgaaagtcagcctggtgcaagagctttgtttgatggtgatccacatttatccacagagaatcctgccttggttcctgatgctttgctagcctcagacacttgtctggatataagcgaagctgcctttgaccacagtttcagcgatgcctcaggtctcaacacatccacgggaacaatagatgacatgagtaaactgacattatccgaaggccatccggaaacgccagttgatggggacctagggaagcaagatatctgctcatctgaagcctcgtggggtgattttgaatatgatgtaatgggccagaatatcgatgaagatttactgagagagcctgaacacttcctgtatggtggtgaccctcctttggaggaagattctctgaagcagtcgctggcaccgtacacacctccctttgatttgtcttatctcacagaacctgcccagagtgctgaaacaatagaggaagctgggtctccagaggatgaatctctgggatgcagagcagcagagatagtgctttctgcacttcctgatcgaagaagtgagggaaaccaggctgagaccaaaaacagactgcctggatcccagctggctgtgctgcatattcgtgaagaccctgagtccgtttatttgccggtaggagcaggctccaacattttgtctccatcaaacgttgactgggaagtagaaacagataattctgatttaccagcaggtggagacataggaccaccaaatggtgccagcaaggaaatatcagaattggaagaagaaaaaacaattcctaccaaagagcctgagcagataaaatcagaatacaaggaagaaagatgtacagagaagaatgaagatcgtcatgcactacacatggattacatacttgtaaaccgtgaagaaaattcacactcaaagccagagacctgtgaagaaagagaaagcatagctgaattagaattgtatgtaggttccaaagaaacagggctgcagggaactcagttagcaagcttcccagacacatgtcagccagcctccttaaatgaaagaaaaggtctctctgcagagaaaatgtcttctaaaagcgatacgagatcatcttttgaaagccctgcacaagaccagagttggatgttcttgggccatagtgaggttggtgatccatcactggatgccagggactcagggcctgggtggtctggcaagactgtggagccgttctctgaactcggcttgggtgagggtccccagctgcagattctggaagaaatgaagcctctagaatctttggcactagaggaagcctctggtccagtcagccaatcacagaagagtaagagccgaggcagggctggcccggatgcagttacgttgcaggctgtcacccatgacaatgaatgggaaatgctttcaccacagcctgttcagaaaaacatgatccctgacacggaaatggaggaggagacagagttccttgagctcggaaccaggatatcaagaccaaatggactactgtcagaggatgtaggaatggacatcccctttgaagagggcgtgctgagtcccagtgctgcagacatgaggcctgaacctcctaattctctggatcttaatgacactcatcctcggagaatcaagctcacagccccaaatatcaatctttctctggaccaaagtgaaggatctattctctctgatgataacttggacagtccagatgaaattgacatcaatgtggatgaacttgatacccccgatgaagcagattcttttgagtacactggccatgatcccacagccaacaaagattctggccaagagtcagagtctattccagaatatacggccgaagaggaacgggaggacaaccggctttggaggacagtggtcattggagaacaagagcagcgcattgacatgaaggtcatcgagccctacaggagagtcatttctcacggaggatactatggggacggtctaaatgccatcattgtgtttgccgcctgttttctgccagacagcagtcgggcggattaccactatgtcatggaaaatcttttcctatatgtaataagtactttagagttgatggtagctgaagactatatgattgtgtacttgaatggtgcaaccccaagaaggaggatgccagggctaggctggatgaagaaatgctaccagatgattgacagacggttgaggaagaatttgaaatcattcatcattgttcatccatcttggttcatcagaacaatccttgctgtgacacgaccttttataagttcaaaattcagcagtaaaattaaatatgtcaatagcttatcagaactcagtgggctgatcccaatggattgcatccacattccagagagcatcatcaaactggatgaagaactgagggaagcatcagaggcagctaaaactagctgcctttacaatgatccagaaatgtcttctatggagaaggatattgacttgaagctgaaagaaaagccttagttggccatgctggaagaagaggatgcttttctggttcatggttctgttgaaacatatctacctgaaagagacagggctgatgttacctttttccactttgcactacctggtgccattctaaatttctaaggggaaaaatagaaagtttgtttactcttaagatattttatgaaattgtgtgtactttcctattttgccaattatgtgcctcaaagattttagttgagccttagcaagaaagtaggaccttccatttcaatacttcattaacacggtgtagtgatactttgtcccttagactggtgtttaccagtaagatacctttaatccactgttaagtatgagtggatttgtttccatagattagctggatttccttttggtgattgcattaggtttaaagtacacaggtctcaactctccccaggaaagtttcccctgtttgactccacctttaaaatcctaagcctgactaggacagccacaaaccacacaaggtgtaaaaccatcatcagctaagtgcccgttttgttcttgtttaccagaatctcctttaacttctcaaagggaagccgggctttctaatccacgtcaactttattttagttgtcaaattgggcattatattttatgtaaattggtcttttaacatcattttcctgatgaatgttggtgaccaccacattgtgaaatttaagaatccgtgttgcatgtttggtagctctctgagtttcaggccataaactcagctccagaggttaccttttaagtgccaagaactcaagtgcaaggtggcctactcaaaaatcatttggtagcattcagttattcatgaattcctctctcgcatgcattataaaaagtgatctgctttaaaacaccgtaatctgatcataggcttaaaattaaatatgagtattactttcatgtacaaaatatttcctttatagtcttcatatgccctttaaaatgccaacaagatttcaagtctgtaggcctctagtgaggtggggtggcaaaccacagctaagtctcgctcaccactgcaagctaagaatggtttttacattttgggttggaaaaattttttttgaatatttcatgacacatgaaaattattcaaatgttagtgccgataaataaagtggtactgaaacacagccacacaaacttgtttttgtactgtctacagctactttcacactacagccgcagagctgagcagttcagcagaccgtatgtcccacaatgcctaaaacattgactatgtttacagaaaaagtttgctgacccctgctctagcaaacgcatcctttcctactccaccccaatttgtatttagatagtttctctaacagaacggacaaatgaggctgcaaactaatttatttttgtcaaaaatcaatgttttgacatccacagacagtgaaataaaagaaatggcttgctgaaaaacatgaggagtcctagccacaaaatcactgcttaggttgcaattgccaaaatgaagccttcttagaagcacttctttagtatatacaggtgttggctgaagtccgtgcctcactctgggaaccattcttagtctccagtgtctcctattacaaagaagctggcagaaataaaaatgaaggggtgagagcggttccaccctagtctcatggtggaaaattcattggggagagctgtccaggatatttggagtcctgggtagaaggagcttgtaactactttaaagtcgacatctttgcacaggtgattgagtttctctgacctcattgcttcacctctgtctcctcccgtccttccgcacgtgcccacacacacgcagttcagccctctttcctccataagcctccatcgttttctcttttctcctcttgatcctttcaagcgagtatcttgttgaattgtatgttctgttggatctcctccttcataacatctggcttgttggacagaaaaaccctacagcccaccccctcccacagcccacctccacttttgaaagcccaaattacacctctcccagaacacagtgttgacgtaaatacagttacccaatattcctgtttgttcacctatttgctactttcactcagtagcatcccattttgtaaaatgaattccatggtcaccctgtcacaggaagtaatgaaaaatccagtgttcagtgtagtggtgcaaacctgagggcatagagctgttcatagagggctcttgttatagccaaacagacacagcaacaatctcaccatttatatatatatttttaacttgtccagctcatctatggaaaactactcaggtggtatgctgtttgaagcctcatcttcctacatgaaaattatgggcatttgtcccaatgattttgtttcagctgttctgtaggctgcataaccactctgatatttaggtatctgctattttattatcttaaaagacaaattaatttaattgcatgtgctagggaaaagctaccatgtacattcaccccaagtaaatagaatcctagatgaatcctagaaaaataatccctaagcagataggtagacagaggtaaacattcacatgatttagctctctagctcttgcactctgaacattcttgctttggttctgacttctgggaactgctttgcatttctcctatagatctgtagttaagggaaccaaggggtcattggggcaaaagcattgtttctcaaagctccttgattaagagaaagaacagaaatttgcacagaagatagtgtcaaggagtgagaaagtttgtttgagggcagtagctcagtgtggaagaaaatcctgaagtttctgttgaagccatacaatgttctatggggttactctctaagacattctctgaggtgtgtgaggaagtcactactcctagcctttgttaagatgtaattttaaatattcagttatggtactatgtttgcaactctcgtcttatcacaatgcctcagtagtttgttcccttagaaacatttagatgtgcacaaattaatcttttatatatctaaaggtttttctatcatgcattggattgctcagaataaagtgtctgttagacttcgttttggtaaataaattctccataatgtagattaataatataaaagtctttaatgacacaatatatctatatagcctcactgtataattcagaaataaaaattgattctgcaaaaaaaaaaaaaaaaaa

SEQ ID NO: 3959 - DNA, 6891 bp, Homo Sapiens
  NM_015226
aactgcatttcccagcgccccacgcggcggcggccgtaaagcgcggcggtcgaacggccggttccggctgaatgtcagtgctgggctgtgggccggggaggaaggcggctcgcggttcctccaccgcctccgccgccgcatcctccgcttgtgctaccgccgcgggcgctgggccgctctgctggtccggcatgagaccgtgagacgagagacgggtcggggccgccgacatgtttggccgctcgcggagctgggtgggcgggggccatggcaagacttcccgcaacatccactccttggaccacctcaagtatctgtaccacgttttgaccaaaaacaccacagtcacagaacagaaccggaacctgctagtggagaccatccgttccatcactgagatcctgatctggggagatcaaaatgacagctctgtatttgacttcttcctggagaagaatatgtttgttttcttcttgaacatcttgcggcaaaagtcgggccgttacgtgtgcgttcagctgctgcagaccttgaacatcctctttgagaacatcagtcacgagacctcactttattatttgctctcaaataactacgtaaattctatcatcgttcataaatttgacttttctgatgaggagattatggcctattatatatcgttcctgaaaacactttcgttaaaactcaacaaccacactgtccatttcttttataatgagcacaccaatgactttgccctgtacacagaagccatcaagtttttcaaccaccctgaaagcatggttagaattgctgtaagaaccataactttgaatgtctataaagtgtcattggataaccaggccatgctgcactacatccgagataaaactgctgttccttacttctccaatttggtctggttcattgggagccatgtgatcgaactcgatgactgcgtgcagactgatgaggagcatcggaatcggggtaaactgagtgatctggtggcagagcacctagaccacctgcactatctcaatgacatcctgatcatcaactgtgagttcctcaacgatgtgctcactgaccacctgctcaacaggctcttcctgcccctctacgtgtactcactggagaaccaggacaagggaggagaacggccgaaaattagcctgccggtgtctctttatcttctgtcacaggtcttcttaattatacatcatgcaccgctggtgaactcgttagctgaagtcattctgaatggtgatctgtctgagatgtacgctaagactgaacaggatattcagagaagttctgccaagcccagcattcggtgcttcattaaacccaccgagacactcgagcggtcccttgagatgaacaagcacaagggcaagaggcgggtgcaaaagagacccaactacaaaaacgttggggaagaagaagatgaggagaaagggcccaccgaggatgcccaagaagacgccgagaaggctaaaggtacagagggtggttcaaaaggcatcaagacgagtggggagagtgaagagatcgagatggtgatcatggagcgtagcaagctctcagagctggccgccagcacctccgtgcaggagcagaacaccacggacgaggagaaaagcgccgccgccacctgctctgagagcacgcaatggagcagacccttcctggatatggtgtaccacgcgctggacagcccggatgatgattaccatgccctgttcgtgctctgcctcctctatgccatgtctcataataaaggcatggatcctgaaaaattagagcgaatccagctccccgtgccaaatgcggccgagaagaccacctacaaccacccgctagctgaaagactcatcaggatcatgaacaacgctgcccagccagatgggaagatccggctggcgacgctggagctgagctgcctgcttctgaagcagcaagtcctgatgagtgctggctgcatcatgaaggacgtgcacctggcctgcctggagggtgcgagagaagaaagtgttcaccttgtacgacatttttataagggagaagacatttttttggacatgtttgaagatgagtataggagcatgacaatgaagcccatgaacgtggaatatctcatgatggacgcctccatcctgctgcccccaacaggcacgccactgacgggcattgacttcgtgaagcggctgccgtgtggcgatgtggagaagacccggcgggccatccgggtgttcttcatgctgcgttccctgtcactgcaattgcgaggggagcctgagacacagttgccgctgactcgggaggaggacctgatcaagactgatgatgtcctggatctgaataacagcgacttgattgcatgtacagtgatcaccaaggatggcggcatggtccagcgattcctggctgtggatatttaccagatgagtttggtggagcctgatgtgtccaggcttggctggggagtggtcaagtttgcaggcctattgcaggacatgcaggtgactggcgtggaggacgacagccgtgccctgaacatcaccatccacaagcctgcgtccagcccccattccaagcccttccccatcctccaggccaccttcatcttctcagaccacatccgctgcatcatcgccaagcagcgcctggccaaaggccgcatccaggcaaggcgcatgaagatgcagagaatagctgccctcctggacctcccaatccagcccaccactgaagtcctggggtttggactcggctcctccacctccactcagcacctgcctttccgcttctacgaccaggggcgccggggcagcagcgaccccacagtgcagcgctccgtgtttgcatcggtggacaaggtgccaggcttcgccgtggcccagtgcataaaccagcacagctccccgtccctgtcctcacagtcgccaccctccgccagcgggagccccagcggcagcgggagcaccagccactgcgactctggaggcaccagctcgtcctccaccccctccacagcccagagtccagcagatgcccccatgagtccagaactgcctaagcctcaccttcctgaccagttggtaatcgtcaacgaaacggaagcagactctaagcccagcaagaacgtggccaggagcgcagccgtggagacagccagcctgtcccccagcctcgtccctgcccggcagcccaccatttccctgctctgcgaggacacggctgacacgctgagcgtcgaatcgctgacccttgtccccccagttgacccccacagcctccgcagcctcaccggcatgcccccgctgtccacgccggctgccgcctgcacagagcccgtgggcgaagaggctgcatgtgctgagcctgtgggcaccgctgaggactgagtcagtgccggggcctccctttgtgtgtgtggccccgctggtagggaccccagtgccgctgactggcaagacacactgggagcacccaccattctgtgcggcccccagcagccatctcaaccacctatccctgcgctcccttgaatgggaagaagccccacgttgtccttgaattcctttttcactttgcatctcttcacgtgcaggctgggaccagcggagacaccgcggcgaatgcagatgactgcaccggccactcagggagctgcctgggctccgtgtctctgagccccgggtggcaggacccaccggcacctctttcttcctctgtcatatggctcctctgtcaccagccccagtgtgcacagaagaattggaccaggtcactgtacgtagaaatttgtagaaaagcagacttagataaacatctcctttggatatttatttccgcttttggcagcaggtgaacatttatttttaaaacttctatttaaaagaagtccaaaaacatcaacactaaggtttgatgtcatgtgaaaagtgtaataataacagttaagatttcatgatcattttcactggacctttcctgatattttgtttcagagttcttagtgtggctttttccatttatttaagtgattctttgttactcactaactctgcaagcctgtggaataatgaagtaccttcctggaaagtttggattattttttaaacaaaaacaagggagatacatgtattctcaggtacacacagagctgagagggctgaatggttttctgctatagcagccgagaggcctcccatcatggaaagatttctccaggaaaaggaggaatgtagccagctccccactcaggacgcttcctcatttctcttcaccaaaaccaaacagagacagcttccagcaccttcttcagtgttaccatctctaagaaggaaccagttgggaccgtgaagactcccgaccctgtggccatgatggaaatcaaaggaagacaccctctacgtcacctgccctcgactgtgtgtgcccacatgtgccgagagatggcccagagccagttcccctccagctgcaagggcatggtgtccccagagctctgagtctgtcactctccctctgctactgctgctgatctgaatatggaaaccccatggttcccttccccattcggactgggtgtgtacaagcaaggacccagatgcatcagacacagcccccaagatgttcctttctactcggccagctcgggagccagacacagcactcacagcccaggccgtgatccaccctccccaagtccaccagggccagcggcccctcacctctctggtcactggtgagaccttccacaactttcctccagacctgccagcagatgtgcccaccaggggcattaggtatccgccggagcctggccatagggtagtctcgggagccgcgctgagatcttttgccacctgcattttagaagaacatggtctctgtctcctcggcccagccagctgtcccggcaaggcctgccgagggcagttttcaacctcatgaaggaaacacagtcctgccaaggagggggagtggcgcccatggggacaggcctcagtccttagaagccctctgggtagctgtgcccacccagccttcatggctgcaggtacaaggacctttgcttccatagagaaaacgcacagctcagaaagggggccacatgggcagaaacccaaaggaaggacaaaccacgaccaccgtggccatctgcagaatccctggaagagaaggaaggcagggtggagcggggggaagaccatcatggagagaaggaccacagcatcaggagacgggacacgccacacccagcaggcagcctgtgtgttgcttaattttttaagagcaagaggggtagagaggatcaagctggccctggctggagatggctagcccctgagacatgcacttctggttttgaaatgactctgtctgtggggcagcagaaactagagaaggcaagtggctgccccaccccaaggcgtgaccaggaggaacagcctgcagctcactccatgccacacgggtgggccaccagcctgctgtcagaagtctctgggctccaactggtcttgtaaccactgagcactgaaggagagaggtcttggtcagggctggacagcatgcccgggaggaccagcagaggattaaaggtgactgggaggaccagcggaggataaaagacactgctcagggcagggcttctaccctgcatccctggccaagaaaagggcagtccccatgtgggcttgcagggtcactctcaggggcctctttcagctggggctggcaacttgcgtctgggggacacctccaggtgtgtggggtgaggatttcctataaccagggctcccagaagctttgcttatgtaaggaggtctgggagccagcccattggaggccaccagccattttggcttcaaaggaccccacctcacccaggtctcagcggcagtgggcacagctatgtcttcaggagctcccgtcaaacctcatagctggggcgctcccagacaggccagtccagacaggacacgctgggcccctggcatccagaggaagagccaggagtgtgggaaggcccacagtgggggctgtggcttctgacactcaggtcatagcctcagaggtctgaggtcagcccccacagacccatccggcccgccccccaagtccctgcagagagcacttagagttatggcccaggccctggtccacccttcccctgtgcacctccggctgggtttgccaagtcagggagcagggctggccgcaggaactcccaaaccttggctttgaatattgttgtggaggtgtgctcgtccctttctggacgtgcaaggtacctgtcccagcaggtcagatggggccagctgaggcgctcccccaggcaggaagggccagccttcaccatcgcgtgggattgggaggaggggcctccgtgagcagcccctcctctgccgctgtcccagcccagtccctctcccggagccttggcagcctcccacaacccagacacttgcgttcacaagcaacctaaggggcaggtgaagaagcgcagccctgccagacgcgctagattcctctaaggtctctgagatgcaccgttttttaaaaaggcgtggggtgaactgattttgatcttcttgtctagatgcaataaataaatctgaagcatttaatgtagtcatcttgacattgggcctacactgtacgagttccttatgtttccttgagctaaaaatatgtaaataatttttgtcccagtgagaaccgagggttagaaaacctcgatgcctctgagcctcgggaccgctctagggaagtacctgctttcgccagcatgactcatgcttcgtgggtactgaacacgagggtggaaatgaaaactggaacttccttgtaaatttaaacttggcaataaaagagaaaaaaagttaccaagaa

SEQ ID NO: 3960 - DNA, 5252 bp, Homo Sapiens
  NM_015229
cggccgccccggccgacagcgcccgggaacacggctcgcaggccgggggcaaggggcggccgggcgcggccgagctgccatcagtcatgctcttaaacggggactgcccagagagcctgaagaaggaggcggcggcggccgagccacccagggaaaatgggcttgacgaggccggcccgggagatgagaccaccggccaggaagtcattgtcattcaggacacgggcttttctgtgaagatcctcgcccctgggatcgagcccttctccctgcaggtgtccccccaggagatggtgcaggagattcaccaggtgctcatggaccgggaggacacgtgtcaccgcacctgcttctcactgcacctggatggcaacgtgctggaccacttctcggagctgcgcagcgtcgaggggctgcaggagggctctgtgctgcgtgtggtggaagagccgtacacggtgcgtgaggcccgcatccacgtgcgccatgtccgagacctgctcaagagcctggacccatccgatgccttcaacggggttgactgcaactccttgtccttcctgagtgtcttcaccgacggcgacctgggagacagcgggaagcggaagaagggcttggagatggaccccatcgactgcacaccacccgagtacatcctgccagggagccgggagcggccactgtgtcccctgcagccccaaaaccgtgactggaagcccttgcagtgcctgaaagtactcaccatgagcggatggaacccgcccccggggaaccggaagatgcacggggacctcatgtacctgtttgtgatcacagccgaggaccggcaagtcagcatcaccgcgtccacacggggcttttacctgaatcagtccacagcttatcacttcaaccccaagcccgccagcccccgcttcctaagccattccctagtggagctgctcaaccagatcagcccgaccttcaagaagaacttcgctgtgctgcagaagaaaagggtccagcgccacccgttcgagaggatcgccaccccattccaggtgtacagctggacagccccccaggcggagcatgccatggattgcgtgcgtgcagaggacgcctacacctcgaggctgggctatgaggagcacattcctggacagacccgagactggaatgaggagctgcagacgacgagggagctgcctcgcaagaacctgcctgagcggctgctccgagaaagggccatattcaaggtgcacagcgacttcaccgcggcagccaccaggggcgccatggccgtcattgacggcaacgtgatggccatcaaccccagcgaggagaccaagatgcagatgttcatctggaacaacatcttcttcagcctgggcttcgacgtccgagaccactacaaggacttcgggggggacgtggcggcctacgtggcgcccaccaacgacctgaatggcgtccgcacgtacaacgcggtggacgtggaggggctgtacacgctgggcacggtggtggtggattaccgcggctaccgggtcacggcccagtccatcatccccggcatcctggagcgggaccaggagcagagcgtcatctacggctccatcgacttcggcaagaccgtggtgtcacacccgcggtacctggagctgctggagcgcacgagtcggcccctcaagatcctgcggcaccaggtgctcaacgaccgtgacgaggaggtggagctctgctcctcggtcgagtgcaagggcatcattggcaacgacgggcgccactacatcctcgacctgctgcgcaccttccccccggacctcaacttcctgcccgtgcctggcgaggagctgcctgaggaatgcgcccgcgccggcttcccccgcgcccaccggcacaagctctgctgcctgcgccaggagctggtggacgccttcgtggagcacaggtacctcctctttatgaagctggccgccttgcagctgatgcagcagaacgccagccagctggagaccccctcctccctggaaaatggtggtccttcctccttggagtccaagtctgaggatcctccaggacaggaggcgggaagtgaggaggagggtagcagcgccagcggcctggccaaggtgaaggagctggcagagaccatcgccgcagacgacggcacagaccctcggagccgggaggtgatccgcaacgcgtgcaaggcggtcggctccatcagcagcaccgccttcgacattcgcttcaatcctgacatcttctcaccaggggttcgtttccctgagtcctgccaggatgaagttcgggaccagaagcagctgctgaaggacgcggctgccttcctgctctcctgccagatccctggcttggtgaaggactgcatggagcacgcggtcctgcccgtggacggggcaacgctggcagaggtgatgcgccagcggggcatcaacatgcgctacctgggcaaggtgctggagctggtgctgcggagcccggcccgccaccagctggaccacgtctttaaaatcggcattggagaactcatcacccgctcggccaagcacatcttcaagacgtacttacagggagtcgagctctccggcctctcagccgccatcagccacttcctgaactgcttcctgagctcctacccaaaccccgtggcccacctgcccgccgacgagctggtctccaagaagcggaataagaggaggaaaaaccggcccccgggggctgcagataacacagcctgggctgtcatgaccccccaggagctctggaagaacatctgccaggaggccaagaactactttgacttcgacctcgagtgtgagaccgtggaccaggctgtggagacctacggcctgcagaagataacgctcctgcgggagatctcgctgaaaacagggatccaggtcctgctgaaggagtacagcttcgacagtcgccacaagcccgcgttcaccgaggaggacgtgctcaacatcttccccgtggtcaagcacgtcaaccccaaggcctcggatgccttccatttcttccagagcgggcaggccaaagtgcagcagggcttcctgaaggagggctgtgagctcatcaatgaggccctgaacctgtttaacaacgtctacggagccatgcacgtggagacctgcgcctgcctgcgcctcctcgcccgcctccactacatcatgggcgactacgcagaggccctgagtaaccagcagaaggcggtgctgatgagcgagcgggtgatgggcaccgagcaccccaacaccatccaggaatacatgcacctggccctgtactgcttcgccagcagccagctgtccaccgccctgagcctgctgtaccgcgcccgctacctcatgctgctggtgttcggggaagaccaccccgagatggcgctgctggacaacaacatcgggctggtgctgcacggggtgatggagtacgacctgtcgctgcgcttcctggagaacgcgctggccgtcagcaccaagtaccacgggcccaaggccctcaaggtggccctcagccaccaccttgtcgcccgagtctacgagagcaaagctgagttccggtcggccctgcagcacgagaaggagggttacaccatctacaagacgcagctgggcgaggaccatgagaagaccaaggaaagctccgagtacctcaagtgcctgacccagcaggccgtggccctgcagcgcaccatgaacgagatctaccgcaacggctccagcgccaacatcccgcccctcaagttcacggcccccagcatggccagcgtcttggagcagctgaacgtcattaacggcatcctcttcattcctctcagccaaaaagacctggagaatctgaaagccgaggtggcgcggcggcaccagctccaggaggccagcagaaacagggatagagccgaggagcccatggctaccgagcccgcgccagcgggggccccaggagacctgggctcccagcccccggctgccaaggacccttctccgagcgtgcagggatagagagggagccagacggacagccagccagcggccccgtcaccagggagcccgactgcgggagaagggggcgagcctgcgggcggaagaggaagcaaggccctcttcctccacgtctcaccccaccccacccccgtgtcctcctgggagcctggcctgcctgccccgcagaaggtgtttttgcgctggttcaatgaatagatgatgcagaggccccattggagacacgtgaatggcgtgtgcggccatcagttcccggctggggggcaggtgttgcttcggcccccgccctccggccggcgtgtgcgagtgcgcccctggctgtgagtgttgaccgttcctctcccctgtacatagcccgagccagtcctgagtgggtgactcctgagtgggtgacgcgcagacgggatttctcaggtcatttgtatggtcgacatgatggctgctgctttggctgccaccacccccgggcccagcctgtctgaaagttcagggtttaggccgaaaaacccggtggggaggggtggggagccggagctctgtggcggggctggagggctggggtgcactttagtttggggcgggacgggagccgccgttgtgactggcgtggtctggctgctgctcccgaacggaggggtcggggttggcttgctgggccctcagagcccagtgggtggctctgactcggctccctactccctgcacccagctgggcgcagccttggggcctgcggtctgaatgtatccctcccctcagttttaacctgagctgccgaacgcacagtgggccgggggcgaggctgggggaagcggggcccaattacggatcccgggagttacaggtgccgacgtgatgtcgcttctctggtgcccagctcccttcctggtctgagactagctctgggggtggcgggggcccccacacgctgctcccgctccaccctgcccgtgctgctgctctgtgcctgctgtcagagccctggtgggggaggatgtggccaccctgagacccggaggagacgggcgtctgcctgggtttgcggagagccgcttatgggtgtggtccgtccagacaccttgtttcaagggggatgggcgtgagcgggcaagcagagcatccccaccgctgagcaagaactttttcttgtttttaaaccatcacgtcctcatttcacattggaataaagtgagtttttgaaacctgcggcaaaaaaaaaaaaaaaaaaaaaaaaaaaa

SEQ ID NO: 3961 - DNA, 7360 bp, Homo Sapiens
  NM_015230
gcggccgccgccaggcagcagaggcgactgcggacagccggcggggaccgggaaagaggaggcctggcgcctccggcagaggggcgaggaccgagcgcccaaggctgggagagacgccggcgctgagcttcccagcgccgcctcacctcgcttttcgaactccgcgacccgagcgcaaggcttaagcaggtaaagcagtcactgtgaagaaaataacattttaagaaacttttctgtcacaattgatagaggaaaagccagtagagaagtacatcttcttgtgtgtgtgtctcatcgtgccactttttgtaactcagcttagtaatgaagccaccattatgtcctcagtcagtgaagtaaatgtggatataaaagatttcctaatgagcattaatttggagcagtatctcttacatttccatgagtctggttttactactgtgaaggactgtgcagcaataaatgacagcctgctgcagaaaattggaatatcacctacaggtcaccgtaggaggatacttaaacagttacagataatcttgtcaaaaatgcaagatattccaatatatgcaaatgttcataaaactaagaagaatgatgacccttcaaaggattaccatgttccatcttctgatcagaatatctgcatagaactttccaattctggtagtgttcagacatctagcccaccgcagttggagactgttagaaaaaatcttgaagacagtgatgcaagtgtggaaagaagccagtatcctcaatcagatgataagctgtctcctcctaaacgcgacttccccactgcagaggaaccacacctgaatttgggttctttgaatgattctttatttggtagtgacaatattaaaatagaatcattgattacaaagaagactgtggatcacacagttgaagaacaacaaacagaaaaagttaaattgatcacagaaaatctcagtaagctccctaatgcagactctgaatgcctttcttttgttggctgttcaacatcaggaacaaattctggaaatggaacaaatggtttattagaaggatcaccaccatccccattctttaagtttcaaggagaaatgattgtaaatgacttgtatgttccatcatcaccaatcctagcacctgtgagaagtcgtagcaagttggtttcaagaccatctcgatcttttctgctaagacatcgacctgtaccagagattccagggtcaacaaaaggagtttctgggagctatttccgtgaaagaagaaatgttgctacctcaactgaaaaatctgtggcatggcaaaattcaaatgaggagaattcatcttccatctttccttatggagagacctttctcttccagagactagaaaattccaagaagcgatctataaagaatgaatttttgacccagggagaagcactcaaaggggaagcagctactgcaacaaactcttttatcatcaaatcaagcatatacgataacagaaaggagaaaataagcgaggacaaggtggaagatatttggatacctcgagaggacaaaaacaattttttgatagacactgcttctgaatcagaatactcaacagtagaagaatgctttcagagtttaagaagaaaaaattcaaaggcatctaaatctaggactcaaaaagccttgattttggactccgttaataggcacagttatccgttaagctcaacaagtggaaatgctgattcatcagccgtttcttcacaggcaatatctccctatgcctgcttttatggagcatctgcaaagaaggttaaatcaggatggctggataaactctctcctcaaggaaaacgcatgtttcaaaagagatgggtgaaatttgatggccttagcatttcttactacaataatgagaaggagatgtattcgaaaggaataattcccctttctgctatatcaacagtacgagttcaaggagacaacaaatttgaagttgttacaacacaaagaacttttgtttttagagtagaaaaagaagaggagagaaatgactggatcagcatactattaaatgcactgaaatcacaatcccttacctcgcagtctcaagctgttgttacacctgagaaatgtggatatcttgaattgagaggctataaggcaaaaatttttactgtgttaagtggaaacagtgtgtggctttgcaaaaacgaacaggattttaagagtggacttggtattaccataattcctatgaatgtagcaaatgtaaagcaagtggaccgaactgtgaaacaatcttttgaaataatcactccctacaggagtttcagctttacagccgagactgaaaaggagaaacaagactggattgaagctgtgcagcaatcaatagcagaaactctctctgattatgaagtagctgagaagatttggttcaatgaatccaacaggagctgtgcagattgtaaagccccagatcctgactgggcatccatcaatctctgtgttgtcatctgtaagaagtgtgcaggacagcatagatctttaggaccaaaagattccaaggttagaagtctaaaaatggatgctagcatttggagcaatgaactcatcgagctttttattgtcattggaaacaaaagagcaaatgacttttgggctggtaatcttcaaaaggatgaagaattacatatggactcaccagtagaaaagagaaaaaactttattactcagaaatataaagaaggaaaattcagaaaaactcttttggcatctctcaccaaagaagaattaaataaggctctatgtgctgctgtagtgaaaccggatgttctagaaacaatggctttgctgttcagtggagcagatgtcatgtgtgccaccggagaccccgtgcatagcaccccctatctgctagccaagaaagctgggcaaagtctgcaaatggaatttctctaccataacaaattctcagatttccctcaacatgatattcattccgagggtgtattaagtcaagagtcttcccagtccacattcctctgtgactttttatatcaagctccttctgctgcttctaaactctcttcagagaaaaaactgcttgaagagacaaataaaaaatggtgtgttttggaaggaggcttcttgagttactatgaaaatgataagtctaccacacctaatggcaccattaatatcaatgaagttatctgcctggctatacacaaagaggacttctatttaaatactgggcccatctttatctttgagatctacttaccctccgaacgtgtgtttttatttggagctgaaacatctcaagctcaaagaaaatggacagaggcaatagccaagcattttgttcccttatttgctgaaaacttaacagaagctgactatgatttgattggtcaactcttctacaaagactgccatgccctggatcagtggagaaaaggctggtttgctatggacaaatccagcttgcatttttgccttcaaatgcaagaagttcagggagatagaatgcacttaagaagactgcaagagctaacaatcagcacaatggttcaaaatggggaaaaactggatgttttactcttggtagaaaaagggagaacattatacatccatgggcataccaagttggatttcacagtctggcatactgcaattgaaaaagcagcaggtacagatggtaatgctttacaagatcagcagctcagcaaaaatgacgttcccattatagtgaacagctgtatagcatttgttacacagtatggtttaggatgcaaatatatctatcaaaagaatggtgatcctttgcatataagtgaactcctggagagtttcaaaaaggatgcaagaagctttaaattgagggctggaaaacatcagcttgaagatgtgacggctgtgttgaaaagttttctctctgacattgatgatgcactgcttactaaggagctctacccatattggatctctgctttagatacgcaagatgacaaggaaagaattaaaaaatatggagcatttatacgttctcttccaggggtcaaccgagcaacactagcagctatcattgaacacctgtatagggttcagaaatgctcagaaatcaatcacatgaatgcccataatttggccttggtcttttcatcctgtttgtttcaaacgaagggacaaactagtgaagaagtgaatgtaattgaggacctaattaataattatgtagaaatatttgaggttaaagaagatcaagtcaaacaaatggacatagaaaatagctttattaccaagtggaaagacacccaagtttcccaggctggagatttgttaattgaagtatatgtagaaaggaaggaacccgactgtagtattataattcggatatctcctgtgatggaagcagaagaattaactaatgatatattagcgataaaaaatattattcctacaaaaggtgatatttgggccacatttgaagtcattgaaaatgaagagctagagcgtcctcttcactacaaggaaaatgtactggagcaggtgcttcggtggagttcattagctgaacctggctctgcttacctggtggtgaagagattcttaaccgctgacacaattaaacactgcagtgaccggagtacactgggaagcatcaaagaaggaatcttgaaaatcaaagaagaaccatccaaaatactatctggaaataagtttcaagaccggtattttgttttacgagatgggtttctctttctttacaaggatgtgaagagtagtaaacatgacaagatgttttctctcagttccatgaagttttatcgtggagtgaaaaagaaaatgaagcctccaacaagctggggattgaccgcatattctgagaaacatcactggcacctgtgttgtgatagttcacgaactcagacggagtggatgaccagtatctttattgcccagcatgaatatgatatatggccaccagctggaaaggaacgaaaacgttcaataaccaaaaatcccaaaattggaggtttgcctctgattcctatacagcatgaggggaatgcaaccttggcccggaaaaatattgagagtgcaagagcagaacttgaaaggctgcggctcagtgaaaagtgtgataaagagtccgtggactctagcttaaaggagagagcttccatggtggcccactgcctggagcacaaggacgataaacttcgaaatcgaccccgaaaacatcggagtttcaactgcctggaggacacagagcctgaagccccacttgggcaaccaaaaggccataaaggcctaaagacattgaggaagactgaggacaggaatagcaaagctactttggactctgatcataagttaccatcaagggtaattgaagaacttaatgtggttctacaacggtcaagaacccttccaaaagaattacaggatgagcagattttgaagtaggaaataaaatgaattgctccccagattatttttttaatattgtatgcaatctttatgtgtaactccaaaactgaactataagataattcataagaatttgcctattgataggcaaatttgtctatgcttaggcatttaaggagcatttaaaaatatgtatatatgtgactgaatgtaagattaactttattttggtctgaacaaaccttgtaaagttccattgtattaacgtgtgtaagaagacattgggttacttaggtggtcagtccttttaaagtagttgtctgttaagtggtataatttatgagcagaaatctcaaactgtactgtattgtataaaatgctgtgtttaaatgaagcctaagaaactatctgtaacatattttgcactttgagaaaccttgtatattaaattaccatatgtttttaggtttacagaagttctaccttagggaaaagaaagggaagtaaattgaaaaaggggggagaatttattgtagtggctgcctaaaaaccactggagtttttaaaagaagcaaggagttaaatgtcctgcaaaacaaggaagtgagctaagattcattctagttcactaatgaccagaacttgtcaatgagaaaccacttgttaagaaaaagtccagtgtttatttctcaagagtaatattcggccaacagatgtaaataatagcactagccactcttattaatatttatagtgttagaaaaccagccacattacagattcactacgtttgagctcattgttggtggctgctaagaggaaacttacactgcattggagaggttgtgtacacaggacctggcctggatgctgattgcactgtcattgtatgcaagcattttgtcttttttcagaatttctgactatacttttggtacgaacaaaattcatcaccacagggtcctgttgttttgtttgatttttagatttttttaaattattattaaggttgtaatgtttttctccgagttgtcagaaataactggaagaatacaatatatggccattatggagccaggggctagttggtggtttactatacatttgggggctacctggtcacatttaatctaggtttttttttctttttttaagtaaaggtgtggtctcttccctgtacttatgaataaggacaaagccctatttttgtttccacataaagatcagctactgaattggtgaatttcctgacagacaatgctatctaaccatagttcatgttaggggaagcatttttccatcagtttctttaaaattggattgtctggtgagttttgatattaaacattatgtagctaagttttttttttttagcatttcttttttatttttcaatctatattcacaggcccatacttcagtcagtccaatcatagtacagtgatgtggtggtagatgctatgaatttcttcattgtaaaatacggatcatttgtattttggggtgataaaatagttcaccatgggtatgagatatttattctttaaatcaaagtaaattagaatttttaaaaagcacaaaactgcaggacagtttatgaaataggtggcactattagggaatcttcctttaaagcaagaaatcatgttatttagaaagaaaaactaatcttaaacatactatttctaataaatatttatatttttatgaaataaagaggtatgtggaaattaatatttggtgatgttggacagtggaaaagtatctagagtttttacctgccttatctgaattcttcttgaaacttgagcttaaactctaatagctgtttccctttctattctgaacaactgtctccatttttcaagtgtgagagataagggctaatgatgacatctcatttattttgagtaaacattaaaattgttttacaagtctacttg

SEQ ID NO: 3962 - DNA, 5383 bp, Homo Sapiens
  NM_015231
ctcttctggattcctcgctgcccaccctcattctcccggtggaagcctcgcaacgaagggccggagccgcctttctgctcccggaatgcttcacctgtccgcagctccgcccgccccacccccggaagtgacggcgaccgcgcggccctgcctttgttccgttgggcgtcgcggcgacggcgggaagatggcggcggcgggagccctggaacggagcttcgtggagctaagcggagctgagcgcgaaaggccgaggcactttcgggaattcacagtctgcagcattgggactgcaaatgccgtggctggcgccgtaaaatacagtgaaagcgcgggaggcttttactacgtggagagtggcaagttgttctccgtaaccagaaacaggttcattcattggaagacctctggagatacattggagctgatggaggagtcactggacataaatctgttgaataatgccattcgcctaaaattccaaaattgcagtgttttacctggaggggtttatgtctctgagactcagaatcgtgtgataatcttgatgttaaccaatcaaacagtgcacaggttacttttaccacacccctcccggatgtataggagtgagttggtagttgacagtcagatgcagtcaatattcactgacattggaaaagttgatttcacagatccttgcaactatcagttaattccagcagtacctggaatatctcctaattccaccgcctctacagcctggctcagcagtgatggggaggccctgtttgccttaccatgtgcttctgggggaatctttgttcttaagctacctccttatgacatacctggtatggtgtcagtcgtggaactgaaacagagttcagtaatgcaacgattgcttacaggctggatgccaacagctatcaggggtgaccagtcgccttcagatcgtcccctcagtcttgctgttcattgtgtggagcatgatgccttcatctttgctttgtgtcaggatcataaactacgaatgtggtcttacaaggagcaaatgtgcctaatggtagctgacatgctggagtatgtccctgtgaagaaagaccttcggcttactgctggaactggacacaaattacggcttgcttattcccccaccatgggactctacctggggatatacatgcatgcaccaaaacgaggacagttctgcattttccagttggtgagcactgagagtaatcgctatagtctcgatcatatttcttcactgttcacttctcaggagacactgattgactttgccttaacttccacggatatctgggccctgtggcatgatgctgagaaccaaacagtagtgaaatacatcaactttgaacataatgttgcaggtcagtggaatccagtttttatgcagcctctgccagaggaagagattgtcatcagagatgatcaagaccccagagagatgtatctgcaaagtctttttacaccaggacaattcacaaatgaagctttatgtaaggctttacagattttctgccgaggaactgagaggaatttggatctttcctggagtgaactgaagaaagaagttactttagctgttgaaaatgagcttcaaggaagtgtaacagagtatgaattctcccaggaggagtttcgaaatttacaacaagaattctggtgcaagttctatgcctgttgtcttcagtatcaagaagccctctctcaccctcttgccctacatttgaatccacacacaaacatggtgtgcctgctgaaaaaagggtacctgtctttccttattccctcatccttagtggatcatttgtatctcctgccttatgagaaccttttgacagaagatgagacaaccatatctgatgatgtggatatcgctcgggatgtcatatgtcttataaaatgcctccggctgattgaagagtcagtaactgtggatatgtcagttataatggaaatgagttgttataacctacagtctccggaaaaggctgcagagcagattctggaagatatgatcactattgatgtagaaaatgtgatggaggatatttgtagtaaactgcaagagattaggaacccaatccatgcaattggactacttatacgggaaatggattatgaaacagaagtggaaatggaaaagggattcaatccagctcagcctttgaatattcgaatgaatcttacccagctctatggtagtaacacagcagggtatattgtgtgcagaggggtgcataaaatcgccagtactcgtttcctgatctgcagagatcttttgatcttacagcagctgttaatgaggcttggagatgctgtgatttggggaactggtcagctctttcaagctcagcaagacctactacatcgaacagctcccctactcttatcttattacctcattaaatggggaagtgagtgcttggcaactgatgttccacttgacacactggagtctaatctccaacacttatcagtactggaattaacagactctggtgctttaatggcaaataggtttgtatctagtcctcagactattgtggagttattcttccaagaagttgcaagaaaacacattatatctcacctcttctctcagccaaaggcacctctgagccaaactggattgaattggcctgaaatgattactgcaattaccagttatttattgcagcttttatggcctagcaatcctggttgtctctttctagaatgtttgatgggaaattgccaatatgtacaattgcaggattatattcaactgctacatccctggtgtcaagtcaatgttggttcctgtcgatttatgctgggaaggtgttacctagttacaggagaaggacagaaggctctggaatgtttttgtcaggcagcatctgaagtaggcaaagaggaattcttggatcgcttgattcgctcagaggatggggagatcgtgtctacccccaggctgcagtattatgacaaggttttacgactactagatgtcattggtttgcctgaactggttattcagttggctacatcagccataactgaagcaggtgatgactggaaaagtcaggctactctaaggacatgtattttcaaacatcatttggatttgggtcacaatagccaagcatatgaagccttaacccaaattcctgattccagcaggcaattagattgtttacggcagttggtggtagttctttgtgaacgctcacagctacaggatcttgtagagtttccctatgtgaatctgcataatgaggttgtgggaataattgagtcacgtgctagagctgtggaccttatgactcacaattactatgaacttctgtatgcctttcacatctatcgccacaattaccgcaaggctggcacagtgatgtttgagtatggaatgcggcttggcagagaagttcgaactctccggggacttgagaaacaaggcaactgttatctggctgctctcaattgtttacgacttattcgtccagaatatgcgtggattgtgcagccagtgtctggtgcagtgtatgatcgccctggagcatcccctaagaggaatcatgatggagaatgcacagctgcccccacaaatcgacaaattgaaatcctggaactggaagatctggagaaagagtgttccttggctcgcatccgcctcactttggctcagcatgatccatcagcggttgcagttgctggaagttcatcagcagaggaaatggtcactctcttggttcaggcgggcctctttgacactgccatatcactctgtcagacttttaagcttcccttaacgccagtctttgaagggcttgccttcaaatgcatcaaattgcaatttggaggagaggcagcacaagcagaagcctgggcctggctagcagccaatcagctctcatctgtcatcactactaaggagtctagtgctacagatgaagcatggcgactattatccacttacctggagaggtacaaagtccagaataacttgtatcaccactgtgtaatcaacaagctcttgtctcatggagtgcctctgcctaattggcttataaacagttacaagaaggttgatgctgctgaattgcttcgtttatacttaaactatgaccttttagaagaagctgtggatttggtgtcagaatatgtggatgctgtattgggaaaaggacatcaatacttcggaattgagtttccactgtccgcaacagccccaatggtgtggcttccatactcctctattgatcagcttctccaagctctgggagagaacagtgccaacagtcacaacatcgcactgtcccagaaaatacttgacaaattggaggactaccagcaaaaagttgataaggcaacacgggatttattatatcgtcggaccttgtgatttggattgtcacctagcctttgtaaccgcttggtgcctcttaggacttaagactaccctacaggaaccctgtactcaaggccgatttttgtaactgtaaatgatgtgtacaacattcaagtctgcattctgcacaagataggagggcggaagagtcagaggaccctgtgcttgctggtggtgctaacacaatttctggtgttcaaccttggtctcaaatagctgcttttgtatatgattcacgagcttttttagagtttatatttttttaaactaccgaagacattcattatctgcaaattaagactcaccttcactttccaaaatagctgagggttgttggcttgttgtagctgaccaccaaaagcagtcactgcaaatcttttaattcttccctatcaccttttgtattttaatgcaattattttggtccagaactgacctgtattttctgtattgtacacaaaagctaataattttgtgtactttttatttattttggaggttttatatgatcttcaattgagtattaaataatttgcctagattaagcctaaaatgatgaccagctaattaaagaagatattttgaatctggttctgagctaaagttgagtaaattcttagctaagaaaaaattggaaatccatcatctatattagcaacagattctcagagtaaattgttaacttctatgatttatgataatcaagctggacttgatcatacaagttagtctcataatgtattggaccaaaatgtaaacttcattggtcagatttagaagcattcatgctcacaagttttgggaaagtgaaaaataataaaatcatcttggattttattctgtatattaaaatttatcttttaaggaaacaatctgtatactacttgcttgtatagccttttgacccttcttgagtttttcagaagcctttaatttttatactttcaataccatatttacattatatactttaattaacaa

SEQ ID NO: 3963 - DNA, 4436 bp, Homo Sapiens
  NM_015239
ctgcgcgtgctgggagccggctggcaaggcgtgcggtgggcggggcgccgcgctgacgttgcccgggatgcggacaggttccgccgcctccagcgccgccgccgcagctgccgccgccgccgcctccgcctcgcctgccaccggggtttgtatgaaaacaccgggcggcgggcggcgagggatccgccgtgatccaggtgctgagccgggtgctgcggctctgcgcggtccccgccagcgccccatcctgagccgattatctgcaattatgaaatgaagtaactcaagatgagcaagttaaaagtgataccagaaaaaagccttaccaataattctaggatcgtaggactcctggctcaactggagaagatcaatgctgagccttcagaatcagacactgcccgatatgttacatcaaaaattcttcatctggctcagagtcaagaaaaaacaaggagagaaatgacagccaaaggttctacaggaatggaaattctgctgtcaacattagagaacacaaaagatcttcaaactacacttaatatcttaagcattcttgttgagctggtgtcagctggtggaggtcgaagagtgagtttcttagtcaccaaaggtggttcacaaatattgttgcagttacttatgaatgccagcaaagaatctcccccacatgaggacttaatggtacagattcattctattcttgcaaagattggaccaaaagataaaaaatttggagtaaaggctagaattaatggggctctgaatataaccctgaatttggtcaagcagaatttgcagaatcatcgcttggttctaccttgccttcagcttttacgagtatattctgccaactctgtgaattcagtatccttagggaaaaatggagttgtggaactgatgtttaaaatcattggaccatttagtaagaagaattccagtcttataaaggttgctttagacactcttgctgcattgctaaaatcaaaaacaaatgccaggagagctgtagacagaggatatgtccaagtgcttttaacaatttatgtagattggcaccgccatgataaccggcatagaaacatgctcattcggaaaggaattttacagagtttaaaaagtgttacaaacatcaagttgggaagaaaagcatttattgatgccaatgggatgaaaattctgtataatacttcgcaattgcctgttattcctgtgactggtcctgtggctcagctctacagcttacctcctgaagtggatgacgtagtagatgaaagtgatgacaacgatgatattgatgtagaagctgaaaacgaaactgagaatgaagatgacctagatcaaaattttaagaatgatgatattgaaacagatattaacaaactaaaaccccagcaagaaccgggacgaacaatagaagatctaaaaatgtatgaacaccttttccctgagcttgttgatgattttcaggactatgatttaatctccaaagaaccaaagccttttgtatttgagggaaaagtacgtggtcctattgttgttcctacggcaggcgaggaaacatctgggaattctggcaatttaagaaaagttgtaatgaaggagaacatatcttctaaaggagatgaaggtgaaaagaagtctacctttatggatctagcaaaagaagatattaaagataatgatagaacattacaacagcagccaggtgatcaaaatagaactatttcatcagtccatggtttaaacaatgatattgtaaaggccttggaccgaattacattgcagaatattccttctcaaacagccccaggttttactgcagaaatgaagaaggactgcagtcttcctcttactgtccttacctgtgctaaagcatgtccacacatggctacttgtggaaatgttctgtttgagggaagaacagttcagctagggaagctttgctgcactggagttgaaactgaagatgatgaagatactgagtcaaattcatcggtagaacaagcatcggttgaagtacctgatggaccaacactccatgacccagacctctatattgagattgtgaaaaatacgaagtctgtcccagaatattcagaggtggcttatcccgattattttggtcacattccgcctccattcaaagagcctattttagaaaggccttatggtgtacaaaggacaaaaattgctcaagatattgaaaggctaatacatcagagtgatatcatagatcgtgtggtatatgacttggataacccaaattacaccattccagaagagggagatattttgaaatttaactccaaatttgagtctgggaatctgcgcaaagtaattcaaattagaaaaaatgaatatgatcttattctgaactcagacataaacagcaatcattatcatcagtggttttactttgaagtcagtggaatgcgaccaggtgttgcttacaggtttaacatcattaactgtgaaaagtccaacagtcagtttaattatggtatgcaaccactcatgtattcggttcaggaagcattaaatgccagaccatggtggattcgtatggggactgacatttgttactataaaaatcatttctcaagaagttcagttgctgcaggtgggcaaaagggaaaatcctactatacaattacatttactgtcaattttccacataaagatgatgtttgctactttgcttatcactatccatatacgtattcaactttacagatgcatcttcaaaaattggaatcagcacacaatcctcagcaaatctattttcggaaagatgtgttatgtgaaaccctgtctggaaacagctgccccttggtgactataacagcaatgccagagtctaattattatgaacatatctgccatttcagaaatcgcccttacgttttcttgtctgctcgggtacatcctggagaaactaatgcaagttgggttatgaaaggaacgttggaatatctcatgagcaataaccccactgctcagagcttacgagaatcttatatttttaaaattgtccctatgttaaatccagatggtgtcatcaatggaaatcatcgctgttctttaagtggagaggatttgaataggcagtggcaaagtccaagtccggatttacatcctacaatttaccatgctaaggggctgttgcaatacttggctgcagtgaagcgtttacccttggtttattgtgattatcatggccattcccgaaagaagaatgtatttatgtatggttgcagcatcaaagagacagtgtggcataccaatgataatgcaacttcatgtgatgttgtggaggatacgggatacaggacattgcctaagatactgagccatatcgccccagcattttgcatgagcagctgtagcttcgtagtggaaaaatctaaagaatccacagcacgtgttgtagtttggagggaaataggagtacaaagaagttataccatggagagtactttatgtggctgtgatcagggaaaatacaagggtttacagattggtacccgagaactggaagagatgggagcaaaattttgtgttggtcttttacgtttgaaaagactgacctctccattggagtataatctgccttccagcctgcttgactttgaaaatgatttaattgaatcaagctgcaaagtaactagccctaccacttatgtcttggatgaagatgaacctcgattccttgaagaagttgattacagtgcagaaagtaatgatgagttagatattgagttggctgaaaatgtaggagattatgaaccttctgctcaagaagaagtactttctgactctgaattatcaagaacatacctaccttgagcccgctgccatctcttgttaactgcaaagaataaatgaaatatcttggtttttatttcccaggaagcttgagagaaatgagtttatacagagctgactcaaaaagacaaaaagtaacttgggccagtttggtttcaagataataaatgtgttattaattaatgataaaattggcgcttgttttattttcgatattcaatgcactttatgtagcattgaatgatcaaatattggatttacctttaaaaaaaaaacctgagtatcattgcatgaatttttatctccctatggttatatcctgcatcaagtggataattttgaagtgtgttcagaatataaaattgaaattttagagttgttgaaaatcctgacttgttgaaaactaatatatatgtacatggatttctatagatgtgtttgtttagaagtgggtagatattgcagataagactgttcttcagaatcatgttaactattgggttgtgactgaagtagtccagggtttgccttgaaaccattacattctacatttaccaaattaaacaaataaaaactgtattaaatgttgcaaaaaaaaaaaaaaaaaa

SEQ ID NO: 3964 - DNA, 6355 bp, Homo Sapiens
  NM_015245
gcgctcgtggggaaaaggcagggagggggtggtgtccccagccggtttggggggtgcgttgcccggagacggaaagtttgggagcccgagcaggctcggctgcagcctcggggagggggtccagcgggtggcggccctggggatggggaaggagcaggagctgctggaggcggcccgcaccgggcacctcccggcggtggagaagctgctgtccgggaagcggctctcctcaggctttgggggcggcggcggcggtggctctgggggcggcggcggcggcagcggcggcggcggcggcggcctcggctcttccagccaccccctctccagtctgctcagcatgtggagagggccaaatgtgaactgtgttgacagcactggctacacacccctgcaccatgctgctttgaatggccataaggatgtggtcgaggttcttctgaggaacgatgcgctgaccaacgtggctgactcaaaaggctgctaccctctgcatttggcagcctggaaaggagatgcccagatagtgcggttgctcatccatcaagggccttcacacaccagagtcaatgaacagaacaatgacaacgagacagccctgcattgtgcagcgcagtatggccacacagaggtggtgaaggtgctcttagaggagctgacggaccccaccatgcgcaacaacaaattcgagacccctttggacctggcagcactgtacgggcgactggaggtggtgaaaatgctccttaatgcacaccccaacctcctgagctgcaacactaagaagcacacccctctgcacttggcagcaaggaatggccacaaagccgtggtccaggtcctcctcgatgctggcatggacagcaactaccagacggagatgggcagtgctttgcatgaggctgctttgtttggcaagaccgatgtggtgcaaatcctgctggctgcaggaactgacgtcaacataaaagataaccatggactgactgccctagacactgttcgggaactgccttctcaaaagagccagcaaatagcagcattaattgaagatcacatgactggaaaaagaagtacaaaagaagtagataaaacccccccaccccagccacctctcatctccagtatggactccatatcacagaagtctcagggtgacgtggagaaagcagtgactgaactgattatagattttgatgcaaatgctgaagaagagggtccctacgaagctctgtataatgccatctcctgccattcgttggacagcatggccagcgggcgatcatctgaccaagactccacgaacaaggaggctgaggcagcaggagtgaaacctgctggagtgaggcctagggaacgtccaccacctccagcaaagccaccgcccgatgaagaggaagaagaccacatagataagaagtattttcccttgacagcttctgaggttctgtccatgagacctaggattcatgggagtgcagcccgggaagaagacgaacacccttatgaactgttgttaacagcagagacaaagaaagtggtgttggtggatggaaaaacaaaagaccacaggcggagcagcagcagccggagccaggactctgcggaggggcaggacgggcaggtcccagagcagttctcaggcctcctccacggctcctccccggtgtgcgaggtggggcaggaccctttccagctgctctgtaccgctggccagagccatccagacgggtccccccagcagggcgcctgccacaaggccagcatgcagctggaggagacgggtgtgcatgctcctggagcctcccagcccagtgccctggaccagagcaagagagtgggctacctcacaggcctgcccaccaccaacagccgctcgcaccctgaaactttgactcacacagcatctccgcaccctggtggtgctgaggaaggagaccggagtggggccaggagccgagcgcctcccactagcaaacccaaagctgaactcaaactcagccgcagcttgtccaagtctgactctgatctcctgacctgctcacccacagaggacgctaccatggggagtcggagtgagtccttatccaactgcagcattgggaagaaaaggctagagaagtcaccctccttcgcctcggagtgggatgagattgagaaaatcatgagttctattggagaagggattgacttttctcaggaacggcagaagatctcaggtttacggacgctggagcagagtgtcggggagtggctggagtcgattgggctgcagcagtatgagagcaagttgcttctgaatggctttgacgatgtccacttcctggggtctaatgtgatggaagagcaggacctgcgggacatcggcatcagcgacccacagcaccggcggaagctgctccaggcggcacgctccctacccaaggtgaaggctctgggttatgacgggaacagcccccctagcgtgccctcctggctggactccctggggctgcaggactacgtccattccttcttgtcaagtggttacagctccattgacaccgtgaagaacctctgggagctagagctcgtcaatgtcctgaaggtccagctgctcggccatcgcaagcgcatcatcgcctccctcgcagacagaccgtacgaggagccgccccagaagccccccagattctcccagctgaggtgccaagatttgctctcccagacgtcatccccactgagtcagaatgattcctgcactgggcggtcggcagatctgctgctgcctccaggggacacaggcaggaggcgccatgacagtctccatgaccctgcggcaccctcccgagcggagcgcttcaggatccaggaggagcaccgtgaggccaagctgaccctgcggcccccgagcctggcagccccctacgccccagtgcagagttggcaacaccagccagagaaactcatcttcgagtcctgtggttatgaagccaattatctgggctccatgctgatcaaagatctgcgagggacagaatccacgcaagacgcctgtgccaagatgcggaaatctacggagcacatgaagaagatccccaccatcatcctgtccatcacatacaaaggtgtcaagttcatcgatgcctccaacaagaacgtcattgcagagcacgagatccggaacatttcctgtgcggcccaggacccggaggacctctgtacctttgcctacatcaccaaggacctgcagaccagccaccactattgccatgtgttcagcaccgtggatgtgaacctgacctacgagatcatcctgacgctggggcaggccttcgaagtggcctatcagttggccctgcaggcccagaagtccagggcgacgggcgcctctgcagctgagatgattgaaacaaaatcttccaaaccggtgcctaagcctcgggtcggcgtgaggaaatccgcactggaaccacctgatatggaccaagatgcccaatcccatgccagtgtctcctgggttgtggaccccaaaccagactctaagcggagcctcagcaccaactgagccactgaggaaccacactgtgctgcggaaacatagacgtgggggcataggctcccactgccaccaccgccatcgcctcacctgcagctctgaagacccaggcctcacctccgcctgcaggacctcctcttggccacttggcctgggcctgccaccaccacgtcctgcagaacgagccctgccttggctgtggagaagcactccaggccgctagcagatgggactggcattccagagggtcaagaagtgacttgttcagaacacattgtttttaacagaaaaaaaatctttttataaaatgaacttttaacacttggctcaaacctctaggtcatactgccaatctttagacaaatggccatggggcagaggacaggggagctgaggttggttcagaggccagcctgcatagcctctgtcctcaggacggaacttgggtgcagctcagtgggtcggaagagaaggcggtggcctgtgggtgaggggaacggagcaggctcaggcagaattgagtacggtgcgtctgcttttcaaacccaaccatatcagctgctgctctttatgaactgcccaacttcctgtccctttcaggggctagacacaggcttctcgtaagaacacagccttagaggcacctgagcaactcaaaggtttccggtccatttctggggttcccgatgggaaggttcagtggccaaatgaagataagtgtgcagtttctagtgctgggaagtcttagccagcaccagagcgccaggcctctccctggcctcttacctgtcagtgatcggagcactgccctgggctggccggcgccgtactgcctgcgttgtgtcagagaataggaaaagcagctttgtttggggcattaatgcttggagtggggtcagctaaggttgctacttgccaatttgtgatttgtctaatcagcctgtgtgattggggctcattttgattctctgaattatcggtttgacggttacacttggctgctgggcccatccctggcccccggtgtggaaaaggctaaataaggtgacagtgcatcgatgctcccccgcgtggcctttggggcaggctggcatcccggtgcgcctctgcttcttaagctttcctgctgctcgctttgtttttaaaagtaacttgggttgcattcttccctctggactagagtagaaatgcaggggaaactgctgtggatttgagaggcaaagttggctcagctgtgtgcccagttcctcctgtgggcactttagcaggctccgagctttcctggcataggtcaatcaggtcccaggatgaataatccaggcttcagcaacactcctctttcccagccagcaaaggctgtgaatttgaattctttgttggtatgtatgtgcagggagtactgttaggcacattcttaacccatgtggttggccagaaatcagaagtggggctgtgtctctgactggctagaggccaggccttgtgggtttctatctgctaagcacccagcaggttggggcctgggactcagctctctctgcggtagaggcaggccctcctccacttcttggtactaaacgaagatctcgacaccttgcagttttacttcatttcctgcccctttcagggcctgtgaggatgcccatgagctaccgctgtacagttctcggccccggctttcttccaagagttgaccaggaaccctaaagcatccagagtagactgcgctgccactgcgcacatgctggtgcccgtcttcctcctaaggggccaggccacatccaagtgggcctctgtcgggggcggggcggtaggtccgaaagaaaccgcagacactacgatgcactcctcaagctgtcttttgtgcttagatcatccataggtgtttcttctgcttgaagctgctatatcatctttatttattcagggtattttcatattggaagccttggctagtctgctctagctctgggttctgtttagagattggtttatttctgaatattcaagaaaggaaaatgactgggcctttctttcttttcttctcctctgggatgggtagtctccctttcctagaaaggttattataactttaaggacaggcttcaagtgggaaggcccctacttttgcacttctccaagtgcaggtcacaccaggggcagaccctgtcgctgcgtttctgaactgtgaaggagcccattcgggtgggagacttcagatgggctcagtacctgtcccagccacaggcttcttgtccacctcttctcccctgcccaccagctgctcagcgcataagaccttcccgacaggctctgcgtgtgcagctctctgcgtccctcctgggccctccagcgtcagacactaatgggagttcccgagatgctcgggtttgagcagggagcaggcagagctgcagtcagagacattagaaaaccagtctgaattgggtctgtctttgagatgcccaggccagcagaaagcagctcagaagtattgttgctcatggtgtggcaatggactgaactgtaatgaaaatgttatttaatctttgtctctgtattttgatacttgaatgactttcccttttgttttactgtatataaaattgttaatctgtctgattttgtctgaattataaacactttgaggtaccaaacataaccaatctgtgcaacaacatagactgacctcagtacccaagagagtgtaaatatttctgggcttccagctttggttttgttattttcataactgtacacaacttagaacagactgaattaataaatgagaagcgacatgaacgcagccttaaaaaa

SEQ ID NO: 3965 - DNA, 8730 bp, Homo Sapiens
  NM_015247
gtgcggttcggaggcggggcaggtgggggcgggcccaggtagcaggtttggctgcgcgggggccgcgcgtcggagtttccccctttctagggtgaggatggttctacacagccacccggagttccttagttgaaaggtgcgccctgctgtgacagaatgtggtaattgtaatctttaacattttcatgtaaaacatatttcctgatcatctttccattgtcttcatggaaaattgataaatatttgtgccttccaactctcgtcttggttgaatgacttcatcttaatacaacatggacaccacgttgctgaaaacatgctttgggactgccactgaatttatcttttgcggttttatgacaaagttattagtagtttcccttttttgaattagtattttgaagttaatatcacaatgagttcaggcttatggagccaagaaaaagtcacttcaccctactgggaagagcggattttttacttgcttcttcaagaatgcagcgttacagacaaacaaacacaaaagctccttaaagtaccgaagggaagtataggacagtatattcaagatcgttctgtggggcattcaaggattccttctgcaaaaggcaagaaaaatcagattggattaaaaattctagagcaacctcatgcagttctctttgttgatgaaaaggatgttgtagagataaatgaaaagttcacagagttacttttggcaattaccaattgtgaggagaggttcagcctgtttaaaaacagaaacagactaagtaaaggcctccaaatagacgtgggctgtcctgtgaaagtacagctgagatctggggaagaaaaatttcctggagttgtacgcttcagaggacccctgttagcagagaggacagtctccggaatattctttggagttgaattgctggaagaaggtcgtggtcaaggtttcactgacggggtgtaccaagggaaacagctttttcagtgtgatgaagattgtggcgtgtttgttgcattggacaagctagaactcatagaagatgatgacactgcattggaaagtgattacgcaggtcctggggacacaatgcaggtcgaacttcctcctttggaaataaactccagagtttctttgaaggttggagaaacaatagaatctggaacagttatattctgtgatgttttgccaggaaaagaaagcttaggatattttgttggtgtggacatggataaccctattggcaactgggatggaagatttgatggagtgcagctttgtagttttgcgtgtgttgaaagtacaattctattgcacatcaatgatatcatcccagctttatcagagagtgtgacgcaggaaaggaggcctcccaaacttgcctttatgtcaagaggtgttggggacaaaggttcatccagtcataataaaccaaaggctacaggatctacctcagaccctggaaatagaaacagatctgaattattttataccttaaatgggtcttctgttgactcacaaccacaatccaaatcaaaaaatacatggtacattgatgaagttgcagaagaccctgcaaaatctcttacagagatatctacagactttgaccgttcttcaccaccactccagcctcctcctgtgaactcactgaccaccgagaacagattccactctttaccattcagtctcaccaagatgcccaataccaatggaagtattggccacagtccactttctctgtcagcccagtctgtaatggaagagctaaacactgcacccgtccaagagagtccacccttggccatgcctcctgggaactcacatggtctagaagtgggctcattggctgaagttaaggagaaccctcctttctatggggtaatccgttggatcggtcagccaccaggactgaatgaagtgctcgctggactggaactggaagatgagtgtgcaggctgtacggatggaaccttcagaggcactcggtatttcacctgtgccctgaagaaggcgctgtttgtgaaactgaagagctgcaggcctgactctaggtttgcatcattgcagccggtttccaatcagattgagcgctgtaactctttagcatttggaggctacttaagtgaagtagtagaagaaaatactccaccaaaaatggaaaaagaaggcttggagataatgattgggaagaagaaaggcatccagggtcattacaattcttgttacttagactcaaccttattctgcttatttgcttttagttctgttctggacactgtgttacttagacccaaagaaaagaacgatgtagaatattatagtgaaacccaagagctactgaggacagaaattgttaatcctctgagaatatatggatatgtgtgtgccacaaaaattatgaaactgaggaaaatacttgaaaaggtggaggctgcatcaggatttacctctgaagaaaaagatcctgaggaattcttgaatattctgtttcatcatattttaagggtagaacctttgctaaaaataagatcagcaggtcaaaaggtacaagattgttacttctatcaaatttttatggaaaaaaatgagaaagttggcgttcccacaattcagcagttgttagaatggtcttttatcaacagtaacctgaaatttgcagaggcaccatcatgtctgattattcagatgcctcgatttggaaaagactttaaactatttaaaaaaatttttccttctctggaattaaatataacagatttacttgaagacactcccagacagtgccggatatgtggagggcttgcaatgtatgagtgtagagaatgctacgacgatccggacatctcagctggaaaaatcaagcagttttgtaaaacctgcaacactcaagtccaccttcatccgaagaggctgaatcataaatataacccagtgtcacttcccaaagacttacccgactgggactggagacacggctgcatcccttgccagaatatggagttatttgctgttctctgcatagaaacaagccactatgttgcttttgtgaagtatgggaaggacgattctgcctggctcttctttgacagcatggccgatcgggatggtggtcagaatggcttcaacattcctcaagtcaccccatgcccagaagtaggagagtacttgaagatgtctctggaagacctgcattccttggactccaggagaatccaaggctgtgcacgaagactgctttgtgatgcatatatgtgcatgtaccagagtccaacaatgagtttgtacaaataactggggtcatcgggaaaggcaaagaaactgaaggcagagtcctaacgttgcatcttattcgagctggcagttctgttcacgtccattgccggcaatggatgtctttgtggtgatgatccttcagaaaaggatgcctctgtttaaaaacaaattgcttttgtgtccctgaagtatttaataagaagcattttgcactctagaaagtatgtttgtgttggttttttaagaagtctaaatgaagttattaatacctgaagctttaagttaagtgcattgatcatatgatatttttggaagcatacaattttaattgtggaagtttaaagcctcttttagtccattgagaatgtaaataaatgtgtcttctttatggaccaaggatatgaaatcatttttcttttgtagctaacggttgccttgaggaagaaataatttggttttattaagagtctactctcaatccagttattagagatgtactgagtttgatttgttaatcctttctatatactgctgatcttgcatgtctacaatctgctcagtttttctgtgtttctgcaatagtggtcagaaaaatacttaaattcccttaatggtgttgttttctatttgttctggttttgagataaatgagtgattctgtccccaaatgtccatttttgaagtgattttcctggaggattagggtatttagcagttgaagctcttcattcatagtagttactgtcagctaacaggttttttaaggcttttaactattaatattttatggaatggggcaaagtaaattgatgaaagaattggagtgataatagtcctttacaaacatacagtccataagaaaatgaatttggcatatagaattattacaatttcctgggagagatggatatttaaacctctattattttagacaagactgtctagaacttaagtttgatctgtcagccagtactcccattaaattcagtgtagtttcacttgatagaatcagatatgttatcgaaatgttagcagcagcttcatcctccttctgattaaagtaagtagaaatgggatgttttgtttaataacagccatagtgtgtgtttagaccacagcggatgttgtagaccaggaccatagatgatacatgtcagtgctgtggaatgtgcattctctgagtgttgttttgtggtatcattgtctttcctgaatgactttctaactgtgcagaaaggcagaaaagtcatcatatgtatatgtcatatgactttataaaatatttaatgtgacaaaaagtggaaagaatctttacaaaccctgcaattacttttttaaaggcacttttactctttggttttatcattccattttgctaatatttactagctttataaattacagtaaggtacaaaaactcatcttgtaatattttcatttttgaagtgaaaaagtacatatattttgcacaaggttttatactgctaagtgcttggttggggtggtgagatgatgattagatcaggggtgaggctgagagactctgggtttagggctagccctgcctccatctcccttgggtaaaatgaagggtgtggggtaaaagatgcataaggccttttctagctctgacagcctagaagtccaatcaccctgtaataaatatgtgttgaatgaagaaatgggtgaatgagcttgtcaatgtgattttaaaaaattgactacctggaggaatgattaggaatctaaatgaagccagccctcggtatctgcaggtttctcatccatggattcaaccaactgcaaatggaaaatacgattttttttaaaaaaaggatggttacatccgtattgaacatgtacagacttttttcttgtcattattctctgaacaatacaagaactctttatgtagcatttacatttattaggtattataagtaatctagagattatttaattaaaatatacaggaggatgtgtgtcagttatatgcaaattctgtaccattttgtatcagggaattgagcatcttcagatgttggtatctgcagggatcctggaaccaaacccctgcagatactaagggctgacgatctaggtaagactggatttaacagttggaaaaaaaaaaaaaaaaggagagagaagacagttcctttcctgtagaaattaaaacaaaatacaaattgaggaagctctgctacccaggctgtcatggtagagaacttgaagaagacctgtttggatggacacctggtttcaaaagtcaggtgtggagactgttaaatgggagggcctcatccataaatgatttctggcaacgtcttcttcaggtggagcttgacgtctttttaatgttacttggggagggagtgctcattaagggatgccagggccagctctggtggttcctggggaggctgcgtccttccctgcttctgcatgtcatgaggcagcaggaaggtttcccctgcacctgtctgtcctggctccctctgggtagccccctactgttctgtgcttcagcacagcctggtttgtcaagaggcacatagttggggctgggctgcatggcacaggggcttatgtgcctgctggttatttaattttcagccttaagttttctttaatattttcctgttggctatttaaaggttttggttatcttttattccttatctacaatcaagatgacaatgtaattgaattatcttatttataacacggttcgtgattcatgattcatgattacaagtagaaaatatgtcatgttcctcacctccaaataaatatgtgtgtgtctgtgtgtgtgtatatatgtatgtggcggagagggagagagtggggaaggagagcagtgttatcatacatagagaggctaaatgtgtcccatccctcactgtcagctttataaaggagtttgactccatccacagaagaatgttttataagactaggaaaacacgttgaaaactaggataaacagcaacaaaaatcaactaaatatgttgttactgttgctaaggattttctccttagaataatttaggatttttaaaaatttctgtttgccaaatgctgtagataaatggccagattcttcctatccctaggattcctttattattttttttcacagattttgagaacaagggggagagatagtatggaagattaagattccattaatcttatagaactgtgttgtcacccaaattcctgcttgtttgaacatggcatcttcatagattcaggattcactaccctctatagctggatcttgaaaattatctggccagataattttgcatctgcttggatgattgtagactgagatgtgagtggaggataaagtattagacttttgctgagtaactgccaaccaagaagtatttatcggacacttactaggtgcctaggattgtatcagagggaatatgaaatgtgtccctgccctacctagttttaacgacagaatatctattaaaggctacttagctgaagggtaagggtgacaggtctaggggaagctttgggaggtggtgtgctgtgacagaaaaagtggcagagtagggacgagagacctgcattctagccctgtttctgtcacttgctctgtacacttagacaacagcttgacctcttgagctttagtttcctcctctgcataatgagagggttagactactgaattgtatgggaaaaaaatacaaattcctgggtcctaggccatgcctgctgaatccgactgttcaggaagaggcctaggaaatctgtgagggaatccccaggggaatctcgtgaccagccaggtgtgaaatctgctaactggaagatctcaaagcttccttcactttttgtgattttgtggtcatgtaacgttactgtattattctacgtaaatgtgggtacttggatgtttatcatactgtttctctgtgtttacatactaatttgtgtaagaaatgcattttagtctgtgtacctcaacctgctgtttgtttcctagaggtgttagtagtctttaaatacaagtaagacttaagaggatatttgatgttatttacctggatattttcttccccttttatttatttagaggaaattgagattctaggagccaaaaaaatgaaaacaaaattctaaggcaaagttaaagaaaaaaattacattatttcttaccatttgctactttataatgaaaatttaaaaattatatgggaagatttttctctgggataacaaatccttgtcataaagtaagaggtctttttaaagtaggtaggctataaggcctgtaatttaaaataatactcctttctctagggtttggtgcaattctccattaatgaagataacatttgaattccccaaagcaggtgaggagtcggggaggagaaagcgatgttaaaatgaaaactcactgcaaaagaggaggcagaggaagaaggaatgtaaaccccttaaagcagatgtgtgtggggccttatgaagaccaggattctgcgggtgtcaggggattgcccctcttgacagagactagggttttagactgaggcttcctgcagggtgttcgcattgcccttctccgttccccttcagacctttctggggagaagaggtgggaggaggggagaaagactgttcatcttattctgaatcctggagcagctgaaggttttctcttgagtcaggatgcagtggtaatgcattaaccagcaagtgtggccaaggataatgaaaaagtgggaaaggaaggtcctcctcctccctgattgtagcatccagcagtctctgtagccaggttactcaagaaccacatttgatttcctggccctttgccttggcagtgatggcatttttatttcactgtgttttaaagtcttcatttatttttataacatgggttagggagaagggccacaaatggagggattgtcctttcaagcaccacagcttcagataaaattagtactttcaaatattgtccactttaacttaaaaaattctagagggattatattggagactcaactgcccttggttttagtttataaaatggcctagtactgtggaattttaattttagaaagtcttagcatcagatcataaacattcattaaaagaactcacatcccatctgaaacttcccaggggagttgggattcttagtagattggtagaaaggggctcattttctactgcatttcccatttttggtatcttgttcagcatgttttatttttatttcttgtctgcagaacatcctatatttatgagaacattctttaagaagaccaccacatagaataccccttcctatcagctcgctctgatttagccttaattttgttaaattttttagagatgaatgaagtgctgctgtggaaagaaatgtacatatactatttctgtatcattaaaattacatttttatggttcaaaaaaaaaaaaaaaaa

SEQ ID NO: 3966 - DNA, 4866 bp, Homo Sapiens
  NM_015251
ggcggccgtgcgggagccatggcggcctcggaggcggcggcggcggcggggtccgcggctctggcggcgggtgcccgggccgtcccggcggccacgacaggagccgccgccgccgcctcgggcccgtgggtgcccccgggaccccgactgaggggcagccggccgcggcccgcgggggcgacgcagcagcccgctgtccccgcgccgccggcgggggagctgatccagccgtcggtgagcgagctgtcccgggccgtgcggaccaacatcctgtgcaccgtgcgcggctgcggcaagatcctgcccaacagccccgcgctcaacatgcacctagtcaagagccaccgcctgcaggatggcatagtcaatccaacaataagaaaagatttgaaaactggaccgaaattctactgctgtccaattgaaggctgccccagaggccctgagagaccgttttctcagttttctctcgtaaaacagcactttatgaaaatgcatgctgagaagaagcacaaatgtagtaagtgcagcaattcgtacggtacagaatgggacctgaaaagacatgcagaggactgtggcaagaccttccggtgcacatgcggctgtccctacgccagtagaacagcactgcagtctcacatctaccgaactgggcacgagatacctgcagaacacagggacccacctagtaagaaaaggaaaatggaaaactgtgcacaaaaccagaagttatccaacaagaccattgaatcattgaacaaccaaccaatccctagaccagacactcaagaactagaagcttcagaaataaagctagaaccatcttttgaagactcttgtggctctaacactgacaagcagactcttacaacaccaccgagatatcctcagaagttgcttttaccaaagcccaaagtggctttggttaaactacccgtgatgcagttttctgtcatgcctgtctttgtgcctacagccgactcctcagcccagcctgtggtgttaggtgttgatcagggctctgccacaggggctgtgcacttaatgcccttgtcagtaggaaccctgatcctcggcctagattcagaggcttgctctcttaaggagagcctacctcttttcaaaattgctaatcctattgctggtgagccaataagtactggtgttcaagtgaactttggtaaaagtccatctaatcctttacaagaactagggaacacgtgtcaaaagaatagcatttcttcaatcaacgtgcagacagatctgtcttatgcctcacaaaactttataccttctgcacagtgggccactgctgattcctctgtgtcgtcttgttctcaaactgatttgtcgtttgattctcaagtgtctcttcccattagtgttcacactcagacatttttgcccagctctaaggtaacttcatctatagctgctcagactgatgcatttatggacacctgtttccagtcaggtggggtctccagagaaactcaaaccagtgggatagaaagtccaacggatgaccatgtacagatggaccaagctggaatgtgcggagacatttttgagagtgttcattcatcatataatgttgctacaggtaacattataagcaacagtttagtagcagagacagtaactcatagtttgttacctcagaatgagcctaagactttaaatcaagatattgagaaatctgcaccaattataaatttcagtgcacagaatagtatgcttccttcacagaacatgacagataatcagacccaaaccatagatttattaagtgatttggaaaacatcttgtcaagtaatctgcctgctcagacattggatcatcgtagtcttttgtctgacacaaatcctggacctgacacccagctcccatctggcccagcccagaaccccggaatcgattttgatatcgaagagttcttttcggcctcaaatatccagactcaaactgaagagagtgaacttagcaccatgaccaccgagccagtcttggagtcactggacatagagactcaaacggacttcttactcgcagatacctctgctcagtcctatgggtgtaggggaaattctaacttcttaggccttgagatgtttgacacacagacacagacagacttaaactttttcttagacagtagccctcatctgcctctgggaagtattctgaaacactccagcttttccgtgagtactgattcatctgacacagagacccaaactgaaggagtctccactgctaaaaatatacctgctctagaaagcaaagttcagttgaacagtacagaaacacagaccatgagttctgggtttgaaaccctggggagcttgttcttcaccagcaacgaaactcagacagcaatggatgactttcttctggctgatctggcctggaacacgatggagtctcagttcagctctgtagaaacccagacttctgcggaaccacacacagtctccaacttctaaaactaacggtggagtccatgtgtgaaatggcatctaccatttcctctggattaaaactacggactggggacaacagtattaattcgattgaatgtggctgatgatgcagttgcttagcttctttgtgtttctttgccttttgtacttgtaaacagaaatttgcgtataaatgtgagtgtattataaagtttgagatgttgatctaaattgtttttgtgttgcctacatttgccttttcacagctagtcttttcatgttaaaaaaaaaaatgtatttcatatctataaaacctatatagccatttagctgaagcccagcttaccaggttcaagggtacaaacttctcaaatcttcaaaacattttagtcaaagtgtaatatacttaaactgcacctaaaatatctttggcactgcttgttagaaattcctgattcctgttactaatcactaaagaaaccggatgctgccaccgtaggatttaagcagtagtgcttccatgctcttaagactcctgctgcctggaccttcgtcagctttgacacctcttttctgatttaaagacaccaaggaaaactacaactgtctttagctttgaagcagttttcatgtaatcattgccacctcttcgctacatgaactactattgataccagcatacaagtgtacagcactttacacacaagaggtttattgatgtaaaattatcggctagggaagcagcagcgggccaggtgtggtggcttacccctgtaatcccagcactttgggaggccaaagcaggacgatcacttgagcccaggagttcaacaccagcttgggcaacgtaagaagaccgtgtctctggaatttttttttttttttaattagccaggcacagtggcatgcgcctgtgatcccagctacttggaaggctgaggtgagaggatcactcgaggagattggggctgccatgagccatggtcttggcactgtactccaacctgggtaacagggcaagaccctatctcaaaaaaaaaaaaagtcgccagcaacaagcacgtagtgtagtgttcctgctaaatgagcgtaggttatccaaaccttgggaacagggagttatggaaacatgcctatgacttcatcttggggtgtgtcctatgaagatcctttctggtctccacagtaggccagagttgggggctctggagctgtttccccaagtgcatccacaagctggatctgagttttgtcactctaaaattaaacaagaaaaaaagtgggaaaagggcatcccccattaggtttcaatactttgcacttctactaagcttgatagggcaggagtgcaatctacaattattttaaagtgaatttccttccattcaccattctttatcttttctttgaataagaaaaagtatctagcaaggatattacttgtgccttgaggctagcaattataggatagattcatctaaaatatggtattctgcattttggttttttttcttaagtgaataataccagtcttcaaagaaaacaaggtgaagacctattgcttcaataatcaagaatgctttgtgtgttttgaggtaggagcatgatcaagtatgctttggggattttctgtatttaggagatcctggattcttaattgttggctaagttccagtcaagtaggaatcagtgcagcctgtaagttctccacattgacacacacacacacacacacacacacacacgacatgctcctttctgtggcacatgcctgtattactgaaagctaaatcctcaaaacctagtaaggggactaatgattcattaaagtaaattgatggttttgctactaattcctatcccatacatttgacacaaaagaagtgttggtaatggataaataacatatcccgggcagatgagctcaacctagtaggtaagagtttggtttggtcacagttgcctatgagtgtgggtttcaaaagaaacataaagccttaacttagaatttcattatgttttagaatcatcactgccttaatattcaagcatctatttaagtcctaataaaggagaaatgcatgtttatggcttttttgtaaatataaatgcagtgatctatggcttaaaaaatttgtttctgtgacaatgtttgtaaatctagccaatagagtcatttacagaagaaaaatgagcatgtaataatacaagaactgtttccccctcaaaacctgaacctgaattatttgtaaaaactgaaatttaatgattaaagagaagccagaattgtacccttttttgtgaattcttgaacgtactcataaatatgacttattgtattgccttaagttttcactcattgtcttttgaaagccatatgataaaatgattttatttaat

SEQ ID NO: 3967 - DNA, 5177 bp, Homo Sapiens
  NM_015252
gggcgccgtccgcctgaggggctgcagatcccggctaccgcgagcgccgtggctggcttggctgttccatgtggctccggcggggatggaggactcggtggcggcggcggctgctgctgcggcggcgacggaggagcggctatgagaagggaacggggccagactcagcccgacagcgggattagagccctccagaatacccatcatatagcccctgaggtggcatggtgatgtctccatgagggaaccccttcccactcatcctgtcacgtatatcatagtgttcttgactgggccattcatctaagatgggatttaccctgtgaaacagggagaagacttatggaccccaagcatcatttcgagttgtagttgagtttttaaaagacatacatgcaaagttcctttgctttggaccctctgcattattaaagctgctgtattgctaacccagaactgctccagtgtcttgactgatcatcatggcttcagtttggaagagactgcagcgtgtgggaaaacatgcatccaagttccagtttgtggcctcctaccaggagctcatggttgagtgtacgaagaaatggcaaccagataaactggtggtagtttggaccagaagaagccgaaggaagtcttctaaggcacatagctggcaacctggaataaaaaatccctatcgtggtgttgttgtgtggcctgttcctgaaaacattgaaatcactgtaacactttttaaggatcctcatgcggaagaatttgaagacaaagagtggacatttgtcatagaaaatgaatccccttctggtcgaaggaaagctcttgctactagcagcatcaatatgaaacagtatgcaagccctatgccaactcagactgatgtcaagttaaaattcaagccattatctaaaaaagttgtatctgccgctcttcagttttcattatcttgcatttttctgagggaaggaaaagccacagatgaagacatgcaaagtttggctagtttgatgagtatgaagcaggctgacattggcaatttagatgacttcgaagaagataatgaagatgatgatgagaacagagtgaaccaagaagaaaaggcagctaaaattacagaaattgtaaaccagttgaatgctctgagcagcttagatgaagatcaagatgactgcataaagcaagcaaatatgcgttcagctaaatcagccagttcctctgaagagcttatcaacaaacttaactttttggatgaagcagaaaaggacttggccaccgtgaattcaaatccatttgatgatcctgatgctgcagaattaaatccatttggagatcctgactcagaagaacctatcactgaaacagcttcacctagaaaaacagaagactctttttataataacagctataatccctttaaagaggtgcagactccacagtatttgaacccattcgatgagccagaagcatttgtgaccataaaggattctcctccccagtctacaaaaagaaaaaatataagacctgtggatatgagcaagtacctctatgctgatagttctaaaactgaagaagaagaattggatgaatcaaatcctttttatgaacctaaatcaactcctcctccaaataatttggtaaatcctgttcaagaactagaaactgaaaggcgagtgaaaagaaaggccccggctccaccagtcctctcaccaaaaacaggagtattaaatgaaaacacagtttctgcaggaaaagatctctctacttctcctaagccaagccctataccaagtcctgttttggggcgaaagccaaatgctagtcagtctttgcttgtatggtgtaaagaagttacaaagaactaccgaggagtaaaaatcaccaattttactacatcgtggagaaatggtttatctttttgtgcaatattacaccactttagaccagatttaattgactacaagtctctgaatcctcaagatattaaagagaacaacaaaaaggcatacgatggatttgccagcataggaatttcccgattattggaaccttctgatatggtattattagcaattcctgataaactgactgttatgacttatctctatcaaataagggcacatttcagtggccaagaactaaatgtcgttcagatagaggaaaacagcagtaaaagcacatataaagttggaaactatgaaacagatacaaacagttctgttgatcaagaaaaattctatgcagagcttagtgatctgaagcgggagcctgaactacaacagcctatcagcggagcagtagacttcttatcacaggatgactctgtatttgtaaatgatagcggggttggagagtcagaaagtgagcatcaaactcctgatgatcaccttagtccaagcacagcctccccttactgtcgcaggactaaaagtgacacagaaccccagaagtctcagcagagctctggaaggacttcaggatctgatgaccctggaatatgttccaatacagattcaacccaagcacaggttttgttaggcaaaaagagactattgaaagctgagactttagaattgagtgacttatatgttagtgataagaagaaggatatgtctccaccctttatttgtgaggagacagatgaacaaaagcttcaaactctagacatcggtagtaacttggagaaagaaaaattagagaattccagatccttagaatgcagatcagatccagaatctcctatcaaaaaaacaagtttatctcctacttctaaacttggatactcatatagtagagatctagaccttgctaagaaaaaacatgcttccctgaggcagacggagtctgatccagatgctgatagaaccactttaaatcatgcagatcattcatcaaaaatagtccagcatcgattgttatctagacaagaagaacttaaggaaagagcaagagttctgcttgagcaagcaagaagagatgcagccttaaaggcggggaataagcacaataccaacacagccaccccattctgcaacaggcagctaagtgatcagcaagatgaagagcgacgtcggcagctgagagagagagctcgtcagctaatagcagaagctcgatctggagtgaagatgtcagaacttcccagctatggtgaaatggctgcagaaaagttgaaagaaaggtcaaaggcatctggagatgaaaatgataatattgagatagatactaacgaggagatccctgaaggctttgttgtaggaggtggagatgaacttactaacttagaaaatgaccttgatactcccgaacaaaacagtaagttggtggacttgaagctgaagaagctcctagaagttcagccacaggtggcaaattcaccctccagtgctgcccagaaagctgtaactgagagctcagagcaggacatgaaaagtggcacagaagatctccggactgaacgattacaaaaaacaacagaacgttttagaaatcctgttgtgttcagcaaagattctacagtcagaaaaactcaacttcagtctttcagccaatatattgagaatagaccagagatgaaaaggcagagatcaatacaggaagatacaaagaaaggaaatgaggagaaggcagcgataactgaaactcagaggaagccatcagaagatgaagtgcttaataaagggttcaaagacaccagtcagtatgtagtaggagaattggcagcactagagaatgagcaaaagcaaattgacacccgtgccgcgctggtggagaagcgccttcgctatctcatggacacaggaaggaacacagaagaagaagaagctatgatgcaggaatggtttatgttagttaataagaaaaatgccttaataaggagaatgaatcagctctctcttctggaaaaagaacatgatttagaacgacggtatgagctgctgaaccgggaattgagggcaatgctagccattgaagactggcagaagaccgaggcccagaagcgacgcgaacagcttctgctagatgagctggtggccctggtgaacaagcgcgatgcgctcgtcagggacctggacgcgcaggagaagcaggccgaagaagaagatgagcatttggagcgaactctggagcaaaacaaaggcaagatggccaagaaagaggagaaatgtgttcttcagtagccatcagatcagaaagaatctctcccaacattttagagtcttgcttcccaaaccagaaaaagtcagactcattgttgatttaaaacttttaacattttgtttggctggattgtactactttacctctactttaccaccaccacccttttcctccctcctttccaaataatatacagaactccaaaatagcttcatttaaggatttttttgtgagttaacaatttccttgaaatcctgtgaaatagatttgcacagacaccttgtgagtgattggtattggaggtgttcaagaaactgttcgaaaaagaacaaaaacacttccctcgttattttctctcattttttgatgagaggaaaatttgaaacattattcttgttgttgttggtaatagcataatgacagtgggaggggtacaaggggataagaaaaatgtcatgatttttttccggtcctgccacatgtaacacttactctgttacctaaattttatagttagatcatatccaatctacttattaaactgtgttctatttaccagtggagtttttctgcagtggttgcgtttcactgtaaggataatggagttcctctcctctgctttcctcagaggatggtcctttaacatagccagaaacaagccctgtggtttgaaggtgagctgtgaggatgggactaattgatatgcaccagtttacaaagacagtcttatcatccgagaatacaccatctttttctctggataattatttcttacatcatgcttgattcctacattttgttgggtctcaacattggctcacgaatgctgttaatatttattctgtattgataaaaagtctgtcttgccactacaagtaaatcccccatttaatattttcttctttagcatagcactgtcattttttgtgaaaatggttatgtttatttattacaatactgagtcatatataaattttcaataaaagcagaaactttcttaccttaaaaaaaaaaaaaaa

SEQ ID NO: 3968 - DNA, 5413 bp, Homo Sapiens
  NM_015257
agttgctggggtaaggcacgtgaggaggaggtggcttgaggcaaccatggcgggaggaatgaaagtggcggtctcgccggcagttggtcccgggccctggggctcgggagtcgggggcggtgggacagtgcggctactcttgatcctctccggctgcttggtctacggcacagctgaaactgatgtaaatgtggtcatgcttcaggaatcccaagtttgtgaaaagcgtgccagccaacaattctgttacacaaatgtgcttatcccaaaatggcatgatatatggacacggatacagatccgagtaaatagttccagattggttcgagtcacccaggtggagaatgaggagaaactgaaggagctagagcaaagtcaaattttctactactctactgggatgactgtgggaattgtggcctctctgctaatcatcatttttatactatctaagtttatgcctaagaaaagtcccatttacgtcatcctggtgggaggctggtctttttctctgtacctcattcaactagtttttaaaaatttacaagagatctggaggtgttactggcagtatcttttaagttatgtcctcacagttggattcatgagttttgcagtatgttacaagtatgggcccttggagaatgaacgaagtatcaacctgctgacctggaccttgcagctgatgggcctgtgtttcatgtattctggcatccagataccacatattgcccttgccattatcatcattgctctttgtactaagaacctggaacaccctattcagtggctgtacatcacctgcagaaaggtgtgtaagggagcagaaaagcctgttccccctcgtctcctgacagaagaagaatatcggatacaaggagaggtagaaacccgaaaggctttagaggagctccgagaattttgtaacagtccagactgctctgcttggaagactgtttctcgaatccagtctccaaaaagatttgctgactttgtggaaggctcttcccacctcacgccaaatgaagtttctgtccatgagcaggagtatggattagggagcattattgcccaggatgaaatctatgaggaagcatcctctgaggaggaggactcatattctcggtgtcctgctatcacacagaacaactttctaacctaggtagtggtcagttatctttacgtggactggcttggtgccttggtccatgttgcatgtgttgtgcaattgctttcaaccctttgaaacagagtgagatagatagggtagaaattctcctactgaaataagaggcctaaaaaggcctccctttggaaatgggaggtctctatgggatccctgaggaaggagagtggataaagtagtgaatgctgggtagttcacttcccattggttaagctaacagcccacttttatgtttccagagaaattggatggccacagctagcatggcattctagctccttcttgaaagttgattcaatcatggcatttctgtcactggctggctctccaaagtaagaactgttgttaagtgcaggaatgcttttagactataggctgcaacttccagagagaaatccacaaatctgagcctccttcactccagcttttatttcagtgactttagaataattattgatttaactgttttgggaggaaaatagatttttattgttttgttttttaaatgaatgtcttttaaaaaacataacaaactcatgttccagaaccagcaagtgctccagagtgacacaccccctaggcccctacatatttattaatatggattatccattaaagccccaggagctgttgttttaagctttgatttagttctcatacatatgatagaaagtcctatttgcctttaggaacatgcctgtaggctcttctgcaggtgagatgtactgggctttttattatattcaactttcaattccatcttaaaaaacatttgtattcttctcttcccattcttccttaccctgcctttgccctttcaggaagggtcagttcccttacctgtgaactatgtatgttcagagtagcattattcctgctagctaggagaagtcatcttgtttaggggatttggatgctttttatacgttctccattttcctgtcattgggtcatgttatctttgagttgctatgaaatcaggaaactgtctccttttcctttcccttcctttgtctacatgctctgtccattcctttcagccttttctcaccacccatactcccccaaatctgggtaatttttaagccttgaaactatgtagtttcttgatacacaatttgtagttatgcagcagccacaatttgcattgccaggaaataggctccaggttatcttcatgcctctgggtgctcattcagctgtcaagtttccatgaacttacacttatttatgattgcgtttctgacctgagatgtatgctgcctgttattgcagtagcattagtttcagattcttttgccattgcaaagtaccccttataaaccagcaatgtcatctgtgaggaagcaaattctcaagtgtctgtcatttacttggttctttttctttgtggtcttcacccttataccctggaaaagtctgtaattaccttagccaggaagatagatggtcatggcaagcgcacagcaccagacttactggctcaccaagatgatggaaaaaggcagatgattttttaaaaagccgtaatgactcctttagaccagccatttagcgtggtaattttgaaaggcctagctccattgcagacttccaaagggtcagctctgagactgccctccaggtgggcagttgattatttccaccagtgttttccagagccttaaactgtcctaagtgacaactacctcagttggcaggaaagagacatatagtagaaagtgaaaaatgagcagtatttgggcagatgctatgggttacagttgaagggtaaaaggaactttacattgggaaacctttatacccttgtgaattatgtacatggtaaaatgttctctctctacaaagaactattaaaacttctgaaatatactattttttaccttatttatagaaattgagacctagcatatttaagcataagtttattttaaaaaataattcaactcgtgcaagtggtctcaggattctctggagattttggtgcctcccctacttagggaggtgatagcttgcctataagggtgacttttcctgatcatgtctttatttcaatgagaaagcactgtgaaattgtgaaagattctcctctttctctgtttaataaacccccatgaaatatagtttccatctctagaccagttttttttccaccgtgtttagacttgaggtgaataaaatcaaactgttttttactccctatctggtagttggagacctgagctgtaggcagtggagatggcaattggttctgcagcctgagagttgctctcacacagtgaaggacggtgctgctctggtgtgctgtgtgtccttgccctgcctgcctgtggctctgcccagatgcttcagatcctctgtgttccggagattgcttgacttcaaccttctttaggagctgctcttgtctccctcttggccacttagtttgctggctcagtcactacttgaagaccccatttaatttttctctggcagttatagctcttgtgatttcagtacagtctcatctctcagaccaatctcatcaagaaggattgaagggataactatgaggtaagctggacattggagccgtgtttgctgccacgtcagcgtcttgctgggtgaatgtcaagccataaatgggctccagggctctggatctcatcagcattggaaatctattgcctctcatcagtctgaccaaattatgtagagcattaatgtagagactcccattaatgggaatacaagaggcagctggcataaaacatttctttcactttcctttcccactcagattgcttcaagagaccaacagaacacagggatcaaaaacaaggaaaatttagcaacttcattaccttctaataagtaattcctgttagccactgcatcccaccaaaactagtttatttttcccctcaaattcatgatttttacgtctgttacaaagggaattttgctgatagctctttgggtcccactgttccattttatgctaatagattccattctagggcccagccgtctcttgactgatggtgttccctttaacccttggcatgtataatagaattttggtgaatgaaagaacccaaataggccagatagtccccccaggccctgatatccataaaaggcttgggaatgcattatgtaattgtccttagtctttttgttgttttagaaaaaaaaaacaagatgggctcagatggatgcctacgtaaaaatggttcctagctgtgtactcataacttttctttgaattgagtagtgaaaggaaggaggaggaaaggaaattaaatgtccttctagtattctctggactcaagtctgacatatgagataataacctatattgaaatgccaagaattgtatctgaaacaagagaacagtttgacacatttatcatgccttcatattacatattaactgaaaccaattaataaacatatgaaatatccattgcacaaggcaaaggcacctaaaccttttgtttctttttctacatagcagaaattgattttttttttatttttttaggggaacctatataattatgacccagtgatgtcttttggtgacttaagcttatgaattcaggttacaattgagttgattctagatggttactaccttgaaaaggatgttggtgccttatgtgacacgagccagagcctgctgggaataaacaaagcagattcatgccaacaccaactcgtagctttagtggcagatgggagtggtcacagactcccaaaatgtggggctttggatttccacaccatcccacgtgtgtgtcatcttcctctttcacactcttgatgataatttgaaaatggtgaaatcacctctgaatttgcctatagcatgagcacattcttatgacaacataacaaatagttcataatgtgaatattagaaactgttacagcctgcagttaccataattttccatgtttgtggaattgatattgaaatagcagggctaaggaattactggcaagttttagcctgtgggtaataccttagggttatttaaatatttgtaattttatttaaatgttcatgaatgtttgaaaggaacaaaattatcagggatggctctttgccatgggtcttattttcaccctcttttctgtaagaaaaaagaacaatgtcttaatgtatttttaaagtttttggtatagtttctaattccaattttaataaaagttttatagataaaaaaaaaaaaaaaa

SEQ ID NO: 3969 - DNA, 4336 bp, Homo Sapiens
  NM_015258
agttcgccctgccggaaagcagcacgccgccgcggcattttacgacgtcggcggtgacaggccctgggactctgggaatacccagcttcctccccgcaacccggtgaaagccaacgcaatgttcggtgcgggggacgaggacgacaccgatttcctctcgccgagcggcggtgccagattggcctcactttttggactggatcaggcagctgctggccatggaaatgaatttttccagtacacagccccaaaacagcctaagaaaggccagggaacggcagcaacaggaaatcaggcaacaccaaaaacagcaccagccaccatgagcactcccacaatactggtcgcaacagcagtccatgcatatcgatacacaaatggtcaatatgtaaagcagggcaaatttggtgctgcagttctggggaaccacacagccagagagtataggattcttctttatatcagtcaacaacagccagttacggttgctaggattcatgtgaactttgagctaatggttcggcccaataactatagcaccttttatgatgaccagagacagaactggtccatcatgtttgagtcggaaaaggctgctgtggagttcaataagcaggtgtgcattgctaagtgcaacagtacctcttccctggatgcagtgctctcccaggacctcattgtggcagacggccctgctgtagaagttggagattctttggaagtggcctataccggctggctctttcagaatcatgtgctgggccaggttttcgactccactgctaacaaagataagttgcttcgcttgaagttaggatcaggaaaagtcatcaagggctgggaggatggaatgctgggcatgaaaaaaggaggaaagcgattgcttattgtccctccagcctgtgctgttggctcagaaggggtaataggctggactcaagcaacggactcgatcctggtgttcgaggtggaggttaggcgggtgaagtttgccagagattctggctctgatggtcacagtgttagttcccgcgattctgcagctccgtctcccatccctggtgctgacaacctctctgctgatcctgttgtgtcaccacccacatcaatacctttcaaatcaggggagccagctcttcgtaccaaatctaactccctcagtgaacaacttgcaataaatacaagtcccgatgcagtcaaagccaagttgatctctcggatggctaaaatgggccagcccatgctgcccatccttccaccacagctggattccaatgattcagaaatcgaagatgtgaacactctgcaaggaggtgggcagcctgtggtgactccgtccgtccagccctctcttcatccggcccatccagcgttaccacagatgacctcacaggcacctcagccatctgttactgggctccaggcaccttctgctgccttaatgcaagtgtcatctctcgattcccactcagctgtatctggaaatgcccaatcctttcagccctatgcaggtatgcaagcctacgcttatccccaggcatctgccgtcacctcccagctgcagcccgttcggcctttgtacccagcaccgctctctcagcctccccatttccaaggatcaggtgatatggcttcatttctcatgactgaagcccggcaacataacactgaaattcgaatggcagtcagcaaagtggctgataaaatggatcatctcatgactaaggttgaagagttacagaaacatagtgctggcaattccatgcttattcctagcatgtcagttacaatggaaacaagcatgattatgagcaacatccagcgaatcattcaggaaaatgaaagattgaagcaagagatccttgaaaagagcaatcggatagaagaacagaatgacaagattagtgaactaattgaacgaaatcagaggtatgttgagcagagtaacctgatgatggagaagaggaacaactcacttcagacagccacagaaaacacacaggcaagagtattgcatgctgaacaagagaaggccaaggtgacagaggagttagcagcggccactgcacaggtctctcatctgcagctgaaaatgactgctcaccaaaaaaaggaaacagagctgcagatgcagctgacagaaagcctgaaggagacagatcttctcaggggccagctcaccaaagtgcaggcaaagctctcagagctccaagaaacctctgagcaagcacagtccaaattcaaaagtgaaaagcagaaccggaaacaactggaactcaaggtgacatccctggaggaggaactgactgaccttcgagttgagaaggagtccttggaaaagaacctctcagaaaggaaaaagaagtcagctcaagagcgttctcaggccgaggaggagatagatgaaattcgcaagtcataccaggaggaattggacaaacttcgacagctcttgaaaaagactcgagtgtccacagaccaagcagctgcagagcagctgtctttagtacaggctgagctacagacccagtgggaagcaaaatgtgaacatttgttggcctccgccaaggatgagcacctgcagcagtaccaggaggtgtgcgcacagagagatgcctaccagcagaagctggtacaacttcaggaaaagtgtttagccctccaggcccaaatcacagctctcaccaagcaaaatgaacagcacatcaaggaactagagaagaacaagtcccagatgtctggggttgaagctgctgcatctgacccctcagagaaggtcaagaagatcatgaaccaggtgttccagtccttacggagagagtttgagctggaggaatcttacaatggcaggaccattctgggaaccatcatgaatacgatcaagatggtgactcttcagctgttaaaccaacaggagcaagagaaggaagagagcagcagtgaagaagaagaagaaaaagcagaagagcggccacgaagaccttcccaggagcagtcagcctcagccagttctgggcagcctcaagcacccctgaatagggagaggccagagtcccccatggtgccctcagagcaggtggtcgaggaagctgtcccgttgcctcctcaggccctcaccacttcccaggatggacacagaaggaaaggggactcagaagctgaggcactctcagagataaaagatggttcccttccacccgaactgtcttgcatcccatcccacagagttctagggcccccgacttcaattccacctgagcccctaggccctgtatccatggactctgagtgtgaggagtcacttgctgccagcccaatggcagctaagcccgacaacccatcaggaaaggtctgtgtcagggaagtagcaccagatggcccactacaagaaagctccacaagactgtccctgacttcagaccccgaggagggggacccactggccttagggcctgaaagcccaggagagcctcagcctccacagctcaagaaagatgatgtcactagctccaccggtccccacaaggagctgtcaagcacagaggcaggttccacagttgcaggagcagccctcagacccagccatcattcccagcgttccagtctctctggggatgaagaggatgaactgtttaaaggggcaactctgaaagctctgaggcccaaagcacagcctgaggaggaggatgaagacgaggtgagcatgaagggacgcccgcccccaacgcccctttttggagatgatgatgatgacgatgacattgactggctgggatgaagacccaggaaactggtgcaaaggtttctctgcaacccttccctaagcatgattttgcacagccaaccctgggtctaggcgaaccacagggtgaggtcaaggtgagcattctgggaacaatatttgggctcagagggtgggttggccaccttctgagccccacccccgccagacctggtgaagaggatcataaccctgtcttcaagaacactgggatttcagcagcaagttggaagaaggactggtaggttcccctccaagccagtcacctgtaagagtcctgtcctctgccagactttttaatctcttcattaactctcagactgacctgggagccctcctctacctgaatccagtgctcaactgtgccccggcaacaagacctgggctgaggtctccctggtagaactaagggagattacaccatctaaatcccagtgcagtcaacagcctggcctatagtcctgggacatgtatcttcttctttgccttaaatctgatacaagaggtcaatgactttgaaaataaaactaaaataaatgtctataatgaaacttg

SEQ ID NO: 3970 - DNA, 3239 bp, Homo Sapiens
  NM_015259
gcgggagcgcagttagagccgatctcccgcgccccgaggttgctcctctccgaggtctcccgcggcccaagttctccgcgccccgaggtctccgcgccccgaggtctccgcggcccgaggtctccgcccgcaccatgcggctgggcagtcctggactgctcttcctgctcttcagcagccttcgagctgatactcaggagaaggaagtcagagcgatggtaggcagcgacgtggagctcagctgcgcttgccctgaaggaagccgttttgatttaaatgatgtttacgtatattggcaaaccagtgagtcgaaaaccgtggtgacctaccacatcccacagaacagctccttggaaaacgtggacagccgctaccggaaccgagccctgatgtcaccggccggcatgctgcggggcgacttctccctgcgcttgttcaacgtcaccccccaggacgagcagaagtttcactgcctggtgttgagccaatccctgggattccaggaggttttgagcgttgaggttacactgcatgtggcagcaaacttcagcgtgcccgtcgtcagcgccccccacagcccctcccaggatgagctcaccttcacgtgtacatccataaacggctaccccaggcccaacgtgtactggatcaataagacggacaacagcctgctggaccaggctctgcagaatgacaccgtcttcttgaacatgcggggcttgtatgacgtggtcagcgtgctgaggatcgcacggacccccagcgtgaacattggctgctgcatagagaacgtgcttctgcagcagaacctgactgtcggcagccagacaggaaatgacatcggagagagagacaagatcacagagaatccagtcagtaccggcgagaaaaacgcggccacgtggagcatcctggctgtcctgtgcctgcttgtggtcgtggcggtggccataggctgggtgtgcagggaccgatgcctccaacacagctatgcaggtgcctgggctgtgagtccggagacagagctcactggccacgtttgaccggagctcaccgcccagagcgtggacagggcttccgtgagacgccaccgtgagaggccaggtggcagcttgagcatggactcccagactgcaggggagcacttggggcagcccccagaaggaccactgctggatcccagggagaacctgctggcgttggctgtgatcctggaatgaggccctttcaaaagcgtcatccacaccaaaggcaaatgtccccaagtgagtgggctccccgctgtcactgccagtcacccacaggaagggactggtgatgggctgtctctacccggagcgtgcgggattcagcaccaggctcttcccagtaccccagacccactgtgggtcttcccgtgggatgcgggatcctgagaccgaagggtgtttggtttaaaaagaagactgggcgtccgctcttccaggacggcctctgtgctgctggggtcacgcgaggctgtttgcaggggacacggtcacaggagctcttctgccctgaacgctcccaacctgcctcccgcccggaagccacaggacccactcatgtgtgtgcccacaagtgtagttagccgtccacaccgaggagcccccggaagtccccactgggcttcagtgtcctctgccacattccctgggaggaacaatgtccctcggctgttccggtgaaaagttgagccacctttggaagacgcacgggtggagtttgccagaagaaaggctgtgccagggccgtgtttggctacaggggctgccggggctcttggctctgcagcgagaaagacacagcccagcagggctggagacgcccatgtccagcaggcgcaggcctggcaacacggtccccagagtcctgagcagcagttaggtgcatggagagggtatcacctggtggccacagtcccccttctcacctcagcaatgatccccaaagtgagaggtggctcccccggcccccaccaccctcagcagccccaccccactcaaccctgagggtccccagggtcctgatgaagacctccgaccccagcgccaggctcctcggagcccaacagtcccaagggggcaggagacggggtggtccagtgctgaggggtacagccctgggccctgaccagccccggcacctgccatgctggttcccggaatgaatcagctgctgactgtctccagaagggctggaaaggatgctgccaggtgacccgaggtgcactcgccccagggagatggagtagacagcctggcctggccctcgggacacattgtctgccccggggctatgggcaaatgcccctccttcttacttcccagaatcccctgacattcccagggtcagccaggacctgttacagccctggtcacttggaactgacagctgtgtgaggcctgcacttctcagacccagacttagaacaaaaggaggagtgaggactcaaggctacaatgaggttccagtacttgttacaagaaattggttttctgcaaaaaaagtccctacctgagcctttaggtgaatgtgggatccactcccgcttttaacatgaaagcattagaagatgtgtggtgtttataaaagaacagttgtcatcaccgggcattgattggcagggacaaggagctgcttgggtgtggaaagttggggcgttggaaagtgggctgtggtgcccatttgcagtgactgtgaagtgactccaggacggacctgcgggggcacccagaggtcctaagccccaggactgagggtcgtgcatcaccactcgggtgtcccgggaggtgccctgggcccggggacctcacaggcaggacggcgacactaatgcagggagagggagtctggccccagcttttcctatcagaggcgattttccttcaccaggggatgggcaggaaagaggcaggggccccagaagcttctgtccctcatgcctgagggcacgggggacacttggaggctgctgtcaccactgtgcgtccaaggccatgctctctgcgggtcagtgcctgagtctcgcctccctgctggtccctgaagccccctcagaagccctgcctgtcacgtcggcatttgtgagacctaccctgtaacgcctgcccctctcagcccaacatcagcttcctctttctcccttgctgtagacaggctggattccagtgttgggacagccatctccagaaacctgacttaagagagtaagatgcaaa

SEQ ID NO: 3971 - DNA, 5129 bp, Homo Sapiens
  NM_015260
ctccgacttcggacatggcgcacgctggcggtggcagcggtggcagcggtgccggcggccccgcgggccgggggctgagcggcgcccgctggggtcgctcgggctccgcaggccacgagaagctgccggtgcacgtagaagacgccctcacctatctggaccaggtgaagatccgctttggcagcgaccctgccacctacaacggcttcctggagatcatgaaggagttcaaaagccagagcatcgatactcctggagtcatcagacgtgtctcgcagctcttccacgagcaccctgacctcattgttggattcaacgcttttcttcccctcggatatagaatagacattcccaagaatggcaagttaaacatacagtcgcctctgacaagccaggagaattcgcacaaccacggggacggtgcagaggacttcaagcagcaggtgccgtataaagaggacaaaccccaggtgcccctggagtccgattccgtggaattcaacaacgccatcagctatgtgaataagattaaaacccgcttcctagaccacccagaaatctacaggtcattcctggagatcctgcacacgtaccagaaggagcagctgaacacgaggggccggccattccgaggcatgtctgaagaggaggtgttcaccgaggtggccaacctcttccggggccaggaggacctgctctcagagtttggacagttcctgcccgaagccaagcggtctctgttcacaggaaacgggccgtgcgagatgcacagcgtgcagaagaacgagcacgacaagaccccggagcacagcaggaagcgctcccggccctcgctcctccgccccgtgtctgcacccgccaagaaaaaaatgaaacttcgtggtaccaaagacctgtccatcgctgcagtggggaagtacgggactctgcaggaattttctttctttgacaaggtccgccgggtgctgaagagccaggaggtgtatgaaaacttcctccgctgcatcgcactcttcaaccaggagctggtgtctggctctgagctcctgcagctcgtcagcccatttctggggaaatttccagaactctttgcacagttcaagtccttcctgggggtaaaagagctgtccttcgcgccacccatgagcgacagatccggggacgggataagccgggaaattgattatgcatcctgcaagcgcataggatccagctaccgggcactccccaaaacctaccagcagcccaagtgcagtgggaggacagccatctgcaaggagcttgaccattggacacttctccagggttcgtggacagacgattactgcatgtccaagttcaagaatacctgctggattccaggatatagtgcaggggtactgaacgacacctgggtctccttcccttcctggtctgaggactccacgttcgtcagctccaagaagacaccgtacgaggagcagcttcaccgctgtgaggacgagcgcttcgagttagacgttgtcctggagacgaacctggccacaatccgtgtgttggaaagtgtgcagaagaagctgtctcggatggcgccggaagaccaggagaagttccggctggacgactccctgggaggcacgtcggaggtgatccagcgccgtgccatttatcgcatctatggcgacaaggccccggagatcatcgagagcctcaagaagaaccctgtcaccgctgtccccgttgtcctgaaaagactgaaggccaaggaagaggagtggcgggaggcccagcagggcttcaacaagatctggcgggagcagtatgagaaggcgtacctcaagtcccttgaccaccaggctgtgaacttcaagcagaacgacaccaaggccctgcgctccaagagcttgctcaacgagatcgagagcgtctacgacgagcaccaggagcagcactcggagggccgcagtgccccctctagcgagccgcacctcatctttgtgtacgaggaccggcagatcctggaggacgcagcagcgctcatcagctactacgtgaagcggcagccggccatccagaaggaggaccagggcaccatccaccagctgctgcaccagttcgtgcccagcctcttcttctctcagcagctggacctgggcgcctccgaggagtcagctgatgaggaccgggacagcccccaggggcagaccacagaccccagtgagcggaagaagccggcgccaggaccccacagtagccccccagaggagaagggggccttcggggatgccccggccactgagcagccacccctgccgcccccagccccgcacaagcccctggacgatgtctacagcctattttttgccaacaacaactggtacttcttcctgcgcctgcaccagaccctgtgctccaggctgctgaagatctaccgccaggcgcagaagcagcttctggagtatcggaccgagaaggagcgggagaagctgctgtgtgagggccgcagggagaagggcagcgaccccgccatggagctgcggctgaagcagcccagtgaagtggagctggaggagtactacccggccttcctggacatggtgcggagcctgctggagggcagcatcgaccccacgcagtacgaggacaccctacgcgagatgttcaccatccatgcctacgtgggcttcaccatggacaagctggtgcagaacattgcgcggcagctgcaccacctcgtgagcgatgacgtctgcctgaaggtggtggagctctacctgaacgagaagaagcggggtgccgctggtgggaacctgtcctcccgctgcgtccgcgctgctagggagaccagctaccagtggaaggctgagcgctgcatggccgacgagaactgcttcaaggtgatgttcctgcagcgcaaagggcaggtgatcatgaccatcgagctcctggacaccgaggaggcccagacggaggaccctgtggaggtccagcacctggctcggtacgtggagcagtatgtggggaccgagggcgcgtccagctcgcccactgagggcttcctcctgaaacctgtgttcctgcagaggaacctcaagaagttccgccgccggtggcagagcgagcaggcgcgggccctgcgcggtgaggccaggagctcctggaagcggctggtgggcgtggagagcgcctgcgacgtggactgccgcttcaagctcagcactcacaagatggtgttcatcgtgaactccgaggactacatgtaccgtcgcgggaccctctgccgggccaagcaggtgcagcccctggtcctgctccgccaccaccagcactttgaggagtggcacagccgctggctggaggacaatgtgacggtggaggcggctagcctggtgcaggactggctgatgggtgaggaggacgaggacatggtaccctgcaagacgctgtgtgagacagtgcacgtgcacggcctgcccgtgacccgctaccgcgtgcagtacagccgccgcccggcctcgccctgacccgccctcatgggcaccgggcaggcgcctcacagagcacagacgtgccctcggccttggtcgtgtcggggccgttttcttgaacgacgtgagaggcatctcccagcccctctgctgccggacagcgcactccagggcaggacgccgcccccgtggctcccggtctcctgtgggcctgctgtgtgccaaacctgagctacctgcacccgagccctggggctcagccccaccacaggggcgggtggacgtgctggccgaggaacaagcaatcatgtttgcgtccccgtccgtcacatgtgccaaatccctggcaggcagatggctcctgccccatattcttgccgtgtcttggaaaagtcacaggtgacagccctcctgaggcccacactttggagggggtccatgtccaagagaccctgacaaggaaggagttgagccctgggtaggcttgcttgaaaagtgagtccttccagaatattctcagagctgccagaaacatcatctgagggtttgggcatcagctctgcctggctggtgttcaggccctcagtcactttggaagtgagaagaacccttcagccaaacctttgggatcccattttgaagtccagagctggagcaggcgggcagtgccctgggagaccccgctctggataagacacccaaccccaactccagcagctggactctgggcccacaaggggagggaccccagccagtattccctcagagccggcacgaccctgctgtggggcggcgggcccagtcgtgttcctgcagtgggcaccctaggcgtatgtgtatacacgcacagatatttattcctttcgcttttagtggttgttatttctgtagcagccaagtcctgcggctccctggggctgagatctccctttgtggaactccgagagccgccctgacagtcccagccgccacccaaggagccccatccgcccacccaccctgggacccacgcggccactccagggatcattgttgtccttttgtgaggggctgaggcgactgtcccatggaggcatccaaggctttctgtgccaagaatcccaagtgactggggctggggaccacttctccaggcctctctccccgaccatgagagcccctggccctggcccctgcacaccagtaggcccagaataaccgccacccttgccatcctgcaacagctggactcaagtttccaggaagtggagatgtgtttctagaagtttcctgtggaacctggaggctcctgatgcctttgactccaggctgggcgattccgatgctgacccgtcctcctgggctccccacccccgctccccaagtgtcacacaggcactttgtacacatcctggttttctaagaagggaacttgccatcaagattcctgtaccaggcccacggccgtctcgggcagagccacctgggccccgggtgcagccggagaccccgccgagcccctcctcccagtattcccatccccgcatgcttctagggagcgcctcttttccgttcttgaggaatttctgttctggggcttgtccttcctttgcagctgttttgaatgtagttttccttttctatttatttgcacattaaagttaataattgaatattgacatc

SEQ ID NO: 3972 - DNA, 5661 bp, Homo Sapiens
  NM_015261
gctccagcggtcggcatggcagctgctacctcgctgggacaggctctgggcccacgcgtgccgcgcagtccctacagaactgcagttgtcttgtcttctcggagtgctttcggctacttttcccttattactttagctcgatacacgttgggctgcctttcacattcggatattacgctgttcgagtgctgacgggaaaggcagccctttgacacgcacgcgaaatgtcgcctgacgagggcaaaggtgacagttactaccggaagtaccctatctcagataccctttagattttcccccattgaagaaaaacgaggcgggaaaaacgctgttagggtttaactcaggccctggctccttctcgaacgaattagcggaacacccgcaggagccttgtttggcttccacttttcggcccgcccagttctctgagcgtgcggcggacgacgccggtgattggttgagcgaatggaaacggctcggcgcggtggttggccagtgggaaattctgtacgttgtgattggtccacaggaacgactcggcgcgcgcgcgggagcgagctttgaaagttgagcacggcggcggcgagccggtgccctgggatcatggtggcgttgcggggccttggtagcggcctgcagccctggtgtccgctggatcttagactcgaatgggttgacacagtgtgggaactggatttcacagagactgagcctttggatcccagcatagaagcagagatcatagagactggattggctgcattcacaaaactctatgaaagccttttaccctttgctactggagaacatggatctatggagagtatctggaccttcttcattgagaacaatgtttcccatagtacactggtggcattgttctatcattttgttcaaatagttcataagaagaatgtcagtgtacagtatcgagaatatggccttcatgccgctgggctttactttttgctactagaagtaccaggcagtgtagccaatcaagtattccacccagtgatgtttgacaaatgcattcagactctaaagaagagctggccccaggaatctaacttgaatcggaaaagaaagaaagaacagcctaagagctctcaggctaaccccgggaggcatagaaaaaggggaaagccacccaggagagaagatattgagatggatgaaattatagaagaacaagaagatgagaatatttgtttttctgcccgggacctttctcaaattcgaaatgccatctttcaccttttaaagaattttttaaggcttctgccaaagttttccttgaaagaaaagccacaatgtgtacagaattgtatagaggtctttgtttcattaactaattttgagccagttcttcatgaatgtcatgttacacaagccagagctcttaaccaagcaaaatacataccagaactggcttattatggattgtatttgctgtgctctcccattcatggagaaggagataaggtcatcagttgtgttttccatcaaatgctcagtgtaatattaatgttagaagttggtgaaggatcccatcgtgccccccttgctgttacctcccaagtcatcaactgtagaaaccaggcggtccagtttatcagcgcccttgtggatgaattaaaggagagtatattcccagtcgtccgtatcttactgcagcacatctgtgccaaggtggtagataaatcagagtatcgtacttttgcagcccagtccctagtccagctgctcagtaaacttccttgtggggaatacgctatgttcattgcctggctttacaaatactcccgaagttccaagatcccacaccgggtttttactcttgatgttgtcttagctctgttagaactgcctgaaagagaggtggataacaccctctccttggagcatcagaagttcttaaagcataagttcctggtgcaggaaattatgtttgatcgttgcttagacaaggcgcctactgtccgcagcaaggcactgtccagctttgcacactgtctggagttgactgttaccagtgcgtcggagagtatcctggagctcctgattaacagtcctacgttttctgtaatagagagtcaccctggtaccttactgagaaattcatcagctttttcctaccaaaggcagacatctaaccgttccgaaccctcaggggagatcaacatagacagcagtggtgaaacagttggatctggagaaagatgtgtcatggcaatgctgagaaggaggatcagggatgagaagaccaacgttaggaagtctgcactgcaggtattagtgagtattttgaaacactgtgatgtctcaggcatgaaggaagacctgtggattctgcaggaccagtgtcgggaccctgcagtgtctgtccggaagcaggccctccagtctcttactgaactccttatggctcagcctagatgcgtgcagatccagaaagcctggttgcggggggtggtcccggtggtgatggactgcgagagcactgtgcaggagaaggccctggagttcctggaccagctgctgctgcagaacatccggcatcacagtcattttcactctggggacgacagccaggtcctcgcctgggcgcttcttactctcctcaccaccgaaagccaggaactgagccgatatttaaataaggcttttcatatctggtccaagaaagaaaaattctcacccacttttataaacaatgtaatatctcacactggcacggaacattcggcacctgcctggatgctgctctccaagattgctggctcctcacccaggctggactacagcagaataatacaatcttgggagaaaatcagcagtcagcagaatcccaattcaaacaccttaggacatattctctgtgtgattgggcatattgcaaagcatcttcctaagagcacccgggacaaagtgactgatgctgtcaagtgtaagctgaatggatttcagtggtctctagaggtgatcagttcagctgttgacgccttgcagaggctttgtagagcatctgcagagacaccagcagaggagcaggaattgctgacgcaggtgtgtggggatgtactctccacctgcgagcaccgcctctccaacatcgttctcaaggagaatggaacagggaatatggacgaagacctgttggtgaagtacatttttaccttaggggatatagcccagctgtgtccagccagggtggagaagcgcatcttccttctgattcagtccgtcctggcttcgtctgctgatgctgaccactcaccatcatctcaaggcagcagtgaggccccagcgtctcagccacccccccaggtcagaggttctgtcatgccctctgtgattagagcacatgccatcattaccttaggtaagctgtgcttacagcacgaggatctggcaaagaagagcatcccagccctggtgcgagagctcgaggtgtgtgaggacgtggctgtccgcaacaacgtcatcattgtaatgtgcgatctctgcattcgctacaccatcatggtggacaagtatattcccaacatctccatgtgtctgaaggattccgacccattcatccggaagcagacactcatcttgcttaccaatctcttgcaggaggaatttgtgaaatggaagggctccctgttcttccgatttgtcagcactctgatcgattcacacccagacattgccagcttcggggagttttgcctggctcacctgttactgaagaggaaccctgtcatgttcttccaacacttcattgaatgtatttttcactttaataactatgagaagcatgagaagtacaacaagttcccccagtcagagagagagaagcggctgttttcattgaagggaaagtcaaacaaagagagacgaatgaaaatctacaaatttcttctagagcacttcacagatgaacagcgattcaacatcacttccaaaatctgccttagtattttggcgtgctttgctgatggcatcctacccctggacctggacgccagtgagttactctcagacacgtttgaggtcctcagctcaaaggagatcaagcttttggcaatgagatctaaaccagacaaagacctccttatggaagaagatgacatggccttggcaaatgtagtcatgcaggaagctcagaagaagctcatctcacaagttcagaagaggaatttcatagaaaatattattccaattatcatctccctgaagactgtgctggagaaaaataagatcccagctttgcgggaactcatgcactatctcagggaggtgatgcaggattaccgagatgagctcaaggacttctttgcagttgacaaacagctggcatcagagcttgagtatgacatgaagaagtaccaggaacagctggtccaggagcaggagctagcaaaacatgcagatgtggccgggacggctggaggtgctgaggtggcacctgtggcacaggttgccctgtgtttagaaacagtgccagttcctgctggccaagaaaaccctgccatgtcacctgccgtgagccagccctgcacacccagggcaagtgctggccatgtagcagtatcatctcctacacctgaaacagggccattgcagaggttgctgcccaaagccaggcccatgtccctgagcaccattgcaatcctgaattctgtcaagaaagccgtggagtcaaagagcaggcatcggagtcggagcttaggagtgctgcctttcactttaaattctggaagcccagaaaaaacgtgcagtcaggtgtcttcatacagtttggagcaagagtcgaatggcgagattgagcacgtgaccaagcgggccatcagcacccccgagaagagcatcagtgatgtcacgtttggagcaggggtcagttacatcgggacaccacggactccgtcgtcagccaaagagaaaattgaaggccggagtcaaggaaatgacatcttatgtttatcactgcctgataaaccgcccccacagcctcagcagtggaatgtgcggtctcccgccaggaataaagacactccagcctgcagcaggaggtccctccgaaagacccctctgaaaacagccaactaaacagcgcctcccaccagtgtccaggcaggcaggagcccttgaggaagcagtctcgtgtcctccgtgtgaaggcagctggatcacttcccgcagtccttgggcagcgctttgctgtggaacacgagagctcctcctcaggggcctggcactcaccttctattctgtatgatgtatttggttaaacactgtcaaataatagagatgtgccagatttagattttcttaccctaatctgtttaatattgtaactttattccatttgaaagtgtcaagcccattcagataagctataatctggtctttaaggaacacaactttaaaactgcagctttcttttatataaatcaagcctctgttaacttgaattccttatagtacatattttcccatctgtaatgacgaaattttgattctaatattttttctattatttataagtgcaaattttttaaaaaagtgtacagctttctaaaagtaataaaggtttagcataaatacagccaaaaaaaaaaaaaaaaaaaaaaaaaaaaaaaaaaaaaaaaaaaaaaaaaaaaaaaa

SEQ ID NO: 3973 - DNA, 10596 bp, Homo Sapiens
  NM_015263
tttccgcagctgagcggcgacccgggcggcggcggcggtcgaggagctcccatggcagggacgaggcggagggaaggcgaaaggggggcgaggagttaagccagagcctccgcggggcgggtttccgagggaggcacagagggaaacggctctcgcagcccgaggagggtcaggcgcggagcttgtcgcacctcccgcgcattctgtccagcccgggctccggagatgcatctgcatcaggtcctcaccggagctgtcaaccctggagacaactgctactccgtgggcagcgtcggggatgtccccttcacggcatatggatcaggctgtgatattgttattttggcaaatgactttgaatgtgtacagatcattcctggtgctaagcatggaaacatccaagtcagctgtgtggagtgttctaaccaacaaggaagaattgcagcttcatatggtaatgctgtttgtatatttgagcccttgggcataaattctcataaaagaaattgtcaactcaagtgccagtggcttaaaactgggcagttttttttgagttctgtgacatacaacttagcatgggatcctcaagataatagattgttgacagcaactgattctattcagttgtgggctcctccaggagatgatattctggaagaggaggaagaaattgataatacagttcctcctgttttaaatgattggaagtgtgtctggcagtgcaaaacctcagtatctgtacatttgatggaatggtctcctgatggtgaatattttgctactgctggaaaggatgattgtcttttgaaagtgtggtatcctatgactggttggaagtcttcaattatacctcaggatcatcatgaagtaaaaaggagacagtcctctactcaattttcttttgtttacttggcacatccccgagctgtgacaggtttttcgtggcgcaaaactagcaagtatatgcccaggggttctgtctgtaatgtgttgttaacttcatgtcatgatggtgtgtgccggctctgggcagaaactttattaccagaagactgtcttttgggtgagcagatttgtgagactaccacttccagcattgccagcagcctttctcatgctggaagacacaaagacagaatacagcatgctcttgagacaatacaccatttgaaaaatttaaggaaaggacagaggaggtcatctgttcttgtaactcatgctgaattaatgcccgaccagacagcaatgcatgaagttcaaagacacatttcccaccatgcaaatgcactctgtcattttcatattgcagcaagcatcaaccctgccacagatattccaaatgtcttggttggcactgcatttaatgttgatgatggaaatgggggctttgtagttcattggttaaacaacaaggaatttcattttacatcatctacagaagtatttatgcatcaattacgaaaactttctgataagcaggtagatcatgaaaatgatgatgcagatagagaagatgaggaacattcacaggaggatagagaacggggtttacatatgaaattagaccatgatttatccctggatagagaatctgaggcaggtacaggatcatcagaacatgaagatggagaaagagaaggaagtcctagaacttactcacgacttagtgtaccaatgccactgcctacggttctgcttgatcggaagattgaaacgctgctaactgaatggaataagaatcctgatatgctttttacaatacaccctgtagatggtacctttctagtgtggcatgtgaagtatttggatgaatataatcctggaatatttagacaagttcaggtttctttttcttctcggattcctgttgcatttccctctggtgatgcaagctctcttagtaaaaatatcatgatgtatgcctgtataaatgcgacaaaagattctcaccacacgctgttacaccaggaggggatgtctgtaggcagtcctcacggatcacagccacactctagatcccacagtacacatatgaacatcttagctcccacagtaatgatgatctctaaacacatagatggttctttaaatcagtgggcagtcacttttgctgataagtctgcctttaccactgttctaactgtatctcacaaatttagatattgcggtcatcgatttcacctcaatgacctggcatgtcattcagttttaccactgttattgacatcctctcatcataatgctctattgactcctgaattagattgtcagtgggactcagacaataaattaagtagattaatggaccctgtaaaacatataaaaggttcctcgaaacaacctcttagaaatgcagcaactcgtacatttcatgacccaaatgcaatctacagtgaacttattctgtggcgtgtagacccaataggacctttgtcatacactggaggagtatcagaattggctcgaattaactctttacatacctcagcgttctctaatgtggcttggcttccaactctcattcccagttactgtctaggcacatactgcaattctgcaagtgcttgctttgttgcttctgatggcaaaaatctgagactctatcaagctgtagtggatgcaaggaaattattagatgaattgtcagacccagaatcttcaaaacttattggagaagtgtttaatattgtgagccaacagtctactgctcgacctggctgcattattgaactcgacgcaataaccaaccaatgtggctcaaatacacagttgcttcatgtgtttcaagaagacttcattataggatataaaccacataaggaagatatggagaaaaaggaaacagaaatattttttcagccatcacaaggataccgcccaccaccattttcagaaaagttctttctagtagtaattgagaaggacagcaataataactctattctgcatatgtggcaccttcatcttaaatctgtacaagcatgtttagctaaagcttcagaaggggcttcctctgagagtctactttcagtccctggacagaagaacgtagattcttctccagaaacctctcctagtgtgagccccatgccacattcttcatcaattgccaatcttcaaactgccagtaaacttattctgagttctagactggtgtatagccaaccccttgatctcccagaatcagttgaagtaataagagcaacgccttcagcaggccatctgagttcttcttcaatttatccagtgtgccttgcaccttatttagtggttacaacttgttctgacaataaagtacgcttctggaaatgttgtatggaagccaacccagagtgtaataaaagtgatgagaaagaaatttatcattggaagagatggcctttgatgaatgatgaaggagaagataatagcagtacagtgagcattgtgggaagaccagttgctgttagctgttcatacacaggtcgccttgcagtggcttataagcagcctatccaccataatggttttgtttctaaagaattttccatgcatgtttgtatatttgaatgtgaatctacaggaggatcagagtgggttttagaacaaacaattcatcttgatgatttggttaaggttgggagtgtacttgattcaagggtcagcgtcgacagtaatctgtttgtgtatagcaagtcagatgcactcttgagcaaggatagatatcttattccgaatatcaaacatttagtacatttggactgggtatcaaaagaagatggctcccacattcttacagtgggagtcggtgcgaatatcttcatgtatggaaggctttcaggaattgtgactgagcaaaccaacagtaaggatggagtagctgtcatcactttaccactaggtggtagtatcaagcaaggagttaagtcaagatgggttcttcttagatctatagacttggtatcttctgttgatggtactccttcactgcctgtttctctctcttgggtaagagatgggatattggtggtaggaatggattgtgaaatgcatgtatatgcacagtggaagcatgctgtcaaatttggagacactgaagctgatagttctaatgcagaagaggcagcaatgcaagatcattcgacctttaaatctaatatgctggcaagaaaaagtgttgttgaaggaacagctatttctgatgatgttttttgttcaccaactgtaattcaagatggtggcttatttgaggctgcacatgtactttcccctactcttccacaatatcatccaactcagctgttagaattgatggatttagggaaagtgcgaagggctaaagccattctctctcatttagtaaaatgtattgcaggtgaagtagcaatagttagagatcctgatgctggagaaggaactaagcgacatctctctcgaactattagtgtaagtggcagtacagcaaaggaaacagtcaccgtaggaaaagatggtactcgagattatactgagatagattctatccctccactaccactatatgcattacttgctgcagatcaagatacatcctacagaatttcagaagaaagtacaaagataccacagagctatgaagatcagacagtaagtcaaccagaggatcagtattcagagctgtttcaaatccaggatataccaacggatgatattgatttagagcctgaaaagagagaaaacaaatcaaaagtaataaatctttctcaatatggaccagcttactttggccaagaacatgcaagggtactttcaagtcatcttatgcactcaagtctaccaggccttacccgtttggagcagatgttccttgtagctttggctgatacagtggctactactagtactgagcttgatgaaagcagagataagagttgctcaggaagagatacattagatgagtgtggtttgagatacttgttagctatgcgcctacacacatgccttttgacatcgctgcctcctttataccgagtgcagctacttcatcaaggtgtctctacatgccattttgcctgggcttttcattctgaggctgaagaagaactgattaatatgattccagcaattcagagaggggacccccagtggtctgaattaagagctatgggcataggatggtgggtgaggaacattaacacgcttcgaagatgcattgaaaaggttgccaaagcttcttttcaaaggaacaatgatgccttagatgctgcactattctacctttcaatgaagaagaaagcagtagtgtggggtctgtttaggtcacagcatgatgaaaaaatgacaacatttttcagccacaactttaatgaagatagatggcgaaaagctgctttgaaaaatgctttttccttacttggaaaacaacgctttgaacaatcggctgcttttttcttgctagctggttcattgaaagatgccatagaggtatgtcttgaaaaaatggaagatattcagctagccatggttattgcccgtttatatgaatctgaatttgagacttcatccacttatatatccatcctaaatcagaagattttgggttgccaaaaggatggctcaggattcagttgcaaaagattacatcctgatcctttcctgcgtagtcttgcctattgggtaatgaaagattacacccgagccttggacacattactggaacaaacaccaaaggaggatgatgaacatcaagttatcatcaagtcttgtaacccggtggcatttagtttttataactaccttcgaactcatcctttgctcattcgaagaaatcttgcctcccctgaaggaactttggcaaccttaggtctcaaaactgagaagaactttgttgataaaattaacctcatagaaagaaaattattctttaccactgcaaatgctcattttaaagttggatgccctgttttagccttggaggtactctccaaaattccaaaagtaaccaaaacatctgccttatctgcaaaaaaagatcagcctgacttcatttctcacaggatggatgatgtaccttcacattcaaaagctctgagtgatggcaatggaagttctggcattgaatggtcaaatgtaacttcatcacagtatgactggagtcagccaatagtaaaagttgatgaggaacctcttaatcttgattggggtgaagatcacgacagtgccttagatgaagaggaagacgatgctgttggtttagtgatgaaaagtacagatgccagggaaaaagataaacaatcagatcagaaggcctcagaccctaacatgttattaacacctcaggaagaggatgatcctgaaggtgatactgaagttgatgtgattgctgaacaactaaaattcagagcttgtttaaagatccttatgactgaattaagaacattggctacaggttatgaagtagatggaggaaaactcagatttcaactctataactggcttgaaaaggaaattgctgccttgcatgagatatgtaatcatgaatcagttattaaagagtattccagtaagacatattccaaagtagagagtgatctgctggatcaggaagaaatggtagacaaaccagatattggttcctatgagcgccatcaaatagaaagaagaagattgcaggccaaacgagagcatgcagaaagacgaaagtcgtggttgcagaaaaaccaagatctcctgagagtatttctcagctactgtagccttcatggggcccaaggtggtggtttggcttcagtaaggatggaactcaaatttttgctacaagaatcacaacaggaaactacagtaaagcagctccagtctccactaccactgcctaccaccctacctctgctttcagcaagtattgcgtcaacaaaaacagtcatagctaatcctgtattgtacttaaataatcacatccatgatatactttatactattgttcagatgaaaacaccacctcatcccagtattgaagatgtgaaggtgcacacacttcattcactagcagcatcactttctgcatcaatttaccaagcattatgtgacagtcatagctacagtcaaacagaaggaaatcagtttacaggaatggcttatcaaggacttcttttaagtgatcgtagaagactaaggacagaaagcattgaagaacacgcaacaccaaattcatctcctgctcaatggcctggtgtgagctcacttattaatcttttgagttcagcccaagatgaagaccagccaaaactgaacattttgctatgtgaagctgttgttgctgtttacttaagtttattgatacatgctcttgccacaaattcctccagtgaattatttcggcttgcagcccacccattaaataatcgaatgtgggctgctgtttttggaggcggtgtaaaacttgttgtgaaacctcgaagacaatcagaaaatatttcagcacctcctgtcctttctgaagacatagataaacaccgtaggagatttaacatgagaatgctcgtccctggaaggcctgtaaaagatgctaccccaccaccggtgcctgcagaaagaccatcttacaaagaaaaatttattcctcccgaacttagtatgtgggattattttgttgcaaagccatttcttcctttgtctgatagtggtgttatatatgattctgatgaaagcattcatagtgatgaagaagatgatgcctttttttcagatacacaaatacaggagcaccaagatccaaattcctatagctgggctcttctacatttgacaatggttaaactagcacttcacaatgtcaagaatttctttcctattgctggactggaattctctgagctgcctgtaacatcaccattaggtattgctgtgattaaaaacttggagaactgggaacagatcttgcaagagaaaatggatcagtttgaaggtccaccccctaactatatcaacacatatccaactgacctttcagtgggagctggaccagctattcttcgaaataaagcaatgctagaacctgaaaataccccattcaagtcccgggattcttctgcatttccagtcaaacgactttggcatttccttgttaaacaagaggtccttcaagagacatttattagatatattttcactaagaaaagaaagcagagtgaggttgaagctgatctgggctatccaggtggaaaggcgaaagtcatccataaggaatctgatatgatcatggcattttctgttaataaggcaaattgtaatgaaattgttttggcttcaacacatgatgttcaagaacttgatgttacttctctactggcctgtcagtcatacatatggatcggagaagaatatgacagagaatccaaaagttcagatgatgttgattatcgtggttccactacaactctttatcaacccagtgcaacatcctattcagcaagtcaggtgcatccaccttcatctctgccatggctgggcactggacagactagcactggagctagtgtgcttatgaaaaggaatctacataatgttaagagaatgacttcacacccagtccatcaatactatcttacaggtgctcaggacggcagtgtacgaatgtttgaatggacgcggcctcagcaacttgtctgctttcgtcaagctggcaatgcaagagttactagattatattttaattcacaaggcaacaagtgtggtgttgcggatggagagggttttctgagtatctggcaagttaaccaaactgcatcaaatcctaaaccttatatgagttggcagtgccacagtaaagccacaagtgactttgcatttattacctcttcaagtctagttgccacatctggacactccaatgacaatagaaatgtttgcctctgggacacattaatatcacccggaaacagcctcattcatggtttcacgtgccacgatcatggtgccacggtactgcagtatgcacccaaacagcaactcctaatctcggggggtaggaaaggacacgtctgcatttttgacatcaggcaaaggcagctcattcacacgttccaggcccatgactcagctattaaggctctggccttggatccctatgaggaatattttaccacaggttcagcagaaggtaacataaaggtttggagattgacaggccatggcctaattcattcatttaaaagtgaacatgctaagcagtccatatttcgaaacattggggctggagtcatgcagattgacatcatccagggcaatcggctcttctcctgtggtgcagatggcacgctgaaaaccagggttttgcccaatgcttttaacatccctaacagaattcttgacattctataaagattggggttttatttttatatacatttcagttaaaaggcacactacagtcatcactaggcaattctgctttctaagcagttgtattgaaaacagagaatctctgtgtagaatttgaatatgacccaagctgagtattatctaaacaggttggtggaatgaatgcgcatgtaccttattatgctgacatactaaaaaaaataaaacctagtattgtatgaaggatagctattctttacagcatttagcaaacctgattcagaaaacatttgagattagcaaattagtaacttgaaataatgaaaaggacgtttataccaaattaaggaagaaaatgttgctgatttgggtttttcttcctgttcttaccactgactgaagcatgcctgcagtctcctcctctgttgaatgaaggataatcataaggtgtttgttaggagcgctagaccacctggaaaactttcttagctgtggagcagtgcgcagtgaccagttctctgctgtgagaggccgtttccattctttcctgctgaatatttttcctgttagtgtttatactgagctagtactgtaacttgcaaatgagtgcaaatttaaatgcaatgttttactcacaatttgcacattcacattttttggactgctagtttttctatttaaatatttgccttcatgttaggaatgtactatgtgaacatgacatatttgtagttaaccaaacacaccttcttagtccagtttagtactttttcttttcgtgtattcaaggttaaacacccaaacatttaaggatatgttgaaactacaccaatagagcatttcatatcataattaaaatgaatgttaggcttcttgtggccagttaatagttgatgagattggtgacattatttattgccacagcctattgtataaactatgcagagttaaatatttgcttgtaaaatattagccaatgttgtcattattttgatgtatttccttggttatgaccaaaaatatgttgagatactgaaactaatgtctgtgtgtttaaatgtttaccagcaaattgtcttatcatgttaatgagaatgttcaatgcctgtgtggtaaatagtaaatacaatggcataaaagtaactttctctgaagatgtgatgttcaggctgtgaaatatatatgtaaaagaaaaataaatgttatttgttagagtttttagtttgatactgtttttgaccattgagatttttaatttgataaaatgtttaactgttagag

SEQ ID NO: 3974 - DNA, 6255 bp, Homo Sapiens
  NM_015266
ccgaaagccccgagagagactaagaagcaatcctcccacgcgctttctcccaccctcgggccactgagacggagggacagagggccgccctcgcgcggccgaggccccgcctcccgctcgcccgcccgcgcctccagcggaagccggaagcaaaagcgggttctgctagccccgcggctccgaactcggtggtcctggaagctccgcaggatgggggagaagatggcggaagaggagaggttccccaatacaactcatgagggtttcaatgtcaccctccacaccaccctggttgtcacgacgaaactggtgctcccgacccctggcaagcccatcctccccgtgcagacaggggagcaggcccagcaagaggagcagtccagcggcatgaccattttcttcagcctccttgtcctagctatctgcatcatattggtgcatttactgatccgatacagattacatttcttgccagagagtgttgctgttgtttctttaggtattctcatgggagcagttataaaaattatagagtttaaaaaactggcgaattggaaggaagaagaaatgtttcgtccaaacatgtttttcctcctcctgcttccccctattatctttgagtctggatattcattacacaagggtaacttctttcaaaatattggttccatcaccctgtttgctgtttttgggacggcaatctccgcttttgtagtaggtggaggaatttattttctgggtcaggctgatgtaatctctaaactcaacatgacagacagttttgcgtttggctccctaatatctgctgtcgatccagtggccactattgccattttcaatgcacttcatgtggaccccgtgctcaacatgctggtctttggagaaagtattctcaacgatgcagtctccattgttctgaccaacacagctgaaggtttaacaagaaaaaatatgtcagatgtcagtgggtggcaaacatttttacaagcccttgactacttcctcaaaatgttctttggctctgcagcgctcggcactctcactggcttaatttctgcattagtgctgaagcatattgacttgaggaaaacgccttccttggagtttggcatgatgatcatttttgcttatctgccttatgggcttgcagaaggaatctcactctcaggcatcatggccatccttttctcaggcatcgtgatgtcccactacacgcaccataacctctccccagtcacccagatcctcatgcagcagaccctccgcaccgtggccttcttatgtgaaacatgtgtgtttgcatttcttggcctgtccatttttagttttcctcacaagtttgaaatttcctttgtcatctggtgcatagtgcttgtactatttggcagagcggtaaacattttccctctttcctacctcctgaatttcttccgggatcataaaatcacaccgaagatgatgttcatcatgtggtttagtggcctgcggggagccatcccctatgccctgagcctacacctggacctggagcccatggagaagcggcagctcatcggcaccaccaccatcgtcatcgtgctcttcaccatcctgctgctgggcggcagcaccatgcccctcattcgcctcatggacatcgaggacgccaaggcacaccgcaggaacaagaaggacgtcaacctcagcaagactgagaagatgggcaacactgtggagtcggagcacctgtcggagctcacggaggaggagtacgaggcccactacatcaggcggcaggaccttaagggcttcgtgtggctggacgccaagtacctgaaccccttcttcactcggaggctgacgcaggaggacctgcaccacgggcgcatccagatgaaaactctcaccaacaagtggtacgaggaggtacgccagggcccctccggctccgaggacgacgagcaggagctgctctgacgccaggtgccaaggcttcaggcaggcaggcccaggatgggcgtttgctgcgcacagacactcagcaggggcctcgcagagatgcgtgcatccagcagccccttcaagacataagagggcggggcgaggtactggctgcagagtcgccttagtccagaacctgacaggcctctggagccaggcgacttcttgggaaactgtcatctcccgactcctccctgagccagcctccgctcagtgtggctcctcagcccacagaggggagggagcatggggccaggtgccagtcatctgtgaagctagggcgcctacccccccacccggaggacccctgcggccccctgcctagaggagcaccatctacagttgtgccattccccagccactgccttcatgctgcccccgccggactggcagagccaggggtcagccacctgcctttgagtcatcaagatgcctctgcagccacaattctgacctaagtggcagggcccagaaatcctgaaaacctcccgctgccttttgtgatacttcctgtgctccctcagagagaaacggagtgaccttttgtcctttacctgattggcacttcgcagtctatctccctgggtagcagacggctgctgcccttctctgggcatgttctgaatgtttacactggtaccttctggtatcttctttagagccccctgcaagctgcaactctaggcttttatcttgcggggtcagagcgccctctagagggaaaagctagaggcacagggtttctgccggcccacaactgctgtcttgatttgcattttacagcaaagtgctgagagcctctagtcgcctcctgccatctgatctccctccccaccattcccgtactcagttgttcttttgtctaatcggaggccactgtgctgaggccctgcagtgtctgctcactgctgccatcttcgctgctagtcagggttccatcctctttcccctctcccagttccctaccacgttggatcccattcgtcacccatgctagggtccccaaagcactggggcaggggccagagcagcagcacccagtgctccctcctctactctgacctggggccccagcatcctggagcacacgctccacgcacacacaccccagccctgtcccaggggcctggccccctcagccatctcagggtgaggagctgccagtcatgtccagatggaatgactcccatcctctcctcatctcccctttgacgagcctcaaactgctcagctcatcaaagagccattgccaacttccgtatgtggttctgggtcccagggagccttggaacctggcaccctggggtggtttaattcatcattaagaagcattcctgcttctcaagggacacagtggcctgcatgggccagcatggaccctgggctgatcatgtgcattcctgcttctctggggacacagtgggcccacatgggccagcatggaccctgggctagagcaagcacatctccatctcttccacctcaggcagtgtggctccagatgtcaggagggactgacctcaggaccttccaggttcctctgtgccaggaatgagaggccaggcccgatcctaccacctcgccttgaccctgaagtcagagcaggccagccaagcaggaagcacactgtttactttttgcatgaaaagtaaatgtgtacttgatagagctaaaatatgatcttttttaatttctcaaccccataatttgagccattgccttgcttaattttggtttccaccatttccttttagtggagaagagaggaagtcagagggtagggacctttgcctgcccctgggcgagtgcgggcagggatctgagaccagattgttctcgcacccctgccagaactcactctcccctgaagtttagggtcccatctcccagatgtaagttgttttgcaaactcagtttgccaggatttctttctttcctaatcttaaattcacagataaagcaatgaaaagagtcagatcccatttccgtctgccccctcgtcaccaggtgtgatagccccagccaggtcacacctggcctcacactttgagctgagacttgaaaacgatgctgtggcggaagagcatgtggggcttggtggaggggccccaggatttgttgggggcaaagggggtggcgggaccgttcccaggaggtaccagcacctgcctcgatctcctctgagcctcttctgccccctgtcggccaggtgaggtcagcagcctgggagagtgcccccaagagatgagggcaccccgtgttccttggcaatcttggctcaccttggtaacaaaaggccatagaagtctgtttttctgggtcagttttttttgcctgagaataacaaattgctgctgtctacctttagcacacccaataattctatttggggcagtgaatgcatagaagatataaaaatacgcagcttaactatatcttcctgcgtgtgtatttattttcttctgggtctaggccatggtacaggagaactgtggcgtgtaggaggaatacttcaggatgagtgaaggctggagccagggagcgctggaggaaaccagccctttagccagcagcccctccaccacaggcactgctgtgtggaacgagttcttggaatgaatcccatgctttctgcagcctgtagttgttatgacccctcggaacaaccaccccgtggcttgtgtggggtctcgcagggaaaagggctggcttctaggtccccgagataagtgtgcagggggatgggccagggccaggctaagggtggctcagttccatcatctggaggtcagacacactgtccagaggcagaactgaagccctctcggcccctaccctaagccagccacccctcttcacagtgggtgagctgggctgggctggctggcatgaggccaaggggtaggcctgagcgccagagtcgcccaggttagcccacaggattcctttgtgtgccatggaatgctgaaagatgggtgactggggacccttcttaaaacctttggcaaaggtgccatcggcagggcttggcctcatgaagtctcaggtccgtgttcccgcagggcgcacatgcttggagagtcctcagcagggtagccgaggccaggccacttctgctgaggatggggcaggctggggtgtgggtgtggcctggggtggctcagggctggaactgctgcctgattcctgtgtggggagaagctcagtggccgtttgctgccactgacaaggatttcacatgcagaagagaaaaggcccccctccaccccccgcattccctgccgagtgagagccagtgtttgctgcccttgctgggggcgggtaggaaaccctgagcttcctgatgcggagtcatgaagcagagtcctcgggaaggcatctccacagccccgggtcctctgtctaacgccctccatttcacgccctccatctcacagtcaagataaaggcctcgagaataaagagccagcccccttccatttagtctcctgccgtttcccaaacagttgtccaacagttagacattgaggggcttcactgttaccaggcatgtaacagaaggaggaagactaacacacaccccctgccccatcccatccccctctcccgagctattttcttgctgtggcctctggtgcccttgagttggtctccccggctgctctgcgggggcttcactggcttcggagtgagcgcgaagtgctggtgagcagtgggcctgtgattggatgggaagatgtgcatccgtggtcaaaagtcagctgccagccctgcggaaccagagcctcaggctgggatggggaggcctccctgcttccacctgcatggtgggcatggcctggcttacaccaaaggctttgacggtttctccaagtaaggatctgcaaatcttgaatcgtcctcaaaatgacgaagcttgaattgtcctcaagatggatgtgaatcttacattccttttcatcatttcctttgtaaaaatgacgagtgctgggtttttgttttaagaagcattatgaaggccagacttactcatttttctcccccaagtgagctgcaagaggcccctgttaggcccctgtttcctgagcagtgatgtgctgctcttcttggtggggctttgggctgggaggggaaggcgggtcagagatgggggacctgtggctgccatgcaggagcccctgcgtcatctcgttggactctttaagggagtcaggaatagatgtatgaacagtcgtgtcactggatgcctatttagaaataaagtgtatgctgctg

SEQ ID NO: 3975 - DNA, 7551 bp, Homo Sapiens
  NM_015268
gagccggcggcgggaggagctagggctggagcctctccagcctcccgcgaaggtttgagcacaaaatgaacataattagggaaaataaggatctggcatgtttctacacaacaaaacattcatggagggggaagtataagcgtgtcttttcagttggaactcatgcgattactacatataatcccaataccttagaagtaacaaatcagtggccttatggagacatttgcagcatcagccctgttggaaaaggacaaggaacggagttcaacctcacatttcgtaaaggcagtggaaaaaagtcagaaactttaaaattttctacagagcacagaacagaacttcttacagaagcattgagatttagaactgatttttcagagggaaaaatcacaggaaggagatacaactgctataagcatcactggagtgactcaagaaaacctgtaattttggaagtaactccaggaggctttgaccaaattaatcctgcaaccaacagagtactctgttcctatgactatagaaatattgaaggatttgtagatctctcagattatcaaggaggattttgtatactttatggaggatttagtagattgcatttatttgcgtcagagcaaagagaagagattattaaaagtgcaatagaccatgctggtaactacataggtatttcattgcggatcaggaaagagcctttagaattcgagcaatatttgaatcttcgctttggaaaatacagcactgatgaatccatcacatctttagcagagtttgtagtccaaaaaatatcacctagacattcggagcctgttaaaagagttctagcacttacagaaacatgtttagtagaacgtgatccggcaacctataatattgcaacattgaagcctttaggagaagtatttgcgttggtctgtgactcagaaaatccacaactttttaccattgaatttataaaagggcaagtacggaaatattcttcaacagagagagattccttattagcaagtttgctggatggagtaagagcctctggtaatagagatgtttgtgtaaaaatgacaccaacccataaaggtcagcgatgggggttactcagcatgcctgttgatgaggaagtagagagccttcacctcaggttcttagctacgcctccaaatggcaactttgcagatgctgtattcaggttcaatgctaatatttcatacagtggagtcctacatgcagtaacacaagatggtctcttctcagaaaacaaagaaaaactgatcaataatgccataacagcattactgtcccaagaaggggatgtcgttgcttcaaatgcggaacttgagagtcagttccaggctgtgaggaggcttgtggcatccaaagctggtttcctggctttcactcagcttccaaagtttcgcgagcgtctaggggtgaaggtagtaaaagcactcaaaagaagcaacaacggaataatccatgcagcagttgatatgctttgtgcccttatgtgtcccatgcatgatgactatgacttaagacaagaacagttgaacaaagcttctcttctctcgtcaaagaagtttctggaaaacttactggagaaatttaattcccatgtggatcatgggactggtgccctagttattagttcgctcttggacttccttacctttgccctctgtgctccatatagtgagacaactgaagggcagcagtttgatatgctcttggagatggtagcatccaatggaagaaccctttttaaactttttcagcatccttccatggcaataataaaaggagctgggttggttatgaaggcaataatagaggaaggtgataaagaaattgctacaaaaatgcaggagcttgccctaagtgaaggtgccttacctcgacacttgcatactgcgatgtttacaataagctcagatcaaaggatgcttacaaatagacagctaagtagacatttagtgggactctggacagctgataatgcaactgcaacaaacttgttgaaacgcattttgccgccaggcttgctggcatacttggaaagctcagatctcgtacctgagaaggatgctgatcggatgcatgttagagacaatgtgaaaatagcaatggatcagtatggaaaatttaataaagttccagagtggcaaagactagctggaaaagctgctaaagaagttgaaaaatttgccaaagaaaaagtggatcttgtattgatgcactggagggataggatgggcattgctcaaaaagagaatataaatcagaagccagtggttcttcgaaagagaagacaaagaataaaaatagaagcaaattgggatctcttctattataggtttggtcaagaccatgccaggtcaaaccttatttggaatttcaaaacacgagaagaactgaaagatactcttgaatctgaaatgagagcatttaatattgacagagaacttggaagtgcaaatgtgatctcctggaaccaccatgagtttgaggttaaatatgagtgcctggcagaggaaattaaaataggagactattacctgagattactattggaggaagatgagaatgaagaaagtggatcaattaagagatcgtatgaatttttcaatgagctttatcatcgcttcttgctcaccccaaaagtaaacatgaagtgtttatgtttacaagcccttgctattgtttatggcagatgtcacgaagaaataggaccttttacagataccagatatatcattggaatgttagagaggtgcacagataaacttgaacgagataggttgattctcttccttaacaagttgatccttaataagaaaaatgttaaggatctcatggattcaaatggaataagaatccttgtggacttgcttacccttgcacatctccatgtaagccgagctacagtaccactgcaaagcaatgtaattgaagctgctccagatatgaaaagagagagtgaaaaggaatggtattttggcaacgcagacaaagaaaggagtggcccgtatggatttcatgagatgcaagaattgtggaccaaaggaatgttaaatgcaaaaaccagatgctgggctcaaggcatggatggatggcgaccacttcagtccataccccagcttaagtggtgtctcttagccagtggacaggctgtcctgaatgaaactgaccttgctacccttatattgaacatgttgatcacaatgtgtggatattttccaagcagggatcaagacaatgccatcattcggcctctacccaaagtgaaaagactgctgtcagatagcacttgccttccccatattattcagctactgctgacctttgaccctatccttgttgagaaggttgctattttgttataccatatcatgcaagataacccacagttaccccgcctttatctgagtggagtatttttctttatcatgatgtacacaggttccaatgtgcttcctgttgctcgatttttgaaatacacacataccaaacaggctttcaagtcagaagagacaaaaggacaagatatttttcagagaagtatacttgggcacattctacctgaagcaatggtttgttacttagaaaattatgaacctgaaaagttttctgagatttttctaggagaatttgatactccagaagcaatctggagcagtgaaatgaggcgcctgatgatagagaagattgctgcccatctcgcggatttcacacctcgtcttcagagtaacacaagagcactttatcagtattgccccattcctataatcaactatccacaactcgaaaatgaactattttgtaatatttattacctcaaacaactgtgtgatacactccggtttccagattggccaattaaagacccggttaagcttctaaaagatacccttgatgcctggaagaaagaagtagaaaagaagccacctatgatgtcaatagatgatgcttatgaagtgcttaatctgcctcaaggacagggaccgcatgatgagagcaagattaggaaagcttacttcagacttgcacaaaagtaccaccctgataagaatccagaagggagggacatgtttgaaaaagtaaataaagcatatgaatttttatgtaccaaatcagcaaaaatagtggatgggccagatccagagaatataattttaattctaaaaacacagagcatcctcttcaaccgtcataaagaagatttacagccttataaatatgcaggataccccatgcttattcggactataacaatggaaacttcagatgacctccttttctcaaaagaatcaccattgttgcctgcggctacagagctagctttccatactgtcaactgttcagccctcaatgctgaagagctcagaagagagaatggactagaggtgttacaagaggcatttagtcgctgtgtggctgtcttgactcgtgctagtaaaccaagtgacatgtcagtacaggtgtgtggatacataagtaaatgctacagtgtggctgctcagtttgaggaatgccgagagaagatcacggaaatgcctagcatcatcaaggatctctgtcgggtactatattttggcaagagtattccccgcgtagctgctcttggggtagaatgtgtcagttcttttgctgtggatttctggctacagacacacctatttcaggctggaattttgtggtatctccttggttttctgtttaattatgactacacactagaagagagtggcattcagaaaagtgaagaaacaaaccagcaggaggtagcaaacagccttgccaaactgagtgtccatgctctgagtcgccttggagggtatttggctgaagaacaagcaactccagaaaatccaaccataaggaaaagcttagctggcatgctgacaccctatgttgctagaaaacttgctgtggctagtgtgactgagattttgaagatgcttaacagcaacacagaaagtccatatttgatatggaacaattctacaagagcagaattacttgaatttcttgaatcccaacaagaaaacatgattaaaaaaggtgattgtgacaaaacttatggatcagaatttgtctacagtgatcatgccaaagaacttattgtaggggagatttttgttagggtgtataatgaagttcctactttccaactggaggttccaaaagcatttgctgcaagtctcttggattatataggctcgcaggcccaatacttgcacacattcatggccatcacacacgcggcaaaagtggagtcagagcaacatggagatcgcttaccgagagtagaaatggctttggaggctctgagaaatgtcataaaatacaatccaggttctgagagtgaatgcattgggcactttaagttgatattttctcttctccgagttcatggagctggtcaagtgcagcagttggctttagaggttgtgaatatagtgacatctaaccaagactgtgtcaacaatattgctgaatcaatggttttgtccagtttattggctcttctacattcattgccatcaagtcgtcagcttgttctggaaactctttatgctttgacatcgagtacaaaaataatcaaagaagcaatggcaaagggtgctttgatctatttactggatatgttctgcaattcaacacatccacaggttcgagcccaaacagcagaactttttgccaaaatgacagcagataaactgataggtccaaaggttcgaattacgttaatgaaatttctaccaagcgttttcatggatgctatgagagacaatcctgaagctgctgtacatatttttgaaggaactcatgaaaatcctgagttaatttggaatgataattccagagataaagtgtccacaacagttagggaaatgatgctagagcactttaaaaatcagcaggacaaccctgaggcaaactggaagttgcctgaagattttgctgtggtgtttggagaagcagagggtgaacttgctgttggaggagtcttcttgaggatctttattgcacaaccagcctgggttctaagaaagcctagagaatttcttattgccctgttagaaaaattaactgagctcctagagaagaacaatcctcatggagaaactctggaaaccttgacaatggcaacagtgtgtctcttcagcgcacaacctcagctggcagatcaggtcccgccattgggccatcttcccaaagttatccaggcaatgaatcataggaacaatgccattcctaagagtgccattcgggttatccatgccttgtctgaaaatgagctgtgtgttcgagccatggcatctttagagaccattggcccactgatgaatggaatgaaaaagcgagcagatactgttggtctagcctgtgaagcaattaatcgaatgtttcagaaggagcagagtgaattagtagcacaagccctgaaagcagatttggttccatacctcttaaaattactcgaaggcattggccttgaaaacctggacagcccagcagccactaaggctcagattgttaaagctctcaaggcaatgactcgaagtttgcagtatggagaacaggtgaatgaaatcctgtgccgttcttcagtctggagtgccttcaaagatcagaaacatgatttgttcatttctgagtcacaaacagcaggatacctcacaggacctggagttgctggctaccttaccgcaggtacatctacatcagtcatgtctaacctgccacctcctgtagaccatgaggcaggcgaccttggctatcagacttgaaatattcacgagagacaataaacgctgaaaggccagtgccaagtccacattcctccagctgatacgttgaagcaaactcttactgcctttctcctggtttcatgacagtgttattcctttttctataaatatatttttaggaaaaaaagtcagtgatcctaattgtatcacattataagaaagcactctgtggatcaacataagtgggtacacaagaattttttttttcttggtgtatgtaagcacatttgttcctttatatctgtttacaaaactgtgaatcaaaaagacaaaactttcttcctagtttttgtaattttttttttgaactagcatgactgtagggttgagctacagtcaacaaaaattgggctaagtcacttttccccaggaaagaatatttccctctcctgcatcaagtctgcgtggccatcctccccccaccatccaagactattaggttttgtccctgcacccttcactggcatcctcaatcattaaccttctgaaagctcacagtacacattagtatgtataactggctttaccaaattgaatgaaaaggagcttgtgcaaaaaaatttaaaaatggatgtcaagatgttatgtaaaagatgagtgtaattgtgaaatgttctatacactatcaaatatataaagctttctatattgaatgtacattatacagatcattcatatgtgtacataaaattttaaaaataaagggaattgactgctttgttaatgagaaaaa

SEQ ID NO: 3976 - DNA, 5856 bp, Homo Sapiens
  NM_015269
ttcgcggcgcggcggacatggcggtggagtcctgagctagtcgtgtcccggcctccagcggcggcagcggcgacggcggcggcagcaggaggcggagggagagcaggagccactgagatgaggaggcgtcgcgcgcgcctgtagctcgcgggcctcgcagtttgcttgcctaaactggacttgaagcaatttaaactactggagatctgccattttataatatcacaattggaaagaaacagattttcaaataatggaagagtctaaaaccttaaaaagtgaaaatcatgaaccaaagaagaatgttatttgtgaagaaagcaaagcagttcaagttataggtaatcaaacattgaaagctagaaatgataaatccgtaaaagaaattgagaacagctctccaaataggaatagtagtaaaaaaaataagcaaaatgatatttgtatagaaaaaacagaagttaaatcatgtaaagtaaatgctgccaaccttccaggtcctaaagatttggggttagtccttcgagatcaaagtcattgcaaagcaaaaaaatttcctaattcaccggtgaaagccgaaaaggcaaccatttcacaggcaaaatcagaaaaggcaaccagtttacaggcaaaagcagaaaaatcaccaaagtcacctaattcagtgaaagcagaaaaagcatccagttatcagatgaagtcagaaaaagtaccaagttcaccagcagaagcagaaaagggacccagtttactgttgaaagacatgagacagaagacagaattacaacagattggaaaaaaaattccaagctcctttacttctgtggacaaagtgaatattgaagctgtagggggagaaaaatgtgctctgcaaaactcaccacgatctcagaagcaacagacatgtacagataatactggtgattctgatgatagtgcttcaggaattgaagacgtatcggacgatttaagtaaaatgaagaatgatgaatctaataaagaaaattcttcagagatggactacttagaaaatgccactgtgatagatgaatctgcattgacacctgagcagaggctggggttgaaacaagcagaagaacgcttagaaagagatcacatctttcgacttgaaaaacgatcaccagaatataccaattgtcggtatctatgcaaactttgcttaattcacattgaaaatatccagggggctcataaacatataaaggagaaacgacataagaaaaatattttggaaaaacaagaagaaagtgagcttcgttctctgccacctccttcccctgcccacttggctgctttaagtgttgcagtcattgaattagcaaaagaacatggaataacagatgatgacctcagagtccgtcaggaaattgtggaggaaatgtcaaaggttataacgacatttttaccagaatgttcacttaggttgtatggctcatctctgactagatttgctctgaaaagtagtgatgttaatatagatataaaatttcctcccaagatgaatcatccagatcttctgataaaagtacttgggattttaaagaaaaatgtattatatgtagatgtggaatctgattttcacgctaaagttcctgttgtggtgtgcagagatcgaaaaagtggtttactttgtagagtgagtgcaggaaacgatatggcatgtctcactactgatttacttactgcccttggcaaaatagaacctgtctttattcccttggtgttagcctttcgctactgggctaagttgtgctatattgactcccaaactgatggtggaatcccttcttactgttttgctttaatggtgatgttttttctacaacagagaaaaccccctcttcttccttgcttacttggaagttggattgaaggctttgacccaaaaagaatggatgactttcagctgaagggcatagtagaagagaagtttgtgaagtgggaatgtaattcaagtagtgcaactgagaaaaactcaattgctgaggaaaacaaagctaaggcagaccaaccaaaagatgataccaagaagacagaaacagacaaccaaagtaatgccatgaaggaaaaacatggcaaatctcctttagcattggaaacaccaaatcgggtatccttgggacagttatggttagagctgcttaaattctacacactggattttgctttggaggaatatgtcatatgtgtacggatacaagatattttaacaagagaaaataaaaactggcctaaaaggcgaatagccattgaagatccattttcagtcaagaggaatgttgcacggagcttaaacagccagctggtttacgaatatgttgtggagagatttagggcagcttatcggtattttgcctgtcctcagacgaagggtggaaataagtctacagtggatttcaagaaaagagagaaggggaaaataagcaataagaaaccagtcaagtcgaacaatatggcaaccaatggttgtattctgcttggggaaaccacagaaaaaataaatgcagaaagagagcaacctgttcaatgtgatgaaatggactgtacatcacagagatgtattattgacaacaacaatttgttggtaaatgaactagattttgctgaccacggacaggactcttcatctctttctaccagcaaaagcagtgaaatagagccaaaattagataagaaacaagatgatttagcgccttcagaaacttgtttaaaaaaagagctcagccaatgtaattgcattgatttgtctaagtcgcctgacccagataaatctactggaacagactgcaggtcaaatttagaaacagagagttcacatcagagtgtgtgcaccgacacatctgctacctcttgcaactgcaaagctacagaagatgcttctgaccttaatgatgatgataacctccccacccaggaattatattatgtgtttgataagtttattttaacctctggcaagccaccaacgatagtatgcagcatctgcaaaaaggatggccattcaaagaatgattgcccagaggattttaggaaaattgatttaaaacctctaccaccaatgacaaaccgatttcgggaaatacttgatttagtatgtaaaagatgttttgatgagttatcaccaccttgttctgaacaacacaacagggagcaaattttaattggcttggaaaagtttattcaaaaagaatatgatgaaaaggcaaggttgtgcttatttggctcttctaagaatggatttggatttcgtgatagtgatctggatatttgtatgaccctggaaggccatgaaaatgcagagaaattaaattgtaaggaaataattgaaaatttggcaaaaattcttaagagacatccaggtttaagaaacattttgcctataactactgccaaagtgcctatagtaaaatttgaacacaggcgaagtgggttagaaggcgatatcagtttatataatacgttggctcaacataacacaagaatgctagctacttatgcagctattgatcctagagtgcagtatttgggatatactatgaaagtgtttgctaagcgatgtgacattggggatgcttccaggggaagtttatcttcatatgcatatatccttatggtgctgtactttctgcagcagagaaagccacctgttatcccagttctacaagagatctttgatggaaaacagattccacagagaatggttgatggatggaatgctttcttctttgataaaacagaagaactgaaaaagcgtttaccttcacttggaaagaacacagaatcattaggggagctttggctgggactgcttcgtttctatactgaagagtttgatttcaaggaatatgtaattagcattcggcagaaaaagctgttgacaacttttgagaagcagtggacttccaagtgcattgcaattgaagacccttttgacttgaatcataaccttggtgctggagtttccagaaaaatgaccaatttcatcatgaaagcatttatcaatggaaggaaactttttggtacccctttttatccactcattggcagagaagctgagtacttctttgattccagagtattaacagatggagaactggctcccaatgatagatgttgccgtgtgtgtggaaaaataggccactacatgaaagactgccctaaaaggaaaagtttactgtttagactaaagaagaaagacagtgaagaagagaaggaagggaatgaagaagagaaagattcccgagatgttcttgacccccgagacctccacgatactcgagactttagagacccgagagacctcagatgttttatatgtggagatgctggacatgtacgaagggagtgcccagaggtcaagctggcccgtcagaggaatagcagtgtggcagcagcccagctggtccgcaaccttgtaaatgctcaacaggtggctggttcagctcagcaacagggtgatcagtccataaggactagacagtcatcagaatgttctgaatcaccatcttattctcctcagcctcagccatttccacagaactcttcccagtcagctgctattactcagccttcatctcagccaggatcccaacctaagcttggcccacctcagcagggagcccaacctccccatcaggtccagatgccactgtataactttccccagtcaccaccagctcagtattctcccatgcacaatatgggattgttgccaatgcaccctctccagatccctgccccgtcctggcccatccatggcccagtgatccactctgcaccaggcagtgcccccagcaatattggcctaaatgatcccagcatcatctttgcacagcctgctgccagacctgtggcaatccctaacacgtctcacgatggacactggccccgtactgtggctccaaattccctggtaaacagtggtgcagtggggaattcagagccaggctttcgaggactgactcctccaattccttgggaacatgcaccgcgtccccatttcccccttgtcccagcttcgtggccttatggtttgcatcaaaacttcatgcatcagggaaatgcccgattccagcccaacaaacctttctatactcaagacagatgtgccacccgtcggtgtagagagcgttgtccccacccaccaagaggaaacgtgtcggagtaatgcgagtccattttctttcagctggtctaccgatgcacagcaaccagccaatcctgctgtctcaagggtatccgtacctcaatgtcagttacattcagcagaaaaagtgacatttaatggaaagcaaaacaaatcaggtcctgatttaaaattttaacacgtttagatagcttatttaaattctaagactgtttttacagactgtattatttgtatataaatatgaactatagtttttactagtatcaccaaattgagtgatacaaatttcatctattttattaccctatttttaagggaattttatgttttgtttaaccttgatgaattgtataaagagagaatttaaaaaattacattctttattttctattagctgtattcatactttggttgcttcagactttatatattgttcttaaaagttaggaaagaatttcatgtgttttaaattgtcacttctattctttacagaaccttgtagtgccaaaaactttttaaaaggtaaaaaaataaaataaaattacaacatgaagattcagattttttttcttttccatacttgtatattgaacattcaaacttgaatggaaagttgattttgtctgtatttgaagtacttctattttaagttaataaatctttttgacaagagttaaaaaaaaaaa

SEQ ID NO: 3977 - DNA, 5823 bp, Homo Sapiens
  NM_015275
aagtcacgtgctgtgacagtagctggggtgaggccgtcgtcgccgcacgggctggttggggctgtgtctgtgggaggcgccggggtgatggcggtggagactctgtccccggactgggagtttgaccgcgttgacgacggctcgcagaaaattcatgccgaagtccaacttaagaattatgggaaatttcttgaggagtatacctctcaactgagaagaattgaggacgctctggatgactcaattggagatgtttgggatttcaatcttgatcctatagcattaaagcttttgccttatgaacagtcctctcttttggaactcataaagactgaaaacaaggtcttaaacaaagtcatcactgtttatgctgcactttgttgtgaaatcaagaaattaaaatatgaggctgaaactaaattttacaatggtctcttgttttatggagaaggagctacagatgccagcatggtggaaggtgattgccaaattcaaatggggagatttatttcattcttacaggaactgtcttgctttgttacgaggtgctatgaagtggtgatgaacgtagtccaccagttggctgccctctatatcagtaacaagattgcacccaaaattatagagacaactggagttcattttcagactatgtatgagcacttgggagaactgctaacagttttgctcaccctggatgaaattattgataatcatatcacactgaaagaccactggactatgtacaaaaggttactgaaatctgtccatcacaatccttcaaaatttggaattcaggaagaaaaattaaagccatttgaaaagttcttgctgaagctagaagggcaattactggatggaatgatattccaggcctgtatagaacaacaatttgattctctcaatggaggagtatctgtgtcaaaaaatagtacttttgctgaggaatttgcacatagtattcggtcaatttttgcaaatgtagaagccaaacttggagaaccttctgaaattgaccagagagacaagtatgttggaatttgtggactctttgtattgcactttcagatttttcgaactattgataaaaagttttataagtctttattggacatttgtaagaaggtaccagccatcactctaactgctaatattatttggtttcctgataattttctgatccagaaaataccagcagctgccaaactgctagacagaaaaagtcttcaagccattaaaatacacagggatacttttctacaacagaaagctcaatcacttaccaaagatgtacagtcttactacgtctttgtgagctcatggatgatgaaaatggaatctattttgtctaaagagcagagaatggataaatttgctgaagatctcaccaatagatgtaatgtttttatacagggcttcttgtatgcatatagtattagtaccattattaaaaccacaatgaatctctacatgtccatgcaaaagccaatgaccaaaacctcagttaaggcattgtgcaggcttgttgaacttctcaaggcaatagagcatatgttctacaggagaagcatggttgtggctgattcagtttcacatataacacagcaccttcaacatcaggctcttcattctatttctgtggccaagaaaagagtgatttctgacaaaaaatacagcgaacagcgtcttgatgtgctctctgctctagttttggctgaaaacactctaaatggaccaagcacaaagcaacggcgacttattgtttctttggcactaagtgttggcacacaaatgaaaacatttaaagatgaagaactctttccacttcaagtagtcatgaaaaaactggatcttattagtgaacttagagaacgagtccaaacacaatgtgactgttgttttttatactggcatcgagctgtcttcccaatttatttagatgatgtatatgaaaatgctgttgatgcagccagattacattacatgttcagtgctttgcgcgactgtgtacctgctatgatgcatgcaaggcatttagagtcctatgagatacttctggattgctatgacaaggaaattatggaaattttaaatgagcatttgctggacaaattatgcaaagaaatagagaaagatctgcgactttctgtgcatactcatttaaagctggatgaccgaaaccctttcaaagttggcatgaaagacctggctctttttttctctctgaatccaattcggtttttcaatcgtttcattgacattcgggcttacgtaactcactacctagacaagactttctacaatctaacaactgtagcccttcatgactgggccacttatagtgagatgagaaacttagctactcagcgttatggactggttatgacagaggcacatcttcccagtcagactttggaacagggccttgatgttttagaaattatgagaaacattcatatatttgtgtcccgatacctctataatctcaacaatcagatttttattgaacgaacaagcaataacaagcatttgaatactattaatattcggcatattgctaattcaattcgaacacatggcacgggaattatgaatacaactgttaatttcacctaccagtttttgaaaaagaagttctatatatttagccaatttatgtatgatgaacacatcaaatccagattgattaaagatattcgatttttcagggaaattaaggaccaaaatgatcataagtatccttttgatagagcagaaaaattcaatcgaggcatcagaaaacttggagtaacacctgagggacagagctaccttgatcaattcaggcaactcatcagccagattggtaatgctatgggctatgtacgaatgataagatctggtggtcttcattgtagcagcaatgccattagatttgttcctgatcttgaagatattgtaaattttgaagaactagtaaaagaagaaggtcttgcagaagaaacattaaaagcagcaaggcatttggattcagtcctcagtgatcacacacgaaattctgccgaaggcacagaatatttcaaaatgcttgtagacgtttttgctccagaatttcgaaggccaaagaatatacatctccgaaatttctatataattgttccccctctgaccctcaactttgtagagcattccattagttgcaaggaaaaattaaataaaaaaaataaaattggagctgcctttactgatgatggctttgccatgggtgtggcttacattctaaagcttttggatcagtatcgggagtttgattcacttcactggttccagtctgttagagagaaatacctgaaggagataagagcagttgctaagcaacagaatgtacagtcagccagtcaagatgaaaaactcttacaaaccatgaatctcactcagaagcgactggatgtctatctacaggaatttgaattgctgtatttctcactgagcagtgcaagaattttcttcagagcagacaagactgcggctgaagaaaaccaagaaaagaaagagaaggaagaagaaactaaaacaagcaatggagacctgtctgacagcactgtgtctgctgatcctgttgtgaaatgatacggatggtattcactgcacatatgatgaaatcatcagaattgttaaaacttttgccagtggaatggataaactattgatgaattgtttcctgggtcacatctctggaaaatagatgttacagttcttaaaggcagtgctttaaagtgaagttcattctgtttccaaaggctctactttcaaaggttaagaatgagattttaaaattggatttttgcctggacttgagggtacaagatgtttctatttgaagtgaagttataaaagggcaaatccagattcataaactatcacctcggatttcttgtaatctacatgtttgtaatttgtatttgcatagatctttgatctatagttatttcaagtcatgggaaattcaatgcatatactatatacagccagtaaatacatgcttaacaaaaggaatgagcctgaagttcataaagaatacatatcaatattcttataaaaggaatatatgaagatggctttgatactagaggtgaggcacaagtgttttatgtactctcagtgtacagtataactgatgatccttctttcattgttaatttcatgtgactcacaagagctgctgatgtctttgatgagacattttataactagtttacattgctttgagaacatttaacctccaacagctgctttaaatttaagatttacttaatactcagaaaattcagataaagccatagagtcctgtttgaagcttcacttctattttggttgaaggcatgatgtatgatgtcagaaaaaaaattgaatgaattatttctacatccaaactcaggtttcttctacattagattgaattgaaattttggtgatggtttgggtagactttttttttatatcaagtataatttaaaacatcagattaaataattacactgttcaggcttttaaaaaaataccactgtgagaataaagcgctagcaagatacatcacttactgattttaaaaatacagaaagattttgagtaaattttgtgcccagcaagctgttagttttatttttgtaaaggtatgtaagttattaaatggttaatcatggccttttaaaaataaaataaagtgatacctttacaatgaagacaaaagtttaaaactttctaatacaaacaccattttgggaaatgcttgatttttttctattgcatttgtctgctaaacatttctttggataaatcctgcaaatacttctaacattattctttgattccagcttttagaatgggtgtacaatgccctgtttgtacttactggttagggtcagggtaacttgccagcccaagataaatactttaattgttaaaagtcagaagagacagaatatgtaggaaatgttttttgtttattatgtaaacatggcttacagaattatgaacagtggatagattaaaggcatttaatatttgtaattcataataactgtagaaatggccctaaagcatgctgcataattaataatttatattttcattattataagtgtttatattaatgatcttgcatttgattatatcaaattcgtcatttcatagcaacagtattgttttctctgtttttcttctctaacttctctgaaatcatctcctattaagggatagaaattgttactagaagagaatcacatgttctgtgttcattatccctacacatgtaaattaattattttatcaatactagatagagttcacatgctgactccctggatacctacagttgagaagaaaatgacagacaattatttttcctttaggtcaaaataatgtcactgctatctggataaattataagttcatatatttgaaataagatcctggaaacgaatttaaatggtgtcaaactgcagagcaacagggcttcagtatattcacatctaataggttaatatgtacatttggatgatgatttttcttgataacattaacattaattttattttttcagacatactgtaatttaaaaattaatgtgagcgtttgttttaagttcacagaaaacttaataattcaaattctcaggaattaaggactcaccataacattgtcagttctaatgaaattttgtaaaagatggcaagtttgttacctcacttgagtggggttttccttttcccccaattctaagagaatataatgtgtatactaaaacattaataaacataattttgaaaaaaaaaaaaaaaaaaa

SEQ ID NO: 3978 - DNA, 7709 bp, Homo Sapiens
  NM_015278
attttgaagagaggggtcccggggagctccctccaagatctagaggctccgcggccacccctgccgggtcctgccaagacttgctagaaggaacgagtcgcgtgccttagttagttggttcccgtcacaggaagaaacgcctttgcagtgggtttaattgcttctgggccgagcgaattccccgccgtacaactcagtggtgcggactttgcctcctgctaccctgttgctgcgccgagcggggtgggaaagtttctggagttgtcagtcgcgcagcccgtggccacctagacccgaggtgcgggcgcctgcgaagggcccccgcggggtggccggggccgccggggcatgcagcgcgggggcgcggctcggtgacgccgcgggcggggacccggcatccgggcaggctgcgcgcgggtgcggggcgagggcgccgcggggactgggacgcacggcccgcgcgcgggacacggccatggaggacgcgggagcagctggcccggggccggagcctgagcccgagcccgagccggagcccgagcccgcgccggagccggaaccggagcccaagccgggtgctggcacatccgaggcgttctcccgactctggaccgacgtgatgggtatcctggacggttcactgggaaacatcgatgacctggcgcagcagtatgcagattattacaacacctgtttctccgacgtgtgcgagaggatggaggagctgcggaaacggcgggtttcccaggacctggaagtggagaaacccgatgctagccccacgtcacttcagctgcggtcccagatcgaagagtcgcttggcttctgtagcgccgtgtcaaccccagaagtggaaagaaagaaccctcttcataaatcaaactcagaagacagctctgtaggaaaaggagactggaagaagaaaaataagtatttctggcagaacttccgaaagaaccagaaaggaataatgagacagacttcaaaaggagaagacgttggttatgttgccagtgaaataacgatgagcgatgaggagcggattcagctaatgatgatggtcaaagaaaagatgatcacaattgaggaagcacttgctaggctcaaggaatacgaggcccagcaccggcagtcggctgccctggaccctgctgactggccagatggttcttacccaacgtttgatggctcatcaaactgcaattcaagagaacaatcggatgatgagactgaggagtcggtgaagtttaagaggttacacaagctggtaaactccactcgcagagtcagaaagaaactaattagggtggaagaaatgaaaaaacccagcactgaaggtggggaggagcacgtgtttgagaattcgccggtcctggatgaacggtccgccctctactctggcgtgcacaagaagccccttttctttgatggctctcctgagaaacctcccgaagatgactcagactctctcaccacgtctccatcctccagcagcctggacacctggggggctggccggaagttggtcaaaaccttcagcaaaggagagagccggggcctgattaagccccccaagaagatggggacattcttctcctacccagaagaagaaaaggcccagaaagtgtcccgctccctcaccgagggggagatgaagaagggtctcgggtccctaagccacgggagaacctgcagttttggaggatttgacttgacgaatcgctctctgcacgttggcagtaataattctgacccaatgggtaaagaaggagactttgtgtacaaagaagtcatcaaatcacctactgcctctcgcatctctcttgggaaaaaggtgaaatcagtgaaagagacgatgagaaagagaatgtctaaaaaatacagcagctctgtctctgagcaggactcgggccttgatggaatgcctggctcccctccgccttcacagcccgaccccgaacacttggacaagcccaagctcaaggccgggggttctgtagaaagtcttcgcagttctctcagtgggcagagctccatgagcggtcaaacagtgagcaccactgattcctcaaccagcaaccgggaaagcgtcaagtcggaagatggggatgacgaagagccgccttaccgaggcccgttctgcgggcgtgccagggtgcacaccgacttcacccccagtccctatgacacagactcactcaagctcaagaaaggagatatcatcgatataatcagcaagccacccatggggacctggatgggcctgctgaacaacaaagtcggcacgttcaagttcatctacgtggacgtgctcagtgaagacgaggagaaacccaaacgccccaccaggaggcgtcggaaaggacgaccaccccagcccaagtctgtggaggatctcctggatcggattaacctaaaagagcacatgcccactttcctgttcaatggatatgaagatttggacacctttaagctgctggaggaggaagacttggatgagttaaatatcagggacccggaacacagagctgttctcttgacagcagtggagctgttacaagagtatgacagtaacagcgaccagtcaggatcccaggagaagctgctcgttgacagccagggcctgagtggatgctcaccccgagactcaggatgctacgaaagcagtgagaacctggaaaacggcaagactcggaaagctagcctcctatctgccaagtcatccaccgagcccagcttgaagtcttttagcagaaaccagttgggcaattacccaacattgcctttaatgaaatcaggggatgcactgaagcagggacaggaggagggcaggctgggtggtggccttgccccagacacgtccaagagctgtgacccacctggtgtgactggtttgaataaaaaccgaagaagcctcccagtttccatctgccggagctgtgagaccctggagggcccccagactgtggacacttggccccgatcccattccctggatgaccttcaagtggagcctggtgctgagcaagacgtgcctaccgaggtgacagaaccgccccctcagattgtacctgaagtgccacagaagacgaccgcctcttccacgaaggcccagcccctggagcaagactctgctgtcgacaatgcattgctactgacccaaagcaagagattttctgaacctcagaaattgacaactaagaaactggagggctcaatcgcagcctctggtcgcggcctgtcaccccctcagtgtttgcccagaaactatgatgctcagcctcctggagctaaacacggtttagcaaggacgcctctggagggccacagaaaaggacacgagtttgaaggaacacaccatcccctgggcaccaaagaaggggtagatgctgagcagagaatgcagcccaaaattccatcacagcctccacctgttcctgccaaaaagagcagagaacgccttgctaacggactccaccctgttcccatgggccccagtggggccctccccagtcccgatgcgccatgcctgccagtgaaaaggggcagccccgccagccccaccagccctagcgactgtcccccagcactggctcccaggcctctctcagggcaggcgcctggcagcccaccaagcacaaggccgcccccctggctctcagagctccccgagaacacaagcctccaggagcacggtgtgaagctgggcccggctttgaccaggaaggtctcctgtgcccggggagtggatctagaaacgctcactgaaaacaagctgcacgctgaaggcatcgatctcacggaggagccgtattctgataagcatggccgctgtgggattcctgaagccctggtgcagagatacgcagaggacttggatcagcccgagcgggacgtcgccgccaacatggaccagatccgggtgaagcagcttcggaagcagcaccgcatggcgattccaagtggtggactcacggaaatctgccgaaagcccgtctctcctgggtgcatttcgtctgtgtcagattggctcatttccatcggtctgcccatgtacgccggcaccctctccaccgcgggcttcagcacactgagccaagtgccttctctgtctcacacttgccttcaggaggccggcatcacagaggagagacacataagaaagctcctatctgcagccagactcttcaaactgccgccaggccctgaggccatgtagccaggcccggaatgggcctctctggacaagagccaccctttcactgtgcatatgatgctgatgcaattcctccatcatctctggacgtgcagaccagatccagaagaaaggcctggcgtgtggccaaacagcgtgaaaccttggcacaggactgaggatcctctcctccagaaaagccccctcgaggaaataaattagtgcggttctctttgacccccaaagacaagacaagcacttatttttattttcagaagacaaaagaaccaagatgccaactggctgcgaatgctctatctccagtctgtctctgtgtactggtagaggctgggaggagtagggggcagcctgttccatttctgatagtgcccttgctcttctgtctgtcatcttgcaggatgcccgagggccagatgggcttagctaggccaaagtaacagactcaagagttattgtacattactgaccacgctcatttgttcaaaagttagaacatctggctgcaccaggaaaaaaaaaaaaaaaaagtcctgttcttctttagataaacaagagacattttcataattgctttctagcaatcagcttttatttgccttaatataagcttttaagcagttatctaactagtgtccacaaccctgtaaccatacttccacatcttcagcttaggcagacatcgaacctctctgggatgtttccagcaaaagtgagcttttctaatcgtctcattgtaacatggcttattttgtagaggtattcatcagccacacacttcatgttggtttttggtttttaagctaactacaaatctagtaaaaagctatctgaaattcacaaatatcatgtgtgtgcgtgcgtgcgtgcgcgtgtgtgtctgtattcatagtgactgcttttggttttaaccagtttagtatcgttactgtgtggatcgtcgcgctgcagtattgacttggaatcctgaccatgtccatcccaaaattcagtcctcagttaacggatcatgtttgcaaaaggtcactgtgaggctgcatatttcagaaagatgtccttaataagggaagtcatgtataagatgttttctaaaagacttttcagtattacaactaatactattattatccttctttttttatttagataattcttttaatttaaacaaaggttcactatggaaccagacaaatctcattagccatgtgttaagtatttgctactttaaattgttttacaactgatttcagcacattctatccttttttttttttgaaatggagtttcgctcttgtcacccaggctggagtgcaatggcacgatcttggctcactgcaacctcagtctcccaggttcaagtgattctcctgccttagcctcccgagtagctgggattataggcacccaccaccacgcccagctaatttttgtattattagtagagacagggtttcaccatgttggccaggctggtctcaaactcaactcctgacctcaggtggtccacccgcctcagcctcccaaagtgctgggattacaggtgtgagccaccgcacctggcctctgtcctcttttagtctagtgtctggttttctagcaaacagtaaatttaaacaagtaaactattatggtttccattgcttacaaaatgattttcctttacattcttatcatgaacactattttaagcatcaaatgcaatcatctaaaatataaaggtcaatcatttataatagaaacaccttgaccacaagcccttgattgaacattttataatatttcatctacttattaaaacaaataatttcccttgggttggaggggaagtgatttcataaattaattagaaagccatctttagcatattgcttatgtctggatccatgtttctgaggaaaaagacattctcaggtgatgtatttttttcatgcattagtatgcatttttaaaaaataatgcatgtttctttaataattaattttcatcttctataagatgccatgtgaagaagttgtggaaatgtagaataaaaagctaaagctgccaaatttctgttgaactcttaaaaacagctcatgtttgtttgtcctctcgggttgtggcctagcctatttgcaatgtaatgaagctgcagggttcttgtatagctaaagcgttcaatgcatttcacgtgctgtggtggatgtgggtgctgtagacaggcttcttctcttcctgctctcaaaatacctcggcttgacatttggacagatcctgtcattgtttaagctgagcaaaaaaccacacaaaagttgtgtaagagatgagataacaaaggagcgagagaaatctcatgtgaatttccaagttttaattcgttctccatgaaggattttcatttcagtgaaagtcgcagcagaagagggaactttctggagtttttgagaatgccaaaccacatttttatcacacttctttggaaatcaatgcctttgcatagaaaatcaaattcagggaccacaaagaattttcagtgggaatgtctagtctgaggggtctgaggttgtttttactttattgtgttgtttaaatattttaaaaatatctttagcgtttggtcttttttttttctgtaaacatttaatttggtctgagaaaagctgaatgtttgggtgtgacgtttgactgaggtggattggggctgcctgtggacattagtgaacaggtggtaggcttcaggaatatccagttttaatcagttgcatttggtacagaattttgagtaatggtgaaaattgttgtctttggaaagcacaaaagaaacctggaaaggcagttcggctcaggtagctacacataacattgtgtatgattttcacttcaaagctgtctggaaggaaatgcagtcagctccagctagtactatttatgtacccagataactaagatattgtttcatggccttgccttagtcagaggcccttttctctgtcctgaacccccaggtatgggtgaaattggaaattactaatctattggaaatcagttcctgacatagtaaagtttgctttcataactgcagcaaaaaaggtcaacttgccaagtcactgctgccatgtgtgtactgtattattttcagaaaaaaatataatagtctgagtccaagttatcttgatttaaaattgatagagaaaagaaactgtcgagcaagttatataacaactaacaacattgcactttctgtatatgaaatcaatatttaaataacttatttttctccattgctgttcttaaaaacattgtaagtagctgtaatataccagtaccaatatgttcttgcaattgcttcagcccaagaaagctgtgtattgttttaaaaattgtaaaaattattgtgatgattcatttagcataaagagaggtggacggaagggttttcctatgtatcaaaacttgtctataattatgtcatctatgtacctagaaaaaagtaaataaatttcttcagttgaatatg

SEQ ID NO: 3979 - DNA, 6463 bp, Homo Sapiens
  NM_015288
ctctcttgctcgctcgctccctctctctcctgctggctgcctgttctaggaagccagcgcggagaggggggggatgcacagcacaggggagagagattgcgcatgttggtcagtcgtgttttaaagagtacagtgcggggaggctgagaggggcgcatgcaacaacaacttttggaaggatggaagagaagaggcgaaaatactccatcagcagtgacaactctgacaccactgacagtcatgcgacatctacatccgcatcaagatgctccaaactgcccagcagcaccaagtcgggctggccccgacagaacgaaaagaagccctccgaggttttccggacagacttgatcacagccatgaagatcccggactcataccagctcagcccggatgactactacatcctggcagacccatggcgacaggaatgggagaaaggtgtgcaggtgcctgccggggcagaggccatcccagagcccgtggtgaggatcctcccaccactggaaggcccccctgcccaggcatccccgagcagcaccatgcttggtgagggctcccagcctgattggccagggggcagccgctatgacttggacgagattgatgcctactggctggagctcatcaactcggagcttaaggagatggagaggccggagctggacgagctgacattagagcgtgtgctggaggagctggagaccctgtgccaccagaatatggccagggccattgagacgcaggaggggctgggcatcgagtacgacgaggatgttgtctgcgacgtgtgtcgctctcctgagggcgaggatggcaacgagatggtcttctgtgacaagtgcaacgtctgtgtgcatcaggcatgctacgggatcctcaaggtgcccacgggcagctggctgtgccggacgtgtgccctgggtgtccagccaaagtgcctgctctgccccaagcgaggaggagccttgaagcccactagaagtgggaccaagtgggtgcatgtcagctgtgccctatggattcctgaggtcagcatcggctgcccagagaagatggagcccatcaccaagatctcgcatatcccagccagccgctgggctctgtcctgcagcctctgcaaggaatgcacaggcacctgcatccagtgttccatgccttcctgcgtcacagcgttccatgtcacatgcgcctttgaccacggcctggaaatgcggactatattagcagacaacgatgaggtcaagttcaagtcattctgccaggagcacagtgacgggggcccacgtaatgagcccacatctgagcccacggaacccagccaggctggcgaggacctggaaaaggtgaccctgcgcaagcagcggctgcagcagctagaggaggacttctacgagctggtggagccggctgaggtggctgagcggctggacctggctgaggcactggtcgacttcatctaccagtactggaagctgaagaggaaagccaatgccaaccagccgctgctgacccccaagaccgacgaggtggacaacctggcccagcaggagcaggacgtcctctaccgccgcctgaagctcttcacccatctgcggcaggacctagagagggttagaaatctgtgctacatggtgacaaggcgcgagagaacgaaacacgccatctgcaaactccaggagcagatattccacctgcagatgaaacttattgaacaggatctgtgtcgaggcctgtccacctcattccccatcgatggcaccttcttcaacagctggctggcacagtcggtgcagatcacagcagagaacatggccatgagcgagtggccactgaacaatgggcaccgcgaggaccctgctccagggctgctgtcagaggaactgctgcaggacgaggagacactgctcagcttcatgcgggacccctcgctgcgacctggtgaccctgctaggaaggcccgaggccgcacccgcctgcctgccaagaagaaaccaccaccaccaccaccgcaggacgggcctggttcacggacgactccagacaaagcccccaagaagacctggggccaggatgcaggcagtggcaaggggggtcaagggccacctaccaggaagccaccacgtcggacatcttctcacttgccgtccagccctgcagccggggactgtcccatcctagccacccctgaaagccccccgccactggcccctgagaccccggacgaggcagcctcagtagctgctgactcagatgtccaagtgcctggccctgcagcaagccctaagcctttgggccggctccggccaccccgcgagagcaaggtaacccggagattgccgggtgccaggcctgatgctgggatgggaccaccttcagctgtggctgagaggcccaaggtcagcctgcattttgacactgagactgatggctacttctctgatggggagatgagcgactcagatgtagaggccgaggacggtggggtgcagcggggtccccgggaggcaggggcagaggaggtggtccgcatgggcgtactggcctcctaactcacccccttccctgtcccaggccctgccctggtccccccacaaggcctcagcccagtcacaactgccatttccagtctctgctgagtgtcccagaccctcgaggctgccactccgtcgtggttttatttttaatatagagagagttttgaattctacactgttgtctttcctctgtgctggcctaggacattaggattccttccacggctccggccgctaggaccctgccaggtcccgcgcaccatccctgccctgcccacgtggtattgctgggctcctggctagatgcaagcaaggtggacaagagctcaggactccagcccactgccactgggtgacacagactgtcgtttgggcattatttcatggcagatgggccagtccagggcctaccccgccttgcccccagatcccactggggtccatttggggggtcctgctacactccaccgatccccaaggaagtataataaacgatacccagccagagtctactcactgtcacaagcacaacgagtttatatgagaaagcactgagggggtgcagagggcccgctagttccaggggaactgaaagctgttcctgatcagcccgtatcatctgaggcctgcctgcccaccctgccaccctcccctcccttgctgctctgcccctgccagtgcccagcccagcggctctgggaaggggttcccagaatccctcctgagctgtgccatttactcaggggactcccaaacagccagctgccagtgcaggtggagggctgtaggggagggccagtgcccagacagggtcatggggctcagaccagcccactgtagagaatcactctgaggctccaacttccttccttccttcggggccagtctcggccgaagtctggtcacgctcagacagagctgaccagaccagaccgtttgccttttcaagtttcctagtcctgctacaagatgagcttcttccgtggtttccttttggaaactcctccttccaacaagcagtgggatcccggggcccagggcgggccggtgttggccgctggggctgttgtaagtcttgctggatgttcccctgttcctgagccttaacccctcgcacagccatccccccccccgtcctgccatccccccccgccgtcctgccttccccaccccacccttaggtcccaggtagttgctctgaagagtttcagtagagtggccccagggtgatagctcagggaacaacaaaaaaggaattccgtgaaaacatttttttttctttgatgaattactcctgggtcacttccaccactggtaaagccagaacttctccaaaaagaaccttgcaaaaagtccagtgaatcagtcgaatcattctgtggatgccaaagaatattttgaccataatacagcacagcctggacctgacaacttgtcatttggacttttttttaaatggagttctttagcaacaaagtatagaaacatgttcattgcacacacccaaggagaagagctcaagcgcttggaagaggatgctttgctgctgctgaagtgtacctgggtgttagatttcagatcctgggctgagcccactgtgagctttcctaaactgtgagactcacagaggggaaagatactgacggtgaaaccagcatggaaaacgtctttaccatgtggttccctcctccccaaatacataaagcaaataagcaggatggggaacagcttgaccttcatccacccctaactccaaaactatcaaggtacgacagtggcattgtcatcgacactcaatttcatgtgaattttagcaaaacaggaaacaaagataatgactcagttcagaggatcggacaaatgtgtctagtccgggtggactcggagggagtggggtgggcttcaaggattctgggcgttgggatggcatgagctaccctgtagagtttagtctgcctgcccgccttggtagtagtgaccagtcagtgtcagcatcagtgtcccaaccccagtctctgtttactgcctttgaacagaacttcttccttccccatgctttgggtcacctcgggctgcaaccctgtctgtgccagattgcccggtctgaccctgcaggaagcaaagaggtgagcttaaagaacaaccaaactctgccaggggtcccagaaagcccagggtccagcagtctcagcacttggccccttgccccttcacaccatcctggggcaggggctgggcctccctggtggcaggggtgggtggagaattagggagagggtgcaacgagtctggccccttgcctcgggctggctggtgttcttccaagagcctctgctcacattgttggcctctggattctggcccttcttcattggctgttgctttggactggactgttgctgagcctgtgtcctgcagaacccagatgtctgttaggctggctggctgctgcgaggggaggggggtggcctttcatttggggtgccctttcactcccaggccaagccctggagcaatcttcttcaggcagctgtctccacctccaggatgtccagcaggctgcaaggagaaggatgccagccacccatcctcccccagttcccagcctttcccctgttggtcacagccgcttctgtctttttccggtctactgtccccagtgtagagggctttgctgtccctgagactgaggcaggttccttttccaggtcagaggtggaggtagatctttctctcaaccacatctgcctccacacacagctcctccgcagggaaggagaagctgctctgtaactcattctggctatcgtcccccttctcactgacctgaccgcccaccacctccttccccctcatcacatgacaaaggataatgtgcaagaaaagtatttttatgtatcataaatgtattttgaaacaaatgagaagaagaaaggtagaagggtttattttattaaatgagcctgacttagtgacagtgtgtgagcatttgcaatgtaagggcctcagcttccttggagaagccaccccaggtttccagacatagatgttgaattgtttgtggggggtgtgccaggccacgtctcgtgtgtccgtatgcaggcatgcctgtgtatactgtgtatgggcacactgggactagctgggacaattcctagagattcaactgcccaattctaaccaacattggcagcggctgaacttggcatttccttgctaactgccagatgtggccaacctttgtccatatgcaaaccactgaaaaatgatctggatttctatagcaaggcccttggggagggcactctcccatgcccttggcctcgctggccacattggccaatgagccagggctggagtctgagacctttggttgttctttaaggcacctcctgccactttctccctcagaggcacaaacactttgtgttccacgtcagtttgaggggacggtggggggatgatatgaatgtcacaggaggagacaccttctgtctttgtttcaaagaaagtgatgtgccatttgttaatatacaagagaaatattgaaaatatattgaaaagagcaattttaaattatttttggcttatgttgcaatatttattttcttgtattagaaaagattcctttgtagagaaaaaatgtatttttcattaacgcaaagacctatttctcctttttgtacattgtccatgtgcgcaacccttaacgagcaatagaatgtatggtcacctgggtgtggccagtgcccgctgtgccctgcatgattctgtgttgccgctgctgcatagttcccagccccatcctgtcctgctcactcatgggggcttccagaccccggccccaccagggcttgtgtcatagggagccctttgcactcctcgtgtgttggcaaacgcagttaataaagcagtgttttctgtgc

SEQ ID NO: 3980 - DNA, 4255 bp, Homo Sapiens
  NM_015292
tggcttgaagtcccctcctccatcccggggatcacgttttgcctgggggagctgatcgcaagactaggcaacctccagccagtccctgggtcgggcggatcctcccagaggtggcacaatggagcgatctccaggagagggccccagccccagccccatggaccagccctctgctccctccgaccccactgaccagccccccgctgctcacgcaaagccagacccaggttctgggggccaacctgctggccctggcgcggcgggtgaggccctggcggtgctgacttcattcgggaggcggttgctggtgctgatacctgtgtatttggccggggcagtgggactcagcgtgggtttcgtgctcttcggcctcgccctctacctgggctggcgccgggtccgcgacgagaaagaacggagccttcgagcagcgaggcagctactggacgacgaggagcagctcactgcgaaaactctctatatgagtcatcgagagctacctgcctgggtcagcttcccagacgtggaaaaggctgaatggctcaataagattgtggcccaggtctggcccttcctgggccagtatatggagaagcttctggctgaaactgtggctccggctgttaggggatctaacccccatctgcaaacatttacatttacacgagtggaactgggtgaaaagccattgcgcatcattggagtcaaggttcacccaggtcagagaaaagagcagatcctgctggacttgaacatcagctatgtaggtgatgtgcagattgatgtggaagtgaagaaatatttttgcaaagcaggagtcaagggcatgcagctacatggcgttttgcgggtgatactggagccactcattggggaccttcccttcgtgggggctgtgtcaatgttcttcatccgacgcccgaccctagacatcaactggacagggatgaccaacctgctggatatcccaggacttagctcactctctgacaccatgatcatggactccattgctgccttcctcgtgttgcccaaccgattactggtgccccttgtgcctgaccttcaagatgtggctcagttgcgttcccctctgcccaggggcattattcgaattcacctgctggctgctcgagggctgagttccaaggacaaatatgtgaagggcctgattgagggcaagtcagacccatatgcacttgtgcgtttgggtacccagacattctgcagtcgtgtcattgatgaagaactcaacccacagtggggagagacttatgaggtgatggtacacgaggtcccagggcaggagattgaagtggaggtgttcgacaaggatccagataaagatgactttctgggcagaatgaagctggatgtagggaaggtgttacaggctagcgttctggatgattggttccctctacaaggtgggcaaggccaagttcacttgaggctagaatggctgtcacttttgtcagatgcagagaaactggagcaggttctacagtggaattggggagtctcctctcgaccagatcccccgtcagctgccatcttagttgtctacctggatcgggcccaggatcttcctctgaagaaggggaacaaggaacccaaccctatggtacaactgtcaattcaggatgtgactcaggagagcaaggctgtctacagtaccaactgcccagtgtgggaggaagcgttccggttcttcctacaagaccctcaaagccaggagctcgatgtgcaagtgaaggatgattccagggccctgactttaggagcactgacgctgcctctggcccgcctgctgactgccccagaactcatcctggaccagtggttccagctcagcagctctggtccaaactccagactctatatgaaactagtcatgaggatcctgtacttggattcatcagaaatatgcttccccacggtgcctggttgtcctggtgcttgggacgtggacagtgagaatccccagagaggcagcagtgtggatgccccacctcgaccctgtcacacgactcctgatagccagtttgggactgagcatgtgcttcggatccatgtattagaggcccaggacctgattgccaaagaccgtttcttggggggactggtgaagggcaagtcagacccctatgtcaaactaaagttggcaggacgaagcttccggagccatgttgttcgggaagatctcaatccccgctggaatgaggtttttgaggtgatcgtcacatcagttccaggccaagagctagaggttgaagtctttgacaaggacttggacaaggatgattttctgggcaggtgtaaagtgcgtctcaccacagtcttaaacagtggcttccttgatgagtggctgaccctggaggatgtcccatctggccgcctgcacttgcgcctggagcgtctcaccccccgtcccactgctgctgagttagaggaggtgctgcaggtgaatagtttgatccagactcagaagagtgcggagctggctgcggccctgctatccatctatatggagcgggcagaggacctcccgctgcgaaaaggcaccaagcacctcagcccttatgctactctcactgtgggagatagttctcataaaaccaagactatttcgcaaacttcagcccctgtctgggatgagagtgcctcctttctcatcaggaaaccacacactgagagcctagagttgcaggttcggggtgagggcactggcgtgctgggctcattatccctgcccctctcagagctcctcgtggctgaccagctctgcttggaccgctggtttacactcagcagtggtcaggggcaggtgctactgagagcacagctagggatcctggtgtcccagcactcgggagtggaagctcatagccacagctacagccacagctcctcatcgctgagtgaagaaccagagctctcggggggaccccctcacatcacctcctcagccccagagctccggcagcgcctaacacatgttgacagtccccttgaggctccagccgggcctctgggccaggtgaaactgactctgtggtactacagtgaagaacgaaagctggtcagcattgttcatggttgccggtcccttcgacagaatggacgtgatcctcctgatccctatgtgtcactgttgctactgccagacaagaaccgaggcaccaagaggaggacctcacagaagaagaggaccctgagtcctgaatttaatgaacggtttgagtgggaactccccctggatgaggcccagagacgaaagctggatgtctctgtcaagtctaattcctccttcatgtcaagagagcgtgagctgctggggaaggtgcagctggacctagctgagacagacctttcccagggtgtagcccggtggtatgacctgatggacaacaaggacaagggcagctcctaggagctggcgagtcccagcctgactgctctgtcttcctgccttcgtctcgctccatcaccgcctcaatgtgatgagcctaaagctagggtccaagggcagagcctgtgcccttcagccctttcacctaacaggcccatattcgggcctttgcctgaccaaagagaagaaccgtatgttccctttactgcacggcctttatccttctgggcccctggggcggggacctgagctggctgtttcctgctttgcctgcacattgttctcccttcctcccaactcctcagggccttctgtatctgtgcctggccagtggcagcactagcagtggtattagcttatgccaaatacagctttggaaggatctttttttctttaactagatggtcaccttcttccctaccacacatgggtgggaaggtggacaggctaacctctccagctgtgagcctcttagactactgcatgtagcaaatgttcagcagctcaggcccccatgtccagttctgtccccactgtcctcaaccctgtcctgaaaattctactgctttgatggctggggccagtctcttgtcactttggaaactgaggacgcgtggattctactcaagcctccaagtagtggcatatcagtcttggagctcctagctggtgatacggagagggctttggaggacttgggacagcagggccaatttttttgcccaagtgcctaggctgctaactcactgactagaacttaatctggtactttacagttttgcaccaactctgccaagccactggatcttacattaaacatcatactcaaaccagcaaaaaaaa

SEQ ID NO: 3981 - DNA, 4520 bp, Homo Sapiens
  NM_015294
acagcgtcctgcgcgcatgcgcttcgcagcttctctcgccgccgcgcccccagctgctctggttacggttggtgtttgcgaattctctgcggcaccttcttcgctgaactccaccgtcagttccataggcgcgcgcccgcgtcacgtgggccgaggttccggcgcggctgctggccggcggctgagccgggagaaaggagctgcggccaccgttcgccctacttctgcgcctcggggcgggcgcgccggtaaaaatggcgaaatgggggtaggcggcgctggacctgaagagatggggcgcgcaggtggggcggttgtcagagccccctgacgtgggcgccgggcttttatcggcgatttgatctggcgacctcgggccggcgcctaagaggtcagactgcggagcctgcgggtcgccagcggccccgccgagagccggaggcaatggatgaacagagcgtggagagcattgctgaggttttccgatgtttcatttgtatggagaaattgcgggatgcacgcctgtgtcctcattgctccaaactgtgttgtttcagctgtattaggcgctggctgacagagcagagagctcaatgtcctcattgccgtgctccactccagctacgagaactagtaaattgtcgttgggcagaagaagtaacacaacagcttgatactcttcaactctgcagtctcaccaaacatgaagaaaatgaaaaggacaaatgtgaaaatcaccatgaaaaacttagtgtattttgctggacttgtaagaagtgtatctgccatcagtgtgcactttggggaggaatgcatggcggacatacctttaaacctttggcagaaatttatgagcaacacgtcactaaagtgaatgaagaggtagccaaacttcgtcggcgtctcatggaactgatcagcttagttcaagaagtggaaaggaatgtagaagctgtaagaaatgcaaaagatgagcgtgttcgggaaattaggaatgcagtggagatgatgattgcacggttagacacacagctgaagaataagcttataacactgatgggtcagaagacatctctaacccaagaaacagagcttttggaatccttacttcaggaggtggagcaccagttgcggtcttgtagtaagagtgagttgatatctaagagctcagagatccttatgatgtttcagcaagttcatcggaagcccatggcatcttttgttaccactcctgttccaccagactttaccagtgaattagtgccatcttacgattcagctacttttgttttagagaatttcagcactttgcgtcagagagcagatcctgtttacagtccacctcttcaagtttcaggactttgctggaggttaaaagtttacccagatggaaatggagttgtgcgaggttactacttatctgtgtttctggagctctcagctggcttgcctgaaacttctaaatatgaatatcgtgtagagatggttcaccagtcctgtaatgatcctacaaaaaatatcattcgagaatttgcatctgactttgaagttggagaatgctggggctataatagatttttccgtttggacttactcgcaaatgaaggatacttgaatccacaaaatgatacagtgattttaaggtttcaggtacgttcaccaactttctttcaaaaatcccgggaccagcattggtacattactcagttggaagctgcacagactagttatatccaacaaataaacaaccttaaagagagacttactattgagctgtctcgaactcagaagtcaagagatttgtcaccaccagataaccatcttagcccccaaaatgatgatgctctggagacacgagctaagaagtctgcatgctctgacatgcttctcgaaggtggtcctactacagcttctgtaagagaggccaaagaggatgaagaagatgaggagaagattcagaatgaagattatcatcacgagctttcagatggagatctggatctggatcttgtttatgaggatgaagtaaatcagctcgatggcagcagttcctctgctagttccacagcaacaagtaatacagaagaaaatgatattgatgaagaaactatgtctggagaaaatgatgtggaatataacaacatggaattagaagagggagaactcatggaagatgcagctgctgcaggacccgcaggtagtagccatggttatgtgggttccagtagtagaatatcaagaagaacacatttatgctccgctgctaccagtagtttactagacattgatccattaattttaatacatttgttggaccttaaggaccggagcagtatagaaaatttgtggggcttacagcctcgcccacctgcttcacttctgcagcccacagcatcatattctcgaaaagataaagaccaaaggaagcaacaggcaatgtggcgagtgccctctgatttaaagatgctaaaaagactcaaaactcaaatggccgaagttcgatgtatgaaaactgatgtaaagaatacactttcagaaataaaaagcagcagtgctgcttctggagacatgcagacaagccttttttctgctgaccaggcagctctggctgcatgtggaactgaaaactctggcagattgcaggatttgggaatggaactcctggcaaagtcatcagttgccaattgttacatacgaaactccacaaataagaagagtaattcgcccaagccagctcgatccagtgtagcaggtagtctatcacttcgaagagcagtggaccctggagaaaatagtcgttcaaagggagactgtcagactctgtctgaaggctccccaggaagctctcagtctgggagcaggcacagttctccccgagccttgatacatggcagtatcggtgatattctgccaaaaactgaagaccggcagtgtaaagctttggattcagatgctgttgtggttgcagttttcagtggcttgcctgcggttgagaaaaggaggaaaatggtcaccttgggggctaatgctaaaggaggtcatctggaaggactgcagatgactgatttggaaaataattctgaaactggagagttacagcctgtactacctgaaggagcttcagctgcccctgaagaaggaatgagtagcgacagtgacattgaatgtgacactgagaatgaggagcaggaagagcataccagtgtgggcgggtttcacgactccttcatggtcatgacacagcccccggatgaagatacacattccagttttcctgatggtgaacaaataggccctgaagatctcagcttcaatacagatgaaaatagtggaaggtaattgccaaatcaagagaactgacttgcaagctaccttgaccctgaattttgctgtagttggtgctcaaatttgtcatcagtcagataatcagatttggtcttatttcttcattatctcgacctgaaatagtaatttggaaactgttggaaggtggcacagtttagtctaagacagcagtagtacatgggaaaaacagtatgggaagagttctttgtaatgtaaggaaataacaatgtagttctctattaatttagcaaatttgtacattcacaaaaggcagtttgtctactacagcagaaggctggttaactgccagaaaatgtacctccaggccctgcatgccgtcagtaacccgcccggcattggtgctctactgtctttggctagagcttagttgtgtttaaataatcatctttatatttggggttttaattacagttccattagtgcctgtagattagtgaacagaaaattgctttggaagagattctgccctgtagacactatgtgaataactgaagtaacactagactgaatctcctttttggagtatgtatcttctctcacttgttcaagtacaggcacactgttcaaccgcatggtatctttctgttgtgtgacttctacaaatgtaattttaaatgaaattaagttaacatggattcattacgttcctggccctgtagacacgtgtaagattatttaaaattctttcatttttttctgcctcttactatacgactgtagtgcaacaaatattttaaagcccccttttcttctttattttcattagttgtacattgatttcagtgtcaacacatttaaagattcattcatgttgcacagtggcttacatgaacgtgaaactgtgatataaggttttctttcatactcataattagcccaaaacagttgccaaactttgccattgtgctcctgcatttgtgtttgagctgctatatatttgtggaaattacactgaaagttgactaagagactattgaaaaagcatgaataattaaatatacatgtgagagacatctcatctgctgtattttacttagtgaatattgttcactcttccgtgtctgatgtcttgctgaatgctgtgactcatagtttacttttgttcaaaatagtttgcactttttgttaataaaatcaacttgagaaaataaaaa

SEQ ID NO: 3982 - DNA, 7544 bp, Homo Sapiens
  NM_015296
gcggccgggccgggccgcgggagcaggcggaggcggaggcggcgggggcaggaggatgtcgcagccgccgctgctccccgcctcggcggagactcggaagttcacccgggcgctgagtaagccgggcacggcggccgagctgcggcagagcgtgtctgaggtggtgcgcggctccgtgctcctggcaaagccaaagctaattgagccactcgactatgaaaatgtcatcgtccagaagaagactcagatcctgaacgactgtttacgggagatgctgctcttcccttacgatgactttcagacggccatcctgagacgacagggtcgatacatatgctcaacagtgcctgcgaaggcggaagaggaagcacagagcttgtttgttacagagtgcatcaaaacctataactctgactggcatcttgtgaactataaatatgaagattactcaggagagtttcgacagcttccgaacaaagtggtcaagttggataaacttccagttcatgtctatgaagttgacgaggaggtcgacaaagatgaggatgctgcctcccttggttcccagaagggtgggatcaccaagcatggctggctgtacaaaggcaacatgaacagtgccatcagcgtgaccatgaggtcatttaagagacgatttttccacctgattcaacttggcgatggatcctataatttgaatttttataaagatgaaaagatctccaaagaaccaaaaggatcaatatttctggattcctgtatgggtgtcgttcagaacaacaaagtcaggcgttttgcttttgagctcaagatgcaggacaaaagtagttatctcttggcagcagacagtgaagtggaaatggaagaatggatcacaattctaaataagatcctccagctcaactttgaagctgcaatgcaagaaaagcgaaatggcgactctcacgaagatgatgaacaaagcaaattggaaggttctggttccggtttagatagctacctgccggaacttgccaagagtgcaagagaagcagaaatcaaactgaaaagtgaaagcagagtcaaacttttttatttggacccagatgcccagaagcttgacttctcatcagctgagccagaagtgaagtcatttgaagagaagtttggaaaaaggatccttgtcaagtgcaatgatttatctttcaatttgcaatgctgtgttgccgaaaatgaagaaggacccactacaaatgttgaacctttctttgttactctatccctgtttgacataaaatacaaccggaagatttctgccgatttccacgtagacctgaaccatttctcagtgaggcaaatgctcgccaccacgtccccggcgctgatgaatggcagtgggcagagcccatctgtcctcaagggcatccttcatgaagccgccatgcagtatccgaagcagggaatattttcagtcacttgtcctcatccagatatatttcttgtggccagaattgaaaaagtccttcaggggagcatcacacattgcgctgagccatatatgaaaagttcagactcttctaaggtggcccagaaggtgctgaagaatgccaagcaggcatgccaaagactaggacagtatagaatgccatttgcttgggcagcaaggacattgtttaaggatgcatctggaaatcttgacaaaaatgccagattttctgccatctacaggcaagacagcaataagctatccaatgatgacatgctcaagttacttgcagactttcggaaacctgagaagatggctaagctcccagtgattttaggcaatctagacattacaattgataatgtttcctcagacttccctaattatgttaattcatcatacattcccacaaaacaatttgaaacctgcagtaaaactcccatcacgtttgaagtggaggaatttgtgccctgcataccaaaacacactcagccttacaccatctacaccaatcacctttacgtttatcctaagtacttgaaatacgacagtcagaagtcttttgccaaggctagaaatattgcgatttgcattgaattcaaagattcagatgaggaagactctcagccccttaagtgcatttatggcagacctggtgggccagttttcacaagaagcgcctttgctgcagttttacaccatcaccaaaacccagaattttatgatgagattaaaatagagttgcccactcagctgcatgaaaagcaccacctgttgctcacattcttccatgtcagctgtgacaactcaagtaaaggaagcacgaagaagagggatgtcgttgaaacccaagttggctactcctggcttcccctcctgaaagacggaagggtggtgacaagcgagcagcacatcccggtctcggcgaaccttccttcgggctatcttggctaccaggagcttgggatgggcaggcattatggtccggaaattaaatgggtagatggaggcaagccactgctgaaaatttccactcatctggtttctacagtgtatactcaggatcagcatttacataattttttccagtactgtcagaaaaccgaatctggagcccaagccttaggaaacgaacttgtaaagtaccttaagagtctgcatgcgatggaaggccacgtgatgatcgccttcttgcccactatcctaaaccagctgttccgagtcctcaccagagccacacaggaagaagtcgcggttaacgtgactcgggtcattattcatgtggttgcccagtgccatgaggaaggattggagagccacttgaggtcatatgttaagtacgcgtataaggctgagccatatgttgcctctgaatacaagacagtgcatgaagaactgaccaaatccatgaccacgattctcaagccttctgccgatttcctcaccagcaacaaactactgaagtactcatggtttttctttgatgtactgatcaaatctatggctcagcatttgatagagaactccaaagttaagttgctgcgaaaccagagatttcctgcatcctatcatcatgcagtggaaaccgttgtaaatatgctgatgccacacatcactcagaagtttcgagataatccagaggcatctaagaacgcgaatcatagccttgctgtcttcatcaagagatgtttcaccttcatggacaggggctttgtcttcaagcagatcaacaactacattagctgttttgctcctggagacccaaagaccctctttgaatacaagtttgaatttctccgtgtagtgtgcaaccatgaacattatattccgttgaacttaccaatgccatttggaaaaggcaggattcaaagataccaagacctccagcttgactactcattaacagatgagttctgcagaaaccacttcttggtgggactgttactgagggaggtggggacagccctccaggagttccgggaggtccgtctgatcgccatcagtgtgctcaagaacctgctgataaagcattcttttgatgacagatatgcttcaaggagccatcaggcaaggatagccaccctctacctgcctctgtttggtctgctgattgaaaacgtccagcggatcaatgtgagggatgtgtcacccttccctgtgaacgcgggcatgactgtgaaggatgaatccctggctctaccagctgtgaatccgctggtgacgccgcagaagggaagcaccctggacaacagcctgcacaaggacctgctgggcgccatctccggcattgcttctccatatacaacctcaactccaaacatcaacagtgtgagaaatgctgattcgagaggatctctcataagcacagattcgggtaacagccttccagaaaggaatagtgagaagagcaattccctggataagcaccaacaaagtagcacattgggaaattccgtggttcgctgtgataaacttgaccagtctgagattaagagcctactgatgtgtttcctctacatcttaaagagcatgtctgatgatgctttgtttacatattggaacaaggcttcaacatctgaacttatggatttttttacaatatctgaagtctgcctgcaccagttccagtacatggggaagcgatacatagccagaacaggaatgatgcatgccagattgcagcagctgggcagcctggataactctctcacttttaaccacagctatggccactcggacgcagatgttctgcaccagtcattacttgaagccaacattgctactgaggtttgcctgacagctctggacacgctttctctatttacattggcgtttaagaaccagctcctggccgaccatggacataatcctctcatgaaaaaagtttttgatgtctacctgtgttttcttcaaaaacatcagtctgaaacggctttaaaaaatgtcttcactgccttaaggtccttaatttataagtttccctcaacattctatgaagggagagcggacatgtgtgcggctctgtgttacgagattctcaagtgctgtaactccaagctgagctccatcaggacggaggcctcccagctgctctacttcctgatgaggaacaactttgattacactggaaagaagtcctttgtccggacacatttgcaagtcatcatatctgtcagccagctgatagcagacgttgttggcattgggggaaccagattccagcagtccctgtccatcatcaacaactgtgccaacagtgaccggcttattaagcacaccagcttctcctctgatgtgaaggacttaaccaaaaggatacgcacggtgctaatggccaccgcccagatgaaggagcatgagaacgacccagagatgctggtggacctccagtacagcctggccaaatcctatgccagcacgcccgagctcaggaagacgtggctcgacagcatggccaggatccatgtcaaaaatggcgatctctcagaggcagcaatgtgctatgtccacgtaacagccctagtggcagaatatctcacacggaaagaagcagtccagtgggagccgccccttctcccccacagccatagcgcctgcctgaggaggagccggggaggcgtgtttagacaaggatgcaccgccttcagggtcattaccccaaacatcgacgaggaggcctccatgatggaagacgtggggatgcaggatgtccatttcaacgaggatgtgctgatggagctccttgagcagtgcgcagatggactctggaaagccgagcgctacgagctcatcgccgacatctacaaacttatcatccccatttatgagaagcggagggattttgagaggctggcccatctgtatgacacgctgcaccgggcctacagcaaagtgaccgaggtcatgcactcgggccgcaggcttctggggacctacttccgggtagccttcttcgggcaggcagcgcaataccagtttacagacagtgaaacagatgtggagggattctttgaagatgaagatggaaaggagtatatttacaaggaacccaaactcacaccgctgtcggaaatttctcagagactccttaaactgtactcggataaatttggttctgaaaatgtcaaaatgatacaggattctggcaaggtcaaccctaaggatctggattctaagtatgcatacatccaggtgactcacgtcatccccttctttgacgaaaaagagttgcaagaaaggaaaacagagtttgagagatcccacaacatccgccgcttcatgtttgagatgccatttacgcagaccgggaagaggcagggcggggtggaagagcagtgcaaacggcgcaccatcctgacagccatacactgcttcccttatgtgaagaagcgcatccctgtcatgtaccagcaccacactgacctgaaccccatcgaggtggccattgacgagatgagtaagaaggtggcggagctccggcagctgtgctcctcggccgaggtggacatgatcaaactgcagctcaaactccagggcagcgtgagtgttcaggtcaatgctggcccactagcatatgcgcgagctttcttagatgatacaaacacaaagcgatatcctgacaataaagtgaagctgcttaaggaagttttcaggcaatttgtggaagcttgcggtcaagccttagcggtaaacgaacgtctgattaaagaagaccagctcgagtatcaggaagaaatgaaagccaactacagggaaatggcgaaggagctttctgaaatcatgcatgagcagctgggatgatctgccccctggaggagaagacgagcgtcttaccgaattcccttcacatcttcaacgccatcagtgggactccaacaagcacaatggttcacgggatgaccagctcgtcttcggtcgtgtgattacatctcatggcccgtgtgtggggacttgctttgtcatttgcaaactcaggatgctttccaaagccaatcactggggagaccgagcacagggaggaccaaggggaaggggagagaaaggaaataaagaacaacgttatttcttaacagactttctataggagttgtaagaaggtgcacatatttttttaaatctcactggcaatattcaaagttttcattgtgtcttaacaaaggtgtggtagacactcttgagctggacttagattttattcttccttgcagagtagtgttagaatagatggcctacagaaaaaaaaggttctgggatctacatggcagggagggctgcactgacattgatgcctgggggaccttttgcctcgaggctgagctggaaaatcttgaaaatattttttttttcctgtggcacattcaggttgaatacaagaactatttttgtgactagtttttgatgacctaagggaactgaccattgtaatttttgtaccagtgaaccaggagatttagtgcttttatattcatttccttgcatttaagaaaatatgaaagcttaaggaattatgtgagcttaaaactagtcaagcagtttagaaccaaaggcctatattaataaccgcaactatgctgaaaagtacaaagtagtacagtatattgttatgtacatatcattgttaatacagtcctggcattctgtacatatatgtattacatttctacatttttaatactcacatgggcttatgcattaagtttaattgtgataaatttgtgctgttccagtatatgcaatacactttaatgttttattcttgtacataaaaatgtgcaatatggagatgtatacagtctttactatattaggtttataaacagttttaagaatttcatccttttgccaaaatggtggagtatgtaattggtaaatcataaatcctgtggtgaatggtggtgtactttaaagctgtcaccatgttatattttcttttaagactttaatttagtaattttatatttgggaaaataaaggtttttaattttatttaactggaatcactgccctgctgtaattaaacattctgtaccacatctgtattaaaaagacattgctgaccattaaaaaaaaaaaaaaaaaa

SEQ ID NO: 3983 - DNA, 5058 bp, Homo Sapiens
  NM_015303
aggtagtgcgcgtgcgtgaggctagagcagtgggtgcggtcacgtgggccggcggtccacggccggaatggcagcaagctcagagataatcattcaggtcttcgtgagctaaggccaaacaaacaaaaaacacttgctttgatggactgaatactgttattagaagtaaatatggaaaatgaaccagaccatgaaaatgtggaacagagcctctgtgccaagacgagcgaagaagagctgaataagtctttcaatctagaagcttcactttcaaaattctcttacatagatatggacaaggaactggagttcaaaaatgatctgattgatgacaaggagtttgatattcctcaagttgatactcctccaacactggaaagcatactaaatgagactgatgatgaagatgagtcttttattcttgaggatcctacattgttaaacattgatactattgattctcactcctatgatacttcatctgtggcaagctcagatagtggtgacaggaccaacttaaaaaggaagaagaaattacctgattctttttcacttcatggatcagttatgcgccattcacttttgaagggaatttctgcccagatagtgtctgcagctgacaaagtagatgctggcttgcctacagcaattgcagtatccagtctgatagcagtgggtacatctcatggattggctttaatatttgatcagaatcaagctttgcgactctgtctgggtagcactagtgttggaggtcagtatggcgctatctctgccctcagtatcaacaatgattgctcaagacttctttgtggctttgctaaaggacagatcaccatgtgggatttggccagtggaaaacttctaagatcaataacagatgctcatcctccaggaacagcaatattgcatatcaagtttacagatgatccaactcttgcaatttgcaacgacagcggaggctctgtttttgaattgacatttaagagagtgatgggagtgagaacctgtgaatctagatgtctgttcagtggttccaagggtgaagtctgctgtattgagcctctgcattctaagcctgagttgaaagatcatcccatcacacagttttcattattggccatggcatccttgacaaaaatactggtcattggattgaaaccatccttgaaagtatggatgacttttccctatggccggatggatccttccagtgtgccactgctggcctggcactttgtagcagtacaaaattacgtgaatcccatgcttgccttctgcagaggagatgttgttcattttctattggtaaagagagatgaatctggagcaatacatgttactaagcaaaagcatcttcacctatactatgacctcatcaactttacctggataaattcacgcacagttgtgctcttagacagcgtagagaagttgcatgtgattgatcggcaaacacaagaggaattggagacagtggagatctcagaagttcagctggtctacaatagcagccatttcaaatcactagccactggaggaaatgttagccaggcactggctttggttggagagaaggcttgttatcaatccatcagtagctatggtggtcagatcttttatttggggacaaaatctgtttatgtgatgatgctgaggagctggagagagagagtggatcatctcctgaaacaagattgtcttacagaagcgttggctcttgcgtggtctttccatgaaggaaaagcaaaagcagtagtgggattatcaggggatgccagtaagcgaaaggctattgttgcagaccggatggtagaaatcctattccattatgcagatcgagctctgaaaaagtgcccagaccaaggaaaaatccaagtgatggagcagcattttcaggatatggtgcctgtcatagttgattactgccttctgctgcagcgaaaggatcttttatttagtcagatgtatgataaattaagtgagaattcagtggccaaaggagtatttttggagtgccttgagccatatattttaagtgataaattggtgggaatcacaccccaagtaatgaaagacttgattgttcatttccaagataaaaaattaatggaaaatgtggaagcgctcattgtacatatggatatcaccagcctagatattcagcaggtagttctcatgtgttgggaaaatcgtttatatgatgctatgatctatgtctacaacagaggcatgaatgaatttattagtccaatggagaaacttttcagagtcattgctcctcctctgaatgcaggaaaaacactaacagatgaacaagttgttatgggcaataagctccttgtatatattagctgttgtctagcaggtcgtgcctatccccttggtgacatccctgaagatctggttcccttggttaaaaaccaggtttttgaatttctaattcgcctgcattcagcagaggcttctcctgaggaagaaatctatccttacattcggactttgctacattttgacacaagagaatttctaaatgtattggcactgacttttgaagattttaaaaatgacaagcaagctgtggaatatcaacagcgaattgtggatattttgttgaaagttatggtggagaattcagactttaccccctcacaagtaggatgtctctttaccttccttgctcggcagcttgcaaagcctgacaacaccttgtttgtaaacagaacactttttgatcaggtccttgaattcctttgtagtcctgacgatgactcccgacactctgaaagacagcaggtccttttagaattgctgcaggctggaggcatagttcaatttgaagagagtcgactcatccggatggcagaaaaagctgagttctatcaaatttgtgaatttatgtatgaaagagaacaccaatatgacaaaattattgattgctacttacgtgaccctctgcgagaggaagaagtctttaattacattcacaatatcttatccattcccggacacagtgcagaggagaagcagtctgtatggcagaaagcaatggatcatattgaggaactcgtgtccctgaagccttgtaaagctgcggagctggttgccacccacttttctggacatattgaaacggtcattaaaaaacttcagaaccaggttttgcttttcaaatttttgaggagtcttcttgacccaagggaaggtattcatgtaaatcaagaattactgcaaatatctccttgtatcacagagcagttcattgagctgttgtgtcagttcaacccaacccaagttatagagactctgcaagtccttgagtgctaccgtctggaagaaactattcagattactcagaagtatcaacttcatgaagtcaccgcttatctattggaaaagaaaggagatattcatggtgccttcctaataatgttagagagactacaaagcaaacttcaagaggtaacacatcaaggtgaaaataccaaagaggatccctcattgaaggatgttgaagatactatggtggagaccattgctctttgccagagaaattcacataatttgaaccagcagcaacgtgaggcactttggtttccgttattggaggcaatgatggcccctcagaagctgtccagttcagccattcctcatctacactctgaagctctgaagtctttgaccatgcaagttttaaatagcatggcagcatttattgcccttccatcaatcttgcaaagaatcttacaggatccagtttatggaaaaggaaaacttggagaaatccagggacttatcttgggaatgttagatacctttaactatgaacaaaccctgctggaaacaacaaccagccttctaaaccaagatctccattggtcattgtgtaacctgagagcttcggtcaccagaggactgaatcccaaacaagattactgctctatatgtttgcagcagtacaagagacgccaagaaatggctgatgaaataattgtctttagctgtggccatttgtatcactcattctgcctacaaaacaaagaatgcactgtggaatttgagggccaaacaagatggacatgctacaaatgcagttcaagtaacaaagtaggaaaactcagtgaaaattcatctgaaattaaaaagggaaggataaccccatcacaggtaaaaatgtctccatcgtatcatcagtccaaaggggatcccactgctaaaaagggaacctcagaacctgttctggatccacagcaaatccaagcatttgatcagctttgccgtctctaccgaggaagctccaggctggctctcctcacggaactctcccagaatcgcagcagcgagagctataggccattcagtggctcgcagagtgctcctgctttcaacagcatcttccagaatgagaacttccagctgcagctcattcctccacctgtgactgaggattgatgactccatggagcctggcccaggagaaccagagatgatcccgaggcagctggggagaggccccgcctctggtgggcttggcctccaccacctcccacgcttctgagaagaggttccaaattgggcttctgtgcccagagcgtccacagcaccattcccagtgtagactcccagtcttctccacattgctgtcatggcgtcagttcaccagactcattgattttgttttgcttgttaagcaaaggaatgtcacatacctctgtccagctttttaggaaatacatttcgcctattgcgactttttccatttaccctgaagcctagaaagtaggtggaactcacacaaatggcattccagagtctgccatactccgtctcctccagctgctggataatacagaggaacttcaacttctacagggaacagtggttggccaggctgcagtataactgaagcatgccttggagagagcagacactgtgggggccagggccatctccctttaatgtgttcatgttaaaacctatttgagtgtaagacttgccctttctaacaataaatgctccgtgtttaagttctgcaggtctcaaaaaaaaaaaaaaaaa

SEQ ID NO: 3984 - DNA, 4131 bp, Homo Sapiens
  NM_015305
gttgaagcgcggcggcggcaccacgtgggccggaccgggccgggggcggggccgagctgagggaggacctgctggctgcagtgaggagcggaggcgggcgcgggcggccggccatgatcgcgtcgtgcttgtgttacctgctgctgccggccacgcgcctcttccgcgccctctcagatgctttcttcacatgtcgaaaaaatgtccttctggcgaacagctcatccccccaggtagagggcgactttgccatggcccctcggggccctgagcaggaggaatgtgagggcctgctgcagcagtggcgagaagaagggttgagccaggtgctctcaactgcaagtgaggggccccttatagataaaggactagcccagagcagcctggcacttctgatggataatcctggagaagagaatgctgcttcagaggacaggtggtccagcaggcagctgagtgaccttcgggctgcagagaacctggatgagcctttccctgagatgctaggagaggagccactgctggaggtggagggggtggagggctccatgtgggcagctatccccatgcagtcggagccccagtatgcagactgtgctgccctcccagtgggtgccctggccacagagcagtgggaagaggacccagcggtgttggcctggagcatagcacctgagcctgtgccccaggaagaggcttccatctggccctttgagggcctggggcagttgcagcctcccgcagtggaaataccatatcatgaaattttgtggcgagaatgggaggatttctccacccagccagatgctcagggcctgaaggcaggagatggccctcagttccagttcactctgatgtcttataacatcctggctcaggacctgatgcagcagagctcagagctctatctacattgccatccagacatcctcaattggaactatcgcttcgtgaacctcatgcaggaattccagcactgggaccctgatatcctgtgtctccaggaagtccaggaagatcattactgggagcagctggaaccctctctgcgaatgatgggctttacctgtttctacaagaggaggactgggtgtaaaaccgatggctgtgctgtctgctacaagcctaccagattccgcctgctctgtgctagccctgtggagtacttccggcctggcttggagctacttaatcgggataatgtgggcttagtgttgctactgcaaccactcgtcccagaaggcctgggacaagtctcggtggccccgctgtgtgtggcaaatacccatatcctttacaacccacgccggggcgatgtcaagctggcccagatggccattctcctggcggaagtggacaaggtggccagactgtcagatggcagccactgccccatcatcttgtgcggggacctaaattctgtccctgattcacctctctacaacttcatcagggatggagagctccagtaccatgggatgccagcctggaaggtatctggacaggaagacttctcccatcagctttaccagaggaagctgcaggccccactgtggcccagctccctgggcatcactgattgctgtcagtatgtcacctcctgtcaccccaagagatcagagagacgcaagtatggccgagacttcctgctacgtttccgcttctgcagcatcgcttgtcagcgaccagtaggactggtccttatggaaggagtgacagatactaagccagagcgacctgcgggttgggctgagtctgtccttgaggaagatgcatcggagcttgagcctgccttctccaggactgtaggtaccatccagcactgcctccacctgacgtcagtatatacccacttcctgccccagcgtggccgcccagaggtcactacaatgccattgggtcttggaatgacagtagattacatcttcttctcagctgagtcctgtgagaatgggaacagaactgatcacaggctgtatcgagatggaactctcaagctcctgggtcgtctctcccttctctctgaagagatactctgggctgccaatggcttacccaaccccttctgctcttcagaccacctctgcctgctagccagcttcgggatggaagtcaccgccccatgacagggctcccaggggaagagagcttctcttccagaagagctcactggatcagagactgtggaaaaatcccatgcatctagaaacttagatccaagaaacttacatcccctcccttccccctcctcgttccctttttcccacggttagactttctccaggcctggctgcgttctctgcctgtggtccttgccccaccccagcctcttcctaatcctgtgccacacactcagtggccctgggagaggcagaaggggggctcccccttccttccatgtatccagcgctcccccttgatttttaattaccagggttatgggagttcttgatttcattggttatttgctttcaggccgtttcttgatgtaccttctgacctgaccttttccctgccttcaggacttctgggcccagccctcttgccaggcatgcatatgtgagatatgcatatcatgtatgtgtcctcttggggtgagacttctgcacagccatgcctgcctctgaccagtccacttttcatgttggggctgtaggcctggggcaggttcagagtctacccaagtacctatgtatgagcaggcagcagcagggcatggccccatctctccttttagcctctgtgtttcattaggcattcatcctgccaaccagggcaggcccggcgtctgggctctgggaacaaatggggcccacatcctggagtggcaaattttgggggatgcgctacctgtcccagctggccctgtgcctccaacccagagctccccacagacctggtgtaatttcacaagggccatccctttccccaggcttccctgagggaggcggaagtttgaacccttatgtggggttcattgggctagggtagtggtatgaggtttaaaactatttaaggattaggaggagaaagagtcttcaggaaactcttgtttcactggactctgcagcctgcagaactggggcaagggtaggagttccagtaggggaaggagcaggtagactcttcagctgcctcagctgggactgaagacctaagctgattctctttcctctccactcctaagaagcaattttctgttcctctccttccaccactttttactttctgctatctcccatctcccgcttcccttccatttcctttctagaaaaccctggtatttagctcaggccaaactgcctcagcagaaaggtggccttggacaaaactggtccaagaatttgaagtggcagtacttgcggattggctctgtccagcaaggcctcagctgcttgttgcgtctgctttccctcccctaacagaagggtaccctggcttattcaggggactccttagtccacactgtgtcacctgcatgccttaatctttcattgctggggtgtggccttgggagatcctgggccagcccctccacacatctccctaagtcagagtggctgctggccctggtagatttgacttgctcttgcctcactcgacctccaaagtgggactgaagacagtggtcaagagacttgagttcgggacagtaagccaggggttaaggttctttcctttttttgaaagccaaagacccagtttgcattgtgctgctgcattcatggttagaagctttccatgcctaggttctagggaatttatttttctatgtgtatatattttcaaactttgtttcctgggtactgggcatgtgcctgtctgagccccaggtctgtctacaccccaccattcattctgtctgtctgttccctggacactgcctaaaagggtctcaagacagtgccctgtgggttcctaggactagggcccatcactgttctcttctgctgggaaatgcagctttaaaatggctaaccacagcagagggcagatgcttgatagattatcttttccttgctttcttgtttctgttttgaaagtgaaatggggttttaaattgttatttaaactctttttccaaataaaggtttaccttttttccccccaaaaaaaaaaaaaaaaaaaaaa

SEQ ID NO: 3985 - DNA, 10802 bp, Homo Sapiens
  NM_015306
ggaggaggccaacatggcggcgcgcagggctgggccgggccgcagccgcgcctgagcgcctcaccgcactagctcggctcgcaggacccaagcccgcacccagcctggcccggctgctgcggagcacccggggcaggaacgcaggggccaacctgggcgcggaggcggcgcggagggtgcgccgcgcggcccgccaggcccgggacccgtagcttcgccgtgcgctggccggggcggccaggaggcccaagccatggaatcggaggaggagcagcacatgaccacgctgctgtgcatgggcttctcagaccccgccaccatccgcaaggccctgcgcctggccaagaacgacattaacgaggccgtggcactgctcaccaacgagcggccgggcctcgactacggcggctacgagcccatggacagcggcggtggccccagccccgggcccggcgggggcccgcggggcgacggcggaggtgacggcggcggcggcggcccctcccgcggcgggagcaccggaggcgggggcggcttcgaccccccgcccgcctaccacgaggtggtggacgcggagaagaatgatgagaatggaaactgctcaggggaaggaattgaattccctacaacaaatttatatgaactggaaagccgtgttttgactgatcattggtccatcccttacaagcgagaagaatcactaggcaaatgcctgttggcatctacctacctagcaagacttggtctttccgagtctgatgagaattgtagaaggtttatggacaggtgtatgcctgaagcatttaaaaagctcctgacatcaagtgctgttcacaagtggggtactgaaattcatgaaggaatttacaacatgttgatgctattaatagaactggtcgcagagagaataaaacaagatccaattcccactggtctcctgggtgtgcttacaatggctttcaatcctgataatgaataccattttaaaaacagaatgaaagtgtctcaaaggaattgggcagaagtgtttggagagggaaatatgtttgctgtttcacctgtatcgactttccaaaaggagcctcatggatgggttgtggatttggtaaataagtttggagaattaggtggatttgcagcaatccaagccaagctccattcagaagatatagaacttggggctgtctcagcactgattcagcccttaggagtgtgtgcagagtacctcaattcctccgtggtacagcccatgctagacccagtcattcttactacaatccaggatgtacggagtgtagaagagaaagacctcaaagacaagagattggttagcatccctgagctcttgtctgccgttaagttactttgcatgcgcttccaaccggatctggtgacaattgtggatgaccttcgactagatattctattgcgcatgctgaaatcaccacatttcagtgctaagatgaattctctcaaagaagtaaccaaactaatagaagatagcactttatccaaatctgtgaagaatgctatagatacagacagattattagattggctagttgaaaactcagttctgtcgattgcactggaaggcaacatagaccaagcacaatactgtgaccgtataaagggaattattgaactcttgggtagtaaattgtcgttagatgaactcactaaaatttggaagatacagtcaggacaatcatctactgtgattgagaacattcatactattattgctgcagcggctgtgaaatttaattcagatcagcttaatcatttgtttgttctcattcagaagagctgggagactgagagtgatagagtaagacagaagcttttgagcctgattggacgaataggccgggaagctcgctttgagaccacttctggaaaggttttagacgtactctgggaactggctcaccttccaaccctgcccagtagccttattcagcaggccttggaggagcacctgacaatccttagtgatgcatatgcagtgaaagaagcaatcaagaggagctacatcatcaagtgcatagaagatattaagaggcctggagaatggtcaggtttggaaaaaaacaagaaggatggattcaagtcatctcagcttaataatccccagtttgtatgggtggtaccagctttgcgtcagctccatgaaattactcgctcattcataaaacaaacctatcaaaagcaagacaagagcattattcaagacttgaagaagaattttgaaatagtgaaattggtaacgggaagtttgatcgcttgtcatcggcttgcagctgctgtggccgggcctggaggcttaagtggctcgacactagtggatggccggtacacttaccgggagtatttagaggcacatctaaaatttctagcgtttttcttgcaagaagctactctgtatctgggctggaatcgtgccaaggagatctgggagtgtcttgtaactggccaggatgtttgtgaattagatagagagatgtgttttgaatggtttacaaaaggacagcatgatcttgagagtgatgttcagcagcagctcttcaaggagaaaattcttaaattggagtcatatgaaatcactatgaatggttttaacttatttaaaactttttttgaaaatgtgaatctttgtgatcatcgattgaaaagacaaggagctcagttgtatgtagaaaagctggaattgataggaatggatttcatttggaaaatagccatggaatcacctgatgaagaaattgctaatgaagctattcagctaatcataaactatagttacattaatctaaatcctagattaaagaaggattcagtatctttacataagaaattcattgctgattgctacacaagattagaagcagccagttcagcacttggtggccccactctaacacatgctgtgaccagagcaacaaaaatgcttacagcaactgccatgccaactgtagcaacctcagttcagtctccttatagatctactaaacttgtaataattgagagattgctgcttctggcagagcgctatgtgatcactatagaggatttttactctgttccacgaactattctacctcatggtgcctcatttcatggacatcttttaacccttaatgttacctatgagtctaccaaagataccttcactgtcgaggctcacagtaatgaaaccatagggagtgtccggtggaaaatagccaagcagttgtgctctcctgtggataatatacagatatttacaaatgatagcctgctgacagtgaataaagatcaaaagctactccaccaactgggcttttctgatgaacaaatccttacagtgaagacttctggcagtgggaccccatctgggagttcagcagattcttcaaccagctccagcagcagcagcagtggggtttttagttcttcatatgccatggagcaggagaaatccctccctggtgtagtgatggctctcgtatgtaacgtatttgacatgctttatcagctcgccaatctggaagagccaaggataactctacgagtacggaagcttctgctcttgatacccactgatccagccattcaggaagcccttgatcaacttgattctttaggaagaaagaaaacattgctgtctgaatcaagttctcagtcctcaaaatctccatccctgtcatcaaagcaacagcaccagccaagtgccagttcaattttagaaagtctgtttcgatcttttgccccgggaatgtctaccttcagagtgctctacaacttagaagttctaagctccaaactcatgccaacagctgatgatgacatggccagaagctgtgccaaatccttctgtgaaaacttcctcaaagctggcggtttgagtttggttgtaaatgtcatgcagagagactccatcccatcagaagtagactatgaaacaaggcagggtgtttattccatctgtctacagcttgcaagatttttacttgtcggacaaacaatgcccacgttattagatgaagacctcaccaaagatggtatagaagcactttcttcccgcccattccgaaatgtcagccggcagacaagcagacagatgtccttatgtggtaccccagaaaagtcatcctaccgacagttgtccgtgtctgataggtcttctattagggttgaggaaatcatccctgctgctcgagttgcaatacaaacaatggaagtaagtgatttcacttctactgtggcttgcttcatgagattgtcatgggctgcggctgcaggacggcttgatcttgttgggagtagccagccaattaaagaaagtaattccctgtgtcctgctggaattcgaaacagactcagcagttcaggaagcaattgcagctctggaagtgaaggagaaccagtagccctgcatgcgggaatctgtgttcgacaacagtctgtatccaccaaagactcgctgattgcgggagaggctttgtctcttcttgttacgtgcctacagcttcggagccagcaactggcatctttctataacttgccctgtgttgctgatttcatcattgatattctgctcggatcaccaagtgctgagattcgccgggttgcctgtgatcagctgtacactcttagtcagacagacacatcagcgcatccagatgtgcagaagccaaatcagtttcttctaggcgtaatcctcacggctcagctgcctctctggtctccaactagtattatgagaggagtcaatcagagactgttatctcagtgtatggagtattttgatttgagatgccagttattagatgatctgacaacttcagaaatggagcagttaaggatcagcccagctacgatgcttgaagatgagattacttggctggataactttgaacctaatcgtacagctgaatgtgagaccagtgaagcggacaacatcttactggcagggcacttacgcctcatcaagacccttctttcactctgtggggcagaaaaggaaatgcttggttcatcactcattaaaccattgttagatgacttccttttccgagcttctagaattattttaaatagtcattctccagctggcagtgccgccatcagtcaacaggactttcatccaaagtgtagtacagcgaatagccgattggcagcctatgaagtccttgtgatgttggctgatagttcaccttcaaatcttcaaattattataaaagaactgctttctatgcatcaccagcctgaccctgctcttaccaaggagtttgattaccttcccccagtggatagcaggtccagttcagggtttgtggggctgagaaatggtggtgcaacttgttatatgaatgcagtcttccagcagctgtatatgcaacctgggctccctgagtcattactttcagtggatgatgacacagacaatccagatgatagcgtgttttaccaagtgcagtctctctttggacatttaatggaaagcaagctgcagtactatgtacctgagaatttttggaagattttcaagatgtggaataaagaactttatgtgagagaacagcaggatgcatatgaattctttactagtctcattgatcagatggatgaatacctcaagaaaatggggagagaccaaatttttaagaatacatttcagggcatctactctgatcagaagatctgtaaagactgtcctcacagatatgagcgtgaagaagctttcatggctctcaatctaggagtgacttcttgtcagagtttggaaatttctttggaccaatttgttagaggagaagttctagaaggaagtaatgcgtactactgtgaaaagtgtaaagaaaagagaataacagtgaaaaggacctgtattaaatctttacctagcgtcttggtaattcacctaatgagatttgggtttgactgggaaagcggacgctccattaaatatgatgaacaaataaggtttccctggatgctaaacatggagccttacacagtttcaggaatggctcgccaagattcttcttctgaagttggggaaaatgggcgaagtgtggatcagggcggtggaggatccccacgaaaaaaggttgccctcacagaaaactatgaacttgtcggtgtcatcgtacacagtgggcaggcacacgcaggccactactattccttcattaaggacaggcgagggtgtggaaaaggaaagtggtataaatttaatgacacagttatagaagaatttgacctaaatgacgagaccctggagtatgaatgctttggaggagaatatagaccaaaagtttatgatcaaacaaacccatacactgatgtgcgccgaagatactggaatgcctatatgcttttctaccaaagggtgtctgatcagaactccccagtattaccaaagaaaagtcgagtcagcgttgtacggcaggaagctgaggatctctctctgtcagctccatcttcaccagaaatttcacctcagtcatcccctcggccccataggccgaacaatgaccggctgtctattcttaccaagctggttaaaaaaggcgagaagaaaggactgtttgtggagaaaatgcctgctcgaatataccagatggtgagagatgagaacctcaagtttatgaagaatagagatgtatacagtagtgattatttcagttttgttttgtctttagcttcattgaatgctactaaattaaagcatccatattatccttgcatggcaaaggtgagcttacagcttgctattcaattcctttttcaaacttatctacggacaaagaagaaactcagggttgatactgaagaatggattgctaccattgaagcattgctttcaaaaagttttgatgcttgtcagtggttagttgaatattttattagttctgaaggacgagaattgataaagattttcttactggagtgcaatgtgagagaagtacgagttgctgtggccaccattctggagaaaaccctagacagtgccttgttttatcaggataagttaaaaagccttcatcagttactggaggtactacttgctctgttggacaaagacgtcccagaaaattgtaaaaactgtgctcagtactttttcctgttcaacacttttgtacaaaagcaaggaattagggctggagatcttcttctgaggcattcagctctgcggcacatgatcagcttcctcctaggggccagtcggcaaaacaatcagatacgtcgatggagttcagcacaagcacgagaatttgggaatcttcacaatacagtggcgttacttgttttgcattcagatgtctcatcccaaaggaatgttgctcctggcatatttaagcaacgaccacccattagcattgctccctcaagccctctgttgcccctccatgaggaggtagaagccttgttgttcatgtctgaagggaaaccttacctgttagaggtaatgtttgctttgcgggagctgacaggctcgctcttggcactcattgagatggtagtgtactgctgtttctgtaatgagcatttttccttcacaatgctgcatttcattaagaaccaactagaaacggctccacctcatgagttaaagaatacgttccaactacttcatgaaatattggttattgaagatcctatacaagtagagcgagtcaaatttgtgtttgagacagaaaatggattactagctttgatgcaccacagtaatcatgtggacagtagtcgctgctaccagtgtgtcaaatttcttgtcactcttgctcaaaagtgtcctgcagctaaggagtacttcaaggagaattcccaccactggagctgggctgtgcagtggctacagaagaagatgtcagaacattactggacaccacagagtaatgtctctaatgaaacatcaactggaaaaacctttcagcgaaccatttcagctcaggacacgttagcgtatgccacagctttgttgaatgaaaaagagcaatcaggaagcagtaatgggtcggagagtagtcctgccaatgagaacggagacaggcatctacagcagggttcagaatctcccatgatgattggtgagttgagaagtgaccttgatgatgttgatccctagaggaacatgcccagcctgagaggagtcaagacacaatactggatgctcagcaccttcttggaatcagaatctcgaaccctttggaagagcctggagattggactgggaaagctgctgtgacttgggcggatcgtgtatttctcaaggaaagcatttttaagccactagaaggtttgggagctgtttggcagtgggagaactccggcatgtggatcagctgtcccgggagcgtggtctatatgtggattcacatttctgtggagattttcggaaatagagccagtggcagacttttttgttacacgaacatacaagagtgagcataaagctgttgctttctctacgatgctacaaaagaaattcctttggtttttatattttaagaaaaagcaagctgcttttagatatgtgggggcaaatttttaatcttgcagtaatattaaacaggaatatccaatttaaaatgatgtaaagatgtaataaaattccttttcattgtaaaatagtaattaagtcaatttacacagacctttgtatttaatatgtctccctatttgtatagaatttcagatgggtctagatgagaaccctatgcataagcttggatcttgatgaaaggttaccaggatcaggatcaaaaattgggaaatactaagctcttgaagatatttttctgatataattagattgaaaagagcaattttgaaaatgctgtgttctccagaagtacagggtgcattatttgacatcaattacttaaagaagttatgagttgttccccaaacagattttaaaaacagcaaaataaaagcactttaagatataattttactgagtttaacttcacagaattatctttttaatgcttggagacatattgaataaactgtagtcttaaatcatgtgatctgcaatcgtttgcttttgcttaaaacataattactgaaacccttggtattggttgtatatgaagttaactatttgagttggtacacactgcttgtgagtttcatagttattgtaatgcagagaaggaatttgagaatttgtttctcctcaacatgactaattaacactgaaaagtcagtcaaggtttaagatttattttcccagaaataaatataaagcaattgaataaccatccatttagtcgtatttccaaagtatagcaccattcactcatttataccagctcccttttatggtgtgggggagaggtttacacccacatatttcatatatattttgtacattttgtattttgaattgctcacattttcggccctgttttgcctttagttacaggtcctgccttattttcatctcaccatgcacagaactagggagccttaggaagtgccaggttttcactgtcagatttgccaagtcacagaggcgcagccagccctgaagtgcctgtctggctgctgtggcattgtgtgggcatgtggccaggcagatggcatctcattactgtgctctcgccatggcccagtcttttcattctctggcagtgagggtttctgtgctgtcagacttcattgttattctgtgacttgctggaggttggcagtggcctttgtcaaacacactgagaagatggaagggccagcacttaagagcagaactgtacccttagagaaacggacagaggcgagtggcaaacttcagacggttccaatggtcttgcagtttgaaatgtgatgttctaccattggttttgagtacgtgaatacttcctgtcctactgtttcccctaccctattctcaccttctctccgcccacatcctcaccaagagattgtgtgggacatgaccttgaaatgctggcgatgatccacactgggatatcatcgctggcgactgcactctcaggagcccaaaatcaggagtgaaattgccacttctagtccccttatttcctatggaaacaacgccttccgcacccctagcacctgccgtcctcactgtaaagcttcatcaggatcgtccaccgtgtatattatacgcttcagatcatgttgcttatattgttgctgcaatgaccatcgttttcactttgctggtaaccacttgattgctgacagctacagtcaatgaacctgctgatgactttttttaatgtagtacaacagtgacagttatgacaggcttaccttggaagagttgtcatttttactgccaattttttggatgaagatgtttttataaacctttcaaaatggtctgcaaacagagcaggaattgcacaattaactcaataatgctgtgtgttctcaagaagctcccttagtgaggccgatcttaagatggccgattctgcccgttgaaggcatcctgggaaagaaaacaagcatcccagcgggcatctcaccacgacttctcctggagtcctcacacggtcactgacaactacagtcagttttaggaactagagtgccgtatcatcagacttaccctgtcctgccccaccttccctgctaacatcgaggtgtgtgcagttaccttctgagcttggaacaagcagactggaattttcctctgctacctcttgtgtataaaatcttgtttataaaatttcaaaaggaagtagatacactagggaagaaccttaattctaaatttggttcatgtgtggcaaagttcttagcttctaagagtataaaataaatttttcaaaaacaga

SEQ ID NO: 3986 - DNA, 4127 bp, Homo Sapiens
  NM_015308
gtgctccgctggttgaaagcggatccgggctggaggcggtgtcacggtgtatgaatattgattacgcgtcgcagcgcccagggcccagcgcccagcctccagtgcccgcccctctcggccgcccgacgctctctgctcgcgcttgggctcgcgatggggaagaagtcccgggcggtacccggccgtaggcccatcctgcaactctctccgccgggtcctcggggcagcacgccgggccgggacccggagccggaacccgacactgagccggactcaaccgcggcggtccccagccagcccgccccgtcggcggcgacgaccaccaccaccgcggtgactgccgccgcggcctcggacgactcgccttcagaagatgaacaggaagcggtgcaggaggttcctagagttgttcagaatcctccaaaaccagtcatgaccactagacccacagctgttaaagcaacaggcggtctatgcttgcttggtgcttatgctgacagtgatgacgatgacaatgatgtttccgaaaaactagcacaatccaaagagacaaatggaaaccagtcaactgatattgatagtacattggccaacttcctagcggagatcgatgccataacagctcctcagcctgcagctcctgtaggagcttctgctccacctccaactccacctcgaccagagccaaaggaagcagcaacatctaccctttcttcttctacttcaaatggaacagactccacccaaacatctggttggcaatatgatactcagtgttcactggcaggagtcggaattgagatgggcgattggcaggaagtctgggatgagaacacgggatgttattattattggaatacacaaacaaatgaagtgacttgggagttaccccaatatcttgccacacaggtacagggattacagcattaccagcccagttctgtgccaggtgctgaaactagttttgtggtaaatacagacatatattctaaggagaaaacgatttctgtttccagtagtaaaagtggaccagtcatagccaagcgagaagttaaaaaggaagtaaatgaaggaattcaggctctctcaaatagtgaggaggagaagaaaggggtggcagcatcgctgcttgctcctttattgcctgagggaataaaagaagaagaagagagatggagaagaaaagtaatttgtaaagaggagccagtttcagaagtaaaagaaacaagtacaacagtagaagaagcaacaacaatagtaaagccacaggaaattatgttggacaatatagaagacccttctcaggaggatctttgcagtgttgtccaatctggagaaagtgaggaggaagaggaacaagatacccttgaactggagctagttttggaaaggaaaaaagcagagttgcgagccttggaggaaggagatggtagtgtgtcagggtctagtccacgttctgatatcagccagccagcatctcaagatggaatgcgtaggcttatgtctaaaagaggaaaatggaagatgtttgttcgagctaccagtccagaatctaccagtaggagttctagtaaaactggacgagatactccagaaaatggagaaactgcaattggtgctgaaaattcagaaaaaatagatgagaattcagataaagagatggaagtagaagaatctccagagaaaataaaagtacagacaacaccaaaagtagaagaagaacaggatttgaaatttcagattggagaactggcaaataccctgacaagtaaattcgagtttctaggcattaatagacaatccatctccaactttcatgtgctgctcttacagactgagactcgaattgcagactggcgggaaggggctcttaatggaaactaccttaaacgaaaacttcaggatgcagcagaacaactaaaacagtatgaaataaacgccactcctaaaggctggtcctgccactgggacagggatcatagacggtatttctatgtaaacgaacagtcgggcgagtctcagtgggagtttccagatggtgaagaggaagaagaagaaagccaagcacaagaaaatagagatgagactcttgccaaacagaccttgaaagacaaaactggcactgattcaaattcaacagaatcctctgaaacttccacaggttctctttgtaaagaatccttttctggtcaagtttcttcttcatcactcatgccacttactccattctggaccctccttcagtcaaatgttcctgtgcttcaacctccattacccttggaaatgccaccacccccacctccacctccagaatcacctccaccccctcctccaccacctcctcctgcggaagatggtgagatccaggaggtagagatggaggatgagggaagtgaggagccccctgccccaggaacagaggaagatacccctttgaaaccttcagcacaaaccacagttgtaactagccagagttcagttgattccaccatctctagttcttcttccactaaaggaataaagaggaaagctacagaaattagcactgcagtggttcagaggtcagctaccattggcagttctccagttctctatagccagtcagctatagctacaggtcaccaggcagcagggattggaaaccaggcaacaggaattggacatcagacaataccagttagccttccagcagcaggaatgggtcatcaggccagaggaatgagcctgcagtcaaattaccttggactagcggcagcacctgcaattatgagttatgcagaatgttctgtcccaattggagtgactgctccctcattgcagccagttcaggcccgaggtgctgtgcctaccgctaccattatagaaccaccaccaccacctcctcctcctcctcctccaccaccaccagctcccaaaatgccaccacctgaaaagacaaaaaaaggaaggaaagacaaggcaaagaagagtaagaccaaaatgccatctttggtaaaaaagtggcagagtatccagcgtgagttagatgaagaggacaattctagttccagtgaagaggatcgggaatcaactgcacagaagcgaattgaagagtggaaacagcagcagctggttagtggcatggcagagagaaatgctaattttgaagcccttcctgaggattggagagcaaggctgaagagaaggaaaatggctccaaacacatagtttttaagtttttaaaacttttttgtattattgtttgttttgtgttcagttcaaagtcttaaccagttttattgtcaaataaactataaatgttatgggggagatcttataaatttcctgggcaagagtgtatgcatacaaagttttcacttttgtgaaatgtaatttttctgtttttgcaaagggatgaggtgattggaattgctttgaccatgctgcctttattctcaaactggcaaacttagcatgttaggtgtattaacctcatcagtcttgaagaacatgtggctcatgagtataacacttctgtagaggactccctgacaaaagtgaagaattaacttctcctccagaacaagtgcaattcagaaggcagctctgcattctaccttgcttgactggaattgtctgaagctttttctggcctcttttctctagtcggccacccctgaagtgctgaggtctaagtggtttacctcgtgctgatagatggccacactctttagagtagttctcataagttctagaactggtagctcggtcgtttcgcacactaggtggcatacaggcagcagcaggtgttcatatccttgattttgagaatttcccctcaagtatgtggcagtaaatacaacaagacactctatgtattaatgtctccattgtcttaaccctgttccaaaacaaaattcacctcctttctttatgtgaatgtattctccataaaattccagtatttaaaaagcagtttactgttctgtactttctgttgtatcacaatcaggtaaaagtcactttaaactgaggaaacggcaaattgtgttttaaagctctttgtatttctccagtttctgaccttgtaaatttgtatatatgcactaataaagctttttttataatcctgaaaaaaaaaaaaaaaa

SEQ ID NO: 3987 - DNA, 9829 bp, Homo Sapiens
  NM_015313
gggagtcccgggtccccttcccactgcgcgcggatttccctctctgaggaagtttatccttgtgccttctggaggatttctctctagctcgactcactctggactgactcgctccctggctttctcagttcgttttgggagataacttgttttgctccaagccgcatccgttgaccccttacagtcggatggtctagatgactgaatggagttttgagttggacttttgtgtccctgacggagttgggcctgatcccagagcactgggggtggggaggaggtgttactgtaaaatgcaagttggataaaaggaggacctctcgccaagggccccaatgagtggcacacagtctactatcaccgacaggtttcccctcaaaaaacctataaggcatggaagtattttgaaccgagagtcaccaacagataagaagcagaaagttgagcgcattgcatcacatgattttgaccccacagatagctcctccaagaagacaaagtctagttcagaggagagtagatccgagatatatggtcttgttcagcgttgcgtaatcatccagaaagatgacaatggatttgggctgacggtcagtggagacaatccagtcttcgtacagtctgtcaaagaagatggagcagccatgcgggctggagtacagacaggtgatcgaatcatcaaggtgaatggaactctggtgactcattcaaatcatctggaggtggtgaagctaatcaaatctggttcctatgtagctctcactgttcagggacgcccacctgggtcgccccagattccacttgccgactctgaagtagagccgtcagtcattggacatatgtctcccatcatgacatctcctcattcacctggagcatctgggaatatggagagaatcactagtcctgtgctcatgggggaggaaaacaatgtggttcataaccagaaagtagaaattctgagaaaaatgttacagaaagaacaggaacggctacagttattgcaggaagattacaaccgaacacctgcccaaagattgctaaaagagatccaagaggccaagaaacacattcctcagctgcaagagcagttatccaaagccacaggctctgctcaggatggagctgtagttacaccctccagacctttaggggacaccctaacagtcagtgaggcagaaacagatcctggagatgtactgggcaggactgactgtagcagtggagatgcttctcggcccagtagtgacaatgcagatagtcccaagagtggcccaaaagagagaatttatctagaggaaaacccagagaaaagtgaaacaattcaggacactgacactcaatcacttgtcggaagtccctcaacccgtatagcacctcatattattggagcagaagatgatgattttggtactgaacatgaacagatcaatggacagtgcagctgtttccagagcattgaattactaaaatctcgcccggctcatttggctgttttcttacaccatgtagtttcacaatttgaccctgcgactttgctctgttatctctattcagacctgtataaacataccaattccaaagaaactcgtcgcatcttccttgagtttcatcagttctttctagatcgatcagcacacctgaaagtttctgttcctgatgaaatgtctgcagatctagaaaagagaagacctgagctcattcctgaggatctgcatcgccactatatccaaactatgcaagaaagagtccatccagaagttcaaaggcacttagaagattttcggcagaaacgtagtatgggactgaccttggctgaaagcgagctgactaaacttgatgcagagcgagacaaggaccgattgactttggagaaggagcggacatgtgcagaacagattgttgccaaaattgaagaagtattgatgactgctcaggctgtagaggaagataagagctccaccatgcagtatgttattctcatgtatatgaagcatttgggagtaaaagtgaaagagcctcgaaatttggagcacaaacggggtcggattggatttcttcccaaaatcaagcaaagtatgaagaaagataaagaaggggaagaaaaagggaagcgaagaggattccccagcatcctgggacccccacggagaccaagccgtcatgacaacagtgcaattggcagagccatggaactacagaaggcgcgccaccctaagcacttatccacaccctcatctgtgagtcctgaacctcaggactctgccaagttgcgccagagtgggttagcaaatgaaggaacagacgctggatacctgcctgccaattccatgtcttctgtagcttcaggggcctctttttcccaggaaggagggaaagagaatgatacaggatcaaagcaagttggagaaacatcagcacctggagacaccttagatggcacacctcgtactctcaatactgtctttgatttcccaccacctccattagaccaagtgcaggaggaggaatgtgaagtagaaagggtgactgaacatgggacaccaaagccctttcgaaagtttgacagtgtagcttttggagaaagtcaaagtgaggatgaacaatttgaaaatgacttagagacagatccacccaactggcagcagcttgttagtcgagaagtgttactgggactaaaaccttgtgaaatcaaaagacaggaagtgattaatgaattgttctacactgaaagagctcatgttcgaacactgaaggttcttgatcaagtgttctatcagcgagtatccagagaaggaattctgtcaccctcagagctacggaaaattttttcaaacttggaagatattcttcaacttcatattggattgaatgaacaaatgaaggctgttcgaaagagaaatgagacctctgttatcgatcagattggggaagatttgctgacatggttcagcggaccaggagaggagaaattgaaacatgctgctgctaccttttgcagtaaccaacctttcgccctggaaatgatcaaatctcgtcagaaaaaggattctcgatttcagacttttgtgcaagatgctgaaagtaatccactgtgtcgtcgtcttcaactgaaggatattattcccactcaaatgcaaaggcttactaagtacccacttctgttggataatattgccaaatacacagaatggccaacagaaagggagaaggtgaagaaagctgcagatcactgtcgtcagatcttaaattatgtaaatcaggctgtcaaggaggcagaaaacaagcagcgcctagaagattatcagcgtcgccttgatacctccagcctgaagttgtcagagtacccaaatgttgaagagctcaggaatttggatttaacaaaaaggaagatgattcatgaagggccattggtttggaaggtgaatagagataaaactattgatttatacacgttgctgctggaagacattcttgtattgttacaaaagcaggatgatagactggttttaaggtgtcatagtaagattctggcatctacagctgatagcaaacacacgtttagccctgtcattaagttgagtacagtgttggttcgacaagtggcaacagataacaaagctttattcgtcatttccatgtcagacaatggcgctcagatttatgaactggtggcacagacagtttctgaaaagactgtctggcaggacctaatctgtcggatggctgcatcagtgaaggagcaatccacaaagccaattccattaccacagtcaacacctggcgaaggagataatgatgaagaagatccttcaaaattaaaagaggagcagcatggcatttcagtcactggtttgcagagtccagacagagatttgggattagaatctaccttaatatcgtcaaaacctcagtctcattcactgagtacctctgggaaatcagaggtacgtgatctgtttgtggctgagagacagtttgcaaaggaacaacatacagatgggacactaaaggaagttggagaagattatcaaatcgcaatcccagattcacacctgcctgtctcagaagaacggtgggcattggatgcactaagaaatttgggtttgttgaagcagttgctggtgcaacagctaggtttgactgagaagagcgttcaggaagactggcaacatttcccaagatacagaacagcctctcaggggccgcagacagacagtgtcatccagaactctgaaaatattaaggcctatcattctggtgaaggacatatgccctttagaactggaactggtgacattgcaacttgttacagtccacggacttcaactgaatcttttgctccacgggattcagtgggactggcaccccaggatagccaggcaagtaacattttagtaatggaccacatgattatgaccccagagatgcctaccatggagccagaagggggtcttgatgacagtggagagcacttttttgatgcccgtgaagcacatagtgatgagaatccatcagaaggtgatggagcagttaacaaggaagagaaggatgttaatttacgcatctcaggaaactatttgatccttgatggctatgacccagtgcaggagagttccacagatgaggaggttgcttcctcacttaccctgcagcccatgacaggcatccctgctgtggaatccacccaccagcagcaacattctcctcagaatactcactccgatggggcaatttcaccattcacccccgaatttctggtccagcagcgctggggagctatggagtattcctgttttgagatccagagtccctcctcttgtgcagattcacagagccagatcatggagtacattcataagatagaggctgaccttgaacacttaaagaaggtggaggaaagttacaccattctttgccaaaggctggctggatcagccctcacagacaagcactcagataaaagttagagccgcatgtcctggaggtgactgcaggttgttggatttggagtatcggccgtgtctcaccacatcctggctccagtgtggatgcagagagagtgtgacagaggatctgcctgtgaaccacctgggattagtcaagtcccaaggtgcccagagtgggactagttcttcacagtgtggcagctgcactaatctgtttgtgagggaatatccattccctcactctactctcctcactatcggaaattcattttgattcagaataaaaaccaaatgtatagagctttgggtgtaggatatgaaattgtacttagatttaagaaaaagagaaaatcagatgtatttatttgacttcattccgtatttgaaagcacattttaatttttatttgccttgttttgttttaattgagtagtgagagttttagacctttgtctttagtacacccaaggatcaactgctcctgaagcaaagaggtcaggatggagtatgcagaagttgggtagagaggttaagaagaggaggaagtgagacggggaagggaggagcaccttgcttcactatacagtattccaagctctctgctgtccagtaggctgcttctctgagggtcacctcaaaggtatgctatgccgtgtggctcttatgtgcccaggtggtgtggtcagagagtggatgggcttcctcccgccctgaggcaagcacctcttctctgtagctgggatcaaccacaattaataggaatcctcaacatactaaatagcaggcacttgaaaatgggtgtgttttcttccattgtcgtcttttctattgagggttgggatttgggtgggagaggaaagcaaattttattttcttgactataaatttgttattcttggtatcatttcatttttataattatacattagacattggcacttgtgtaaaactgtccctgcagattgagcaggaagtaaaaacaaatggaaatgcttcggatagtggcaggggtgggggttgctaaggaaagggtgggatgggagtgggtaaagagtttgggaaggttatctaactgaatcactactgagttgaatcatggctatcattagccacaggtactgctgattataaggccagtaaaattttagtacctggaggtttgactctaatttttgcactgatggtgccaaagggccctgagtcaaaaggatagccaagggtggagtggaaaaagatatggtgaaggcagaactgctcacaccagctccagaagcacgtcctctgacttcactgccgcagctctttccacacggggccgtgattgaccctaaaaattgcagaccagcacatacactggacactgcaggcaaggtgttggtaactgcctgctctaggatgaatagtagcgttagcagcaccctacagagggtaagtttcagaattgtaatttgagaactccttcaattatattgactttctttggttttccttgtgcattaggtatatattttttgaagtatttttgccaactaaaatgaagtctgtaaattctgttaataaacaaggagttcatccgttgctcacatctttcattggtgccctctgaactctgtgggttgctaggatgtaattttaatgcttccctgcagtccaaagatgattttttcaccacaaatggtaagggatgcccacctacttttataaacaccactgcaacttaacaagtttatttatctatgtccagatttctgtttctgtcctaaattgatctgtgtttttaggtggatcaacttggatctttagacctcatctataaattgaaattatatttttagtcataagccaagtacaatctaactcagaatgggattaaaaattttagaagcagaagctaatatataaatgaagtttgggatttggaactttctgtatctcttaggaggaacaagtaaaaaccaaatggttacattgtgctgctagaaataatgtcattctcaattaaaagggttacacctgtagccacttgacactaacaccatcgagggcaattaatcaggagaaaagtaaatataaaaactttgctcttaacgtcacacactacagggtaattatgtaattctctagcactcaattaagaagcttgtaggttagcaaaatttcagtttctctagttcagccagtgtcttgtccttagtaattatttgctttccctgcagttcaatttctccttggaactctaacaggactaactggaaaaatactttgaccatagctctagtacttccaaataaattcatatctagattttcaaacaaagccccaagatgaagtctaattctgaaaatatctcacaatttttgaatgttctttttatcttaccgacctaacttctcttttccctcccaacttggcctcccacacgttccatttcattttggccattatagtcacatccgtttgactttggttgtgacatcttcctttcaggatgatggaattagatgcagtctgtctttgagtgagactggtcaccatcagaggagttttttctaagtgacgtgactagaagttgaaatctacttccctgctaaagggcacaggggtggtgtacaaagaaagctaccttcccagagcaagcaggctgcattttagctatggaagtgacctgctgtgacactgtgctctcttctgtgggcttaatggttcctttgctatgaagtggcaaattacatgtagagtgtctccttccttttcagagaacagttaatcaaggcaaatcagcaagcccccaaagtgctgtaatttaacatcatgattaccaccttcgaagctatatattttgcatactttaaaatcacctaacttggactgcttgaattacattggcttttagaaccgaaattgtaactatgtattgtatttcatgggaggtatattttatgagctttttggctttcttttttcccacagcaactgccaatgaaggatgaatcccctttttaaaaagttgttgttgttgttgtttatttgattttgagttaggagggataatagagaagtccatttaaaaattatttttagaagctaaagaaagtaattatgcttcctgtgaattgtcttttactggcatctttgttttcctctttgatgttagtaaatttggtgtaatacgtggggcttccatatttcaaagtggaagctttcttctctgaagtcgatatatggttttgaattactagagctttggtcagtatttccttccctatatgtcacagagggcaccactgagaactgcgtgcataggacctcaaaatacaaaattagcagggcctcacagtcagcttcctcatggctagtttttcccccttatattacaatttttgttttataagtcatttttttcctgatatttccaccacttttcagagtcatctacaaaatttttctttcctcaagaaaagagttccttttgccttattccttatgccttccccactggtattgagggttttgataataaattggtaggaaaaaaaagtacctcctagaaggaagccttccccaccatttccaggtgccaactgctaagcagatatattccaaaaatggtaactgtcatgtgcacactgttggttatttttaataagcctcttcctactagaacattttattttccttgttcaccatacaatcatgtactctttaacagaaattgcttttaaaaaatatctggaactatctttaaaaaaactttattaataatcatgtatttttactgatcacattttgaaatgcctaaaagactttattgttctaattatccagatgtacctttgtaaaatagctcttttatgaattagctgataaggctgtatgtttctggaacaaaatattggtcatctaaaaactttctgttttctggggtctgggaaaatagaaaataagatttcaaatattaaataagcttaaaggaaccaagcatgtgactttttatttgtattctggttgatttgtcttgtccaagttatattagaaaagttgaggagtcgaggagcctgtaattaattttcctgtcagtgactgtcagacatcttcctgcttattagagcatccctagcaacaaggctaaaccttcatgacagtgctggcaggtgggcttgccctagcatgtggggcaggtttgttgtttttttaatagctttattgagatattcacatatcatataattcatccatttaaagtgtataatcagatgggttttggtatattattgatttttaattgtggtgaaatatatatataacaaaatttgctattgtaactatttttaagtataaagttcagtgaggtaggccagcttttatgacgcacctgaagataactttggttttaatcctaccctaaatgaagcatatgcctctatttttcctgtccccagtgctgggcttcttcacataccaacatttctgtgcttttaccaacagcattttagctcagaaggctcgcttactttgggcatttgctgtattttggttttgaaatacttgtaatttgacttattcttgggataatattttagttttcagtcattcaagggcacatttggctgacggagctaataagcgtaataaaatgcttagtagtttataccatcttttagttaaacattttaaagattaagactattcaaatgtactttgcggaaattaacctgtttgtatgcctggctttgtttacaaacatatatctatatctatatatatagatacagatacagatacatatctggtggaacaaagaaatacctgtaccattcccacttgctctttgatagccacctcctaggaatggagacaataaaactctgtatttgcatgtg

SEQ ID NO: 3988 - DNA, 4976 bp, Homo Sapiens
  NM_015316
gggcgggcgggccgcaggctgtcgggctggggctgaggctgaggctgaggttgaggcggcggcggcggcggccgggtgcccgggacagcgacgcagcgcgccggcggccgcgacagggccagcgagagccccgcagcccgccgcagctgccgcctcgccgcggccgggccggagagcacggcggcgggagcgcggccttaggaggcggccggagcggtgggcacagctcggcgcggagcgtcctgtcaggcggcggccgagggcgtcgcggactctccccgcgatgatgccgatgatattaactgttttcttgagcaacaatgaacagattttaacagaagttcctataacaccggaaacaacctgtcgagatgttgtagaattttgcaaggaacctggagaaggcagctgccatttagctgaagtgtggaggggaaatgaacgtcccataccctttgatcatatgatgtacgaacatcttcagaaatggggtccacggagggaagaagtgaaatttttccttcgacacgaggactccccaactgagaacagtgaacaaggtggccgtcagacccaagagcaacgaactcagagaaatgtaataaatgtacctggagaaaaacgtactgaaaatggggttgggaatccacgtgttgaacttaccctctcagagctccaagatatggcagctaggcaacagcagcagattgaaaatcagcagcagatgttggttgccaaggaacagcgtttacattttctaaagcaacaggagcgccgtcagcagcagtctatttctgaaaatgaaaagcttcagaaattgaaagaacgagttgaagcccaggagaacaagctgaagaaaattcgtgcaatgagaggacaagtcgactacagcaaaatcatgaacggcaatctgtctgctgaaatagaaaggttcagtgccatgttccaggaaaagaagcaggaagtacagactgcaattttaagggttgatcagcttagtcagcaattggaagatttaaagaaaggaaaactgaatgggttccagtcttacaatggcaaattgacgggaccagcggcggtggagttaaaaagactgtaccaagaactacagattcgtaaccaacttaaccaggaacaaaattcaaaacttcagcagcagaaggaactcttaaataagcgcaacatggaggtggccatgatggacaagcgaatcagtgaactgcgtgaacgtctctatgggaaaaaaattcagctgaaccgtgtgaatggcacgtcatcaccacagtcccctctgagcacatcgggcagggtcgctgctgtggggccttatatccaggttcccagtgccggaagctttcctgtgctgggggaccctataaagccccagtctctcagtattgcctcaaatgctgctcatggaagatccaaatccgctaatgatggaaactggccaacattaaaacagaattctagctcttccgtgaaaccagtgcaggtggccggtgcagactggaaggatccgagcgtggaggggtctgtcaagcagggcactgtctccagccagcctgtgcccttctcagcactgggacccacggagaagccgggcatcgagattggtaaagtgccacctcccatcccgggtgtaggcaagcagctgcctccaagctatgggacatacccaagtcctacacctctgggtcctgggtcgacaagctccctggaaaggaggaaggaaggcagcttgcccaggcccagtgcaggcctgccaagtcgacagaggcccaccctgctgcccgccacaggcagcaccccccagccaggctcctcacaacagattcagcagaggatttccgtaccgccaagtcccacgtacccgccagcgggaccacctgcatttccagctggggacagcaagcctgaactcccactgacagtggccattaggcctttcctggctgataaagggtcaaggccacagtctcccaggaaaggaccccagacagtgaattcaagttccatatactccatgtacctccagcaagccacaccacctaagaattaccagccggcagcacacagcgccttaaataagtcagttaaagcagtgtatggtaagcccgttttaccttcgggttcaacctctccatcgccgctgccgtttcttcacgggtcactgtccacgggcacaccacagcctcagccaccttcagaaagtactgagaaagagcctgagcaggatggccccgccgcccccgcagatggcagcaccgtggagagcctgccacggccactcagccccaccaagctcacgcccatcgtgcattcgccactgcgctaccagagtgatgcagacctggaggccctccgcaggaagctggccaacgcgccccggcccctgaaaaagcgcagctccatcacagagcccgagggccccggcgggcccaacatccagaagctgctgtaccagcgcttcaacaccctggccggtggcatggagggcacccctttctaccagcccagcccctcccaggacttcatgggcaccttggccgatgtggacaatggaaacaccaatgccaatggaaacctggaagagctcccccctgcccagcccacagccccactccccgctgagcctgccccgtcatcagatgccaatgataatgagttaccttcccccgaaccagaggagctcatctgtccccaaaccacccaccaaactgccgagccggcagaggacaataacaacaacgtggccacggtccccaccacggagcagatcccgagtcctgtggctgaggccccatctccaggggaagagcaggtccctccagcacctcttccccctgccagccaccctcctgccacctccacgaacaagcggaccaacttgaagaagcccaactcggagcggacggggcacgggctgagagtccggtttaaccccctggcactgctcctagacgcgtctctggaaggagagttcgatctggtgcagaggatcatctatgaggtggaagatcccagcaagcccaacgacgaagggatcaccccactgcacaacgccgtctgcgccggccaccatcacatcgtgaagttcctgctggattttggtgtcaacgtgaatgctgctgatagtgatggatggacgccgctgcactgcgctgcctcttgtaacagcgttcacctctgcaaacagctggtggagagtggtgccgccatttttgcctcaaccataagcgacattgaaactgctgcagacaagtgtgaggagatggaggaaggctacatccagtgctcccagtttctatatggggtgcaggaaaagctgggtgtgatgaacaaaggtgtggcgtatgctctgtgggactacgaggcccagaacagtgacgagctgtccttccacgaaggggacgccctcaccatcctgaggcgcaaggacgaaagcgagactgagtggtggtgggctcgccttggagaccgggagggctatgtgcccaaaaacctgctggggctgtatccacggatcaaaccccgacagcgaacactcgcctgaacttccttttggagcaccgcatggtcttgccagctaccaggagccacttaagagattattgtgctgttttccaggaaagctgcagctagaaaatggtcttaatggtgctcactttagcagacagcgtccacaatgtgaatcctacagtttccaggtgaggccctttctccagtttgcccattaactgggagaggtactttcgcctccaaggactgaattttgccaattactataaatccaaataaatacccactttcaaaacacccacccctcttgccattaagaagtcccataacccccggttggttgccagtgaagacagaagctcttactgacttggccccgaggccatcaccccctccagcagtgaacactgtccgccgctgtgaggcctgctcccctgcgaccgccctgccccccgtcaccgaatcggacactcatcctttctcacacttcccacacatgatccttcttcccttcatcaccaaaggagcctctgtatggaaacatgtccagtgttgctgcccagtgtgtatgcctcccagtacccactctgctcggccgccttgggggttccgcttcctgttccagttcacctaaaggctgattgtgcaggcccagcactgtggctggactgccgcgccacgggcaccaggacccctaagaccaagtgacaactgggagagcctcagcatatactcttctcctccgatctcacagcctgtcatgctgctcagtgtggttctcacccctgcaagctcaaattcagttccctgaatggagtcaggtgctggaggccgtggcagcggagggtggttggggttggggctgggggtggactggtgtgagggcagaccagggccaggtagacggggctgtttggtgcctgaaggatggcagacgcctggtgtcaggaggggccgccaccaaggagcagcagctggggcagaggagctggggtcaggggccacccctctctgccgatctccctgcctgggctggctgtgaggccacctttgtcccaggcccagcctcaaggcaaggagggcgcttcactgaggtgtgaattgtacgtacaggctttttatataccaaaagtattttttgactagaccattcaaagctacccgaactatgttggaaattttttttttctcattaaaatacaggcccttaggctctatttttcatgtatgagtcgtgtgtaatttatgtaaaaatgtgtgtacagactcactgatgcagcactgtagcccatcaccttggagcactgactgtacatagtgtggtgaagaaaagtgaacgcccttgtagagcagcccgaccacaggagcatggccgctgccagcccagacgctgctgacgctgtgtaaatgtgcacaataaacccgtctcaccccggcaaaaaaaaaaaaaaaaa

SEQ ID NO: 3989 - DNA, 5252 bp, Homo Sapiens
  NM_015318
ctcgcgcggcttcccgcttccggctcccagctgctagctactgtggatctgggggggccggacggaggcatcggaggcggctgcgagagtggcagaggagctggcggagagcggcctgcgggcgatcgggccgagcctcgctcaaggagcacccccggggcaccctcctgtccgatggcagcccggccctgtccaggaatgtcggtatgacggtctctcagaaagggggtccccagccaacaccgagcccggctggccctgggacgcaactcggaccaatcacaggagagatggatgaagccgattctgcgtttttaaaatttaagcagacagctgatgactctctgtcccttacatctccaaacaccgagtccatttttgtagaagatccctacaccgcctcgctgaggagtgagattgagtcagacggccacgagtttgaagctgagtcctggagcctcgccgtggatgcagcctacgccaagaagcaaaagagggaggtggtgaaaagacaagatgtcctttatgagctgatgcagacagaggtgcaccacgtgcggacgctcaagatcatgctgaaggtgtactccagggccctgcaggaggagctgcagttcagcagcaaggccattggccgcctcttcccatgcgctgacgacctgctggagacgcacagccacttcctcgctcggctcaaggagcgccgccaggagtccctggaggagggcagtgaccggaattatgtcatccagaaaatcggcgacctcctggttcagcagttttcaggtgaaaatggggagagaatgaaagaaaagtacggtgtgttttgtagtggccacaatgaagctgttagtcattacaagttgctgcttcagcaaaacaagaaatttcaaaacttgatcaagaaaattggcaacttctccatcgtgcggcggcttggcgtgcaggagtgcattctcctggttacacaacgcataaccaaatacccagtgctggtggagcgcatcatccagaacacggaagctggcactgaggactatgaagacctgacccaggccttgaacctcatcaaagatatcatctcacaagtggacgccaaggtcagtgagtgtgagaagggccagcgcctcagggagatcgcagggaagatggacctgaagtcttccagcaaactcaagaacgggctcaccttccgcaaggaagacatgcttcagcggcagctccacctggagggcatgctatgctggaagaccacatcagggcgcttgaaagatatcctggctatcctgctgaccgacgtacttttgctgctacaagaaaaagatcagaaatacgtctttgcttctgtggactcaaagccacccgtcatctcgttacaaaagctcatcgtgagggaagtggccaacgaggagaaagcgatgtttctgatcagcgcctccttgcaagggccggagatgtatgaaatctacacgagctccaaagaggacaggaacgcctggatggcccacatccaaagggctgtggagagctgccctgacgaggaggaggggcccttcagcctgcccgaagaggaaaggaaggtggtcgaggcccgcgccacgagactccgggactttcaagagcggttgagcatgaaagaccagctgatcgcacagagcctcctagagaaacagcagatctacctggagatggccgagatgggcggcctcgaagacctgccccagccccgaggcctattccgtggaggggacccatccgagaccctgcagggggagctaattctcaagtcggccatgagcgagatcgagggcatccagagcctgatctgcaggcagctgggcagcgccaacggccaggcggaagacggaggcagctccacaggcccgcccaggagggctgagaccttcgcgggctacgactgcacaaacagccccaccaagaatggcagtttcaagaagaaagtcagcagcactgaccccaggccccgagactggcgaggccccccaaacagcccggacttgaagctcagtgacagtgacattcctgggagctctgaggaatcgccgcaggtggtggaggcgccaggcacggaatccgatccccgtctgcccaccgtcctggagtcggagcttgtccagcggatccagacactgtcccagctgctcctgaaccttcaggcggtaatcgcccaccaggacagctatgtggagacgcagcgggctgccatccaggagcgggagaagcagttccggctgcagtcgacgcgtgggaacctgctgctggagcaggagcggcaacgcaacttcgagaagcagcgggaggagcgcgcggccctggagaagctgcagagccagctgcggcacgagcagcagcgctgggagcgcgagcgccagtggcagcaccaggagctggagcgtgcgggcgcgcggctgcaggagcgcgagggcgaggcgcggcagctacgcgagcggctggagcaggagcgggccgagctggagcgccagcgccaggcctaccagcacgacctggagcggctgcgcgaggcccagcgtgccgtggagcgcgagcgggagcgcctggagctgctgcgccgcctcaagaagcagaacaccgcgccaggcgcgctgccgcccgacacactggccgaggcccagcccccaagccaccctcccagcttcaacggggaagggctggagggccctcgtgtgagcatgctgccatccggcgtggggccagagtacgcagagcgccccgaggtggctcgccgggacagcgcccccaccgagaaccggctggccaagagcgatgtgcccatccagctgctcagcgccaccaaccagttccagaggcaggcggccgtgcagcagcagatccccaccaagctggcggcctccaccaagggtggcaaggacaagggcggcaagagcaggggctctcagcgctgggagagctcagcgtccttcgacctgaagcagcagctgctgctcaacaagctcatggggaaagatgagagcacctcacggaaccgccgctcgctgagccctatcctgcccggcagacacagtcctgcgcccccaccagaccctggcttccccgccccgagcccaccgccagctgacagcccctccgagggcttctctctcaaggccgggggcacagccctcctgcccgggcccccagctccctcgccactgccggccacaccactcagcgccaaggaggacgccagcaaagaagacgtcatcttcttctaaaagggccgtgactcaaggaaagtttttaatggaaagttgagccagaactaaaccagggagctgtctgaaatcatagcaccccatccgggtggcggggagatcaactccgagctgtttttccgaggcagtgaggaacggtgccggctctgcacggagctgaggacaggacagaccttgctttgagaaggagctgccggccggggccacgctccacagccgccgcgcgacagtggagccaagggttagggcaccaggaggggccaggtggcgtcggcagcatctgtccccagaatcaggcagaatccacttcccaaacagagccccacgcaggttcaccatgaacctcagggtcagggaatgagccaggcacgggggcatgggcagagagggccacggggcagggcccactgagggaacatcagtggccctccagtcaggttctgtgggtttggaagcccatcgtgaaaggggctgacctttgcccctttttacttggcattggttttgaaaccagctgtttcccaaactctgcttcccaagggcaaccgttgctgttcacacgctcagcctgtctgggggagcgggcctctagcttcagccagggcgggtacacaccctgggcacagggtcctcagcccccgggaaatgagctcccagggctggcgtcccaccttccaggtgggggctggcacatcacagactgtcgagagcgccatgtcccagggcatgcagaggatgcacctagagacgttgcagcaagtggacaagtggccgctgtgcgggcccctcgcttgtagtgagctgttgcagcttacggtccgttccctggaggggtggaggaaggaggtgttgggcagcatcaaaggtgctgggacatcccagggtggtgagatccatccacgatccagctccggtggagaaagggcccatgtcaagccttgttctgcaccccaagcattggtggtaggactgggtcctggctgatcgtccttgttcccagtggggtacatgtgagcccctgccagggccaagtccttctcccgaacccagggtcctgggaactgcagatcccggggggattcagcccttctcccactgtgctggcagaggcactcctgtgacgctgaatacagtgaacagggacattcccgccactcggggacagatgggcacaagggaggggaaactccatcaggaagtgctcccctgggcagaggcgcccactgggtgctgtgggctcaggagggggcggggcaggagctggtgccaaccgggaaccagagccccacagccatacagcccattggtgacaaggtcctgagaacacagtggccaggtgtccccaggctcctggcccctccgacgacctcaactctgcccagcccggtccctggccatcagcgacgctgtccgccccccgtcagatcccatgtgtgccatgtttatcatcagtgttttgtatttttgtactgagtatcggagcactttacagaagctgactgtacattcctgttctgttgtgaagagaacattcccagaccctggcaccctcctgagccggcgtgtgccggtccagccctccgagatgccacaattccttggatgggggagaagttcaaggaatttctgctcggccacgcggtgggaaccccgcgtccccgccatgtggcagaggggtctcagtcgtgctaggcatcgggcggcagcgccgacagcccttccctcgccagtgcccctcggccactcctgggttggagcccgattttatttgtaaagttgacagtcgagcaaatgttcctattttcgtgggatctgcacacgtctttgtcagttgtggtcatgatcttagtcacctgctaattatttttacaatgattacaacatttcctcactgcgggatatttctgacccgctttagaacttaagacctgattctagcaataaacgtgtccgagatgagcggtgaaaaaaaaaaaaaaaaaaaaaaaaaaaaaaaaa

SEQ ID NO: 3990 - DNA, 6961 bp, Homo Sapiens
  NM_015321
ccagccggcgcttgcgcggtggcacgggcgagtgggggggcgaggaggtggaggaggaggaggaggaggaggaggtggcggcgagaagatggcgacttcgaacaatccgcggaaattcagcgagaagatcgcgctgcacaatcagaagcaggcggaggagacggcggccttcgaggaggtcatgaaggacctgagcctgacgcgggccgcgcggctccagctccagaaatcccagtacctgcaactgggccccagccgaggccagtactatggcgggtccctgcccaacgtgaaccagatcgggagtggcaccatggacctgcccttccagacccccttccaatcctcgggcctggacaccagccggaccacccggcaccatgggctggtggacagggtgtaccgggagcgtggccggctcggctccccacaccgccggcccctgtcagtggacaaacacggacggcaggccgacagctgcccctatggcaccatgtacctctcaccacccgcggacaccagctggagaaggaccaattctgactccgccctgcaccagagcacaatgacgcccacgcagccagaatcctttagcagtgggtcccaggacgtgcaccagaaaagagtcttactgttaacagtcccaggaatggaagagaccacatcagaggcagacaaaaacctttccaagcaagcatgggacaccaagaagacggggtccaggcccaagtcctgtgaggtccccggaatcaacatcttcccgtctgccgaccaggaaaacactacagccctgatccccgccacccacaacacaggggggtccctgcccgacctgaccaacatccacttcccctccccgctcccgaccccgctggaccccgaggagcccaccttccctgcactgagcagctccagcagcaccggcaacctcgcggccaacctgacgcacctgggcatcggtggcgccggccagggaatgagcacacctggctcctctccacagcaccgcccagctggcgtcagccccctgtccctgagcacagaggcaaggcgtcagcaggcatcgcccaccctgtccccgctgtcacccatcactcaggctgtagccatggacgccctgtctctggagcagcagctgccctacgccttcttcacccaggcgggctcccagcagccaccgccgcagccccagcccccgccgcctcctccacccgcgtcccagcagccaccacccccgccacccccacaggcgcccgtccgcctgccccctggtggccccctgttgcccagcgccagcctgactcgtgggccacagccgcccccgcttgcagtcacggtaccgtcctctctcccccagtcccccccagagaaccctggccagccatcgatggggatcgacatcgcctcggcgccggctctgcagcagtaccgcactagcgccggctccccggccaaccagtctcccacctcgccagtctccaatcaaggcttctccccagggagctccccgcaacacacttccaccctgggcagcgtgtttggggacgcgtactatgagcagcagatggcggccaggcaggccaatgctctgtcccaccagctggagcagttcaacatgatggagaacgccatcagctccagcagcctgtacagcccgggctccacactcaactactcgcaggcggccatgatgggcctcacgggcagccacgggagcctgccggactcgcagcaactgggatacgccagccacagtggcatccccaacatcatcctcacagtgacaggagagtccccccccagcctctctaaagaactgaccagctctctggccggggtcggcgacgtcagcttcgactccgacagccagtttcccctggacgaactcaagatcgaccccctgaccctcgacggactgcacatgctcaacgaccccgacatggttctggccgacccagccaccgaggacaccttccggatggaccgcctgtgagcgggcacgccggcaccctgccgctcagccgtcccgacggcgcctccccagcccggggacggccgtgctccgtccctcgccaacggccgagcttgtgattctgagcttgcaatgccgccaagcgccccccgccagcccgcccccggttgtccacctcccgcgaagcccaatcgcgaggccgcgagccgggccgtccacccacccgcccgcccagggctgggctgggatcggaggccgtgagcctcccgcccctgcagaccctccctgcactggctccctcgcccccagccccggggcctgagccgtcccctgtaagatgcgggaagtgtcagctcccggcgtggcgggcaggctcaggggaggggcgcgcatggtccgccagggctgtgggccgtggcgcattttccgactgtttgtccagctctcactgccttccttggttcccggtcccccagcccatccgccatccccagcccgtggtcaggtagagagtgagccccacgccgccccagggaggaggcgccagagcgcggggcagacgcaaagtgaaataaacactattttgacggctgtcttttatatttctgagcacacacagagccctggcgtccaccggggcaggcgcaaagtggacagagcatgcagggcggcggacccccccacgaccctcctcgccctgtctccatcccctcgaagccctgcctcaccgcaggcaggcccatcggtggccacctttgccgggaagtgaccggaaggccccgtgaggggtcgaacgcggaggcaggggttacctcttggggctttacaatccgtggcccctcctgtcctgcactgtggtcaccggtcctgtcatagatgctgttaatttaaggtacaggcagaggtggccaggggagtttcattgtggtttttttttccttttagtttctagttacattttggttgtagatgactcgcttaatcttttaagccaacacttgcctgagagcatgtttttatttcagaaatccaactttacctattttttaagctaactggaaatggaggccatgcgccccaaagcagcccgccacccacctgagtgtaagaagtgagtccggcttttgggtttcaccccaagttatctcaaaacaaaagggctggtcaggctgggcagggccttgtcaggagctcacggtaggcagaggtgcctctgccagggccacagaacagacttccgggaaggggccttggcttttattgagggtctctcaaagacccagcctgccagcctctcccagaggtgcctgctagtccttagagtgtgtgtgtgaagatgccatgaccagtggcagctgagacctctctgccccaagagtgtgggggactggcagggagcgagggtccccgagacgaggaccacggtcctccctgagaacctgggtggaactggcatttcatcccctctccaccctaccctctggctcctagcccacaccccctctcttgggcagcgtggtctgctggctgccccttcttggcagctcagggtcgtggcaggtggacttggagacacacagcagtgtgtgttttagtggcaggtttcaggagcacctctaagaccagggtgacagggtacttgggagctgtcctggaccctccccataccacgggccctgcaagggaggcatcagggctggctttgttttctgctgttcttggaataggaactgctgttctgatccccccaaaactgcattgcggctctcgctcgctcctgcctgccgggacagcgccttctgctgagtccgtttatttgtagtgtcatggctgctgctttcactggggtcctgggcaccctggcttctgtcctcagagctgggtttgatcctagcaaccatcccttcctctctttgcccggcaatgcctttggcatgtgtctgagcagccaagtggccactcataggagaaggctccctggtcacgttgctcctgctgccgtcttgttccaaggtgcgggggggacactgttggtctgtccaggtcaaggtccctttctcttaccatgacagaggctgggggcagacagcggggacttttttttttttttaagaaaaactacatgtacataggagagtttcattaccattagacttgtatgtaggacttaaaaaaaaatggccttaataaaattacaagcaacccgcctggatgcggttttcaaaagaaggcattgaggaccatgctaggaaacctcataccccatccgtccaacctccggcgggcgccactgcttgtcctctggtcttcggtgtggacagataggagaggagggatgcccacctcggagcatcccaggcccgtggcccattttcagcatcctgaagccagattcacagtgacattgtgttaacgtgacgaccttggtccattatggagttctttttccaataagaacctggtggaccgaggtccgagcttgccagggacagtggggcccacgcgagtacccggggcccagccaggagccagcagccaggcgtccctgtgttccagaaggattcacgcccctcctggacctgggcgggcctcccagggggtctgtatcacggccttttgtgtgtgcgtacgtgtggtttttttaaatatcactactacatattcttgaattgccaagactttctgaaacaagacagcttaagggaatcagccttttgctttgtgatgtgaaaatactgtgatttgacgagccgcttcctgaggggcaggcccacgtggggaggttgcgccgtgtacatagacccgccgtctgtgtccttggtcaggcccggatgcttggtctacactgggttagaggctgctctccccacgcacccatgtgctcatggcttctgcagaccctctgctgggtacatcggtcccctacggcgaagttcagccagggctctccctcctgagagcatggcgtccccaccttcctgtttcgccgacgtcactacccagggtggcaagtcttgcaggcagagggtgtagcccaagttcagcctctctctgtgtcctccagagaagagggttctttgccctcatcagggccctgcttgtgggttttcggctctggggaggagagtgttggcatcagtgtgtttggcctgatttcttcagggggccaagctcccgggaggacccctagccaggagggccccccatgtccatccatccctcctgctggggcttggatgtcaggcttgggggctgtgagctgggacctcgcctgagcccggtcaggtgggacaggagcctgccagaagcccatggggggccaggccgggtggcttctattttatttttttagagatggggtcttgctgtgttgcccaggctggtctcggactcctgggctcaagcagtcctccctcctcggcctcccaaagttctggggctacaggtgtgagccacttctgcccagcatcccaggcctgaacagccttggcaggacccgtccctagagggggctctggtgcctcccttaggtgggccttgagctggtttttaaccaaacatccttccaaactcgggctgcgacctgcttcctgagttttctgtatttccaaggagccctccgaccagggagaggctggtggagtaaggtccagcggtattcgggggtcctctgtcacctcgccctgaaaacagcagctcccatcaccttcactgggtcccgatggagccgtctcagaggccgaggggccctctgtgtgggggtgggacgcaggggctctcagagcaagggccacaaagccgatggcacagatgtgcccctgggcctggcccgtcacccacatgtggtgccctgggccagggcgtgcgggcgccagagccttccctacacagcctaagagcaggggcaagactcggcccctcactcaccctgggaggcctgcctgggctacatggacacctgggtctctttctacccccattcaccatggaccaggggcctccatttcctgggggctcttgcggcatgtgatttgggggtccctgggacattctcccgtcagctccacctgagccaagtgtcctgttccctgcggcccttggccttccagggtcctggccaggcaggggtcaggcaccccatactcttccgtgtggcacaggtgtccacccacccccactggccacagacaccattctccccctgggagcaggaggtggagtaagttgtacccccaggcctgggtgctggggagttcctgagggcatgggtggggcaggagtgagtgcctcgtgatcccagcctcagtttctctcttgtcactttctcaaacctgcaggtctcagggccccgggctcctcctgggcaggatggggggcaggggctgggccttggggtggtgctggctctgatgattccagagcctgtatccaccttctgggctcctggccagcaccccacccccaggagccagggacaggtggcatgtgttggggtcgggggatggcccccatctcgaagtgttctggaatttgggggcaacccttgcccagcccagccatcaagaacttctgatctcctgcccaccaggaggggacttagccatggacttggccagtaggcctggggagggagggctttggcagccaaagtccactggccctgccgtgcccctgagtaggaaactgtcccctaggggctgggtggccccactgatatatgcaaacccgccggtccgagccctgttcctgcctgtgctcctctgtgcccaggctggctctcccccaaccctagcatgtatactctgccacggacgtcccgtgggccatgattgtgggcggccgcagcgggcgggggcaggcggctcagggcacactcggccgtccctgccccatcctctggcagggctgcttttgtctttgtacctttgcatcctttgtaatgaaacgtaataaaaatccaacgttttcgtcaaaaaaaaaaaaaaaaaa

SEQ ID NO: 3991 - DNA, 1699 bp, Homo Sapiens
  NM_015324
ctgagcgctccgacttccagaggagcgctgtgcacgtggagaagagcggggactcggcgaccctgccctcccgaccctcatgttcgaagagcctgagtgggccgaggcggccccagtagccgcgggccttgggcccgtaatctcacgacctccgcctgcggcctcctcgcaaaacaagggctccaagcgccgccagctcttggccacattacgggccctagaggcagcatctctttcccagcatccccccagcctatgtataagtgactctgaggaggaggaggaggaaaggaagaagaaatgccccaaaaaggcatcatttgccagtgcctctgctgaagtagggaagaaagggaagaagaaatgtcaaaaacagggcccaccttgcagtgactctgaggaagaagtagaaaggaagaagaaatgccacaaacaggctcttgttggcagtgactctgctgaagatgagaaaagaaagaggaaatgccagaaacatgcccctataaattcagcccagcacctggacaatgttgaccaaacaggtcccaaagcctggaagggtagtactacaaatgatccaccaaagcaaagccctgggtccacttcccctaaaccccctcatacattaagccgcaagcagtggcggaaccggcaaaagaataagagaagatgtaagaacaagtttcagccacctcaggtgccagaccaggccccagctgaggcccccacagagaagacagaggtgtctcctgttcccaggacagacagccatgaggctcgggcaggggctttgcgagcccgcatggcacagcggctggatggggcccgatttcgctacctcaatgaacagttgtactcagggcccagcagtgctgcacagcgtctcttccaggaagaccctgaggcttttcttctctaccaccgcggcttccagagccaagtgaagaagtggccactgcagccagtggaccgcatcgccagggatcttcgccagcggcctgcatccctagtggtggctgacttcggctgtggggattgccgcttggcttcaagtatccggaaccctgtgcattgctttgacttggcttctctggaccctagggtcactgtgtgtgacatggcccaggttcctctggaggatgagtctgtggatgtggctgtgttttgcctttcactgatgggaaccaacatcagggacttcctagaggaggcaaatagagtactgaagccagggggtctcctgaaagtggctgaggtcagcagccgctttgaggatgttcgaacctttctgcgggctgtgaccaagctaggcttcaagattgtctccaaggacctgaccaacagccatttcttcttgtttgatttccaaaagactgggccccctctggtagggcccaaggctcagctttcaggcctgcagcttcagccatgtctctacaagcgcaggtgacctctggatcttccttgaaaggggaggcagatctcaaactccaggctcagaactgtgaagactgtttccagcctggctgtgagccaagacctggttcctggtggaccctgaggacaaagtgtgataaaacctctggctcagacttgctctactgaaggcttcttggttataagatgcataaagtcactggggctagctaaacaataaagagtttattgtgagaaaaaaaaaaaaaaaaaaaaaaaaaaa

SEQ ID NO: 3992 - DNA, 7966 bp, Homo Sapiens
  NM_015325
ggggccgcgccgggtagcgtttctttttagtgcctgaggcagctctggctcggagagccttttgctagccccacggggacctctgtgcacggatggacccgcccggacctggcgggaagcggcctggcaggcggcggccccggcggcatcagcagagacaggacggggccgacgccgcgggcccctgaggcgtgcgtgcccaccgggcccggcggcggcaccatgatgccgggcgagacccattcggcggcgcccgggacggcggcggacctgtcgcgatgtcagggctgcgcctctctgcagcagaatttgaatgaatatgttgaagcattaattaccttgaaacaaaaaattatcaatacagataatttgttaacagaatatcagaagaaatgtgatgagctgcagtttgcaagaagagagaatagtaatctgcatcaccaagtggaagagatgcttcaaaaaatttctcctctacagaaatgtcaggaagaactgggatctttaaaagcagagctagaagagaaaaagagttctttaaagttgtatcaggatactcatcaggaatatgctcgtgtaaaggaagaatgcttgaagagtgatgctcagaagaagaaactagaagctaaggtgaagaagctgcaagaggctgctgtcaagcaaactcaggacttcaagcaactgagaaatgaaaagaaaatacttgaaaaggaatttaagaagacacaggaaaggcttgacgaattttctaaacagaaaaatgaaaaggagttgagacatattggaacacaaatttcaagtgattcatatggaagcatagataaaagaaaagtgaaactgcttctgaaggaactctggctctgtgtaaacacaacacacagactacctggtgaaggcagcaggtgtgtcccagaaaaacctgccaaagcaatcaccagctccagagtgcctggggaagatggtacgctacctccaacacagggcagccctctcaggacctcaaatgtgcagacatgcctcacaaaactgtccatggagataaaggaggactttttatgtcaaaatgtggaaaaacagagctccagtggaacaaattgtagttctgaccatgtttttaatgagaatggaaatcttgaggttttagtacaaagtcatcgtgacggtggtagtactgaatttgttgatcatgatcatttttttgatgaagatcttcaagctgcaattgacttcttcaaacttccccctcctcttctgtcaccagtgccctcgccccctccgatgtcatcacctcacccgggttccttaccgtcttcatttgcacctgaaacctactttggagaatacacagattccagcgataatgactcagtccagcttagaaattctgctgagtgtgtttcagaagatgatacaactgaatcacagaattattttggctcattgagaaaaaataaaggaagtggcacatgggaggaaaagcccaaatcacatgaagctatccaagctctgaatacatgggaagtaaataaagtgacaacttctggactcgagactttcacagcaacactgagagaatcttctgccacacactccttagttggtgaaaaacactggaccacagcatctcgatccatgagtgatagaaaaagagacattttacatgagacaaaaacacaaatggaggttagggagatggataagtcagtacaaactgagaagaccattcataaactcactcgaggtctatgcattgagagattgtctgccagccctgcacaagagaaggaagctgcccctgggaagtctgagttgtgttcttctccccttggcaaaaggccattaaatgaactcatggaatctgaaggaaaaaccgtattgtctaaaatgatgggatcgcccaaatcagagtttactaagtggacacgaattaatgaaatcacttctgaaccagaccgtatcacagtttctggccattttcacagactatctagagaattggaaaaggaaaaagaagatactcaagggttcactttaggagaatcacctgaatcagaagatgatgactcaggtgatggaatggatgtagcagggcttgacattgaaaccagtttttcttcctcttctaccttggtagcattgtctgttggcagtaatccccagtcttcttctgggttagactgtggtaatgatacagatattactactaaagtattctctactgaaccgcatcattcagaacataaattgcaaactaaaactttaaacacattacatctgcagtctgagccaccggagtgttctataggaggaaacaacttggagaatagcttgtgtgccttgagccctgaattgggagcatctaattttaatgatcagaagagcagtgggatagaatatacaaaagtagtaaaaggcttgaccaaaatacattcacttcctcggtcagtatttatgaaagctacaaaagatgggcaatgtgaaagtcaagatccaagaattgagctcacactaaataagccagatttcacatcattaataggttctcaggctgccttgatcaagagtggtttgggttttgttaaaagtacttcatggcaccatagtgatttattaaggaaaggtggcgaagaaagtctgagagccaaatcagaacatgaacagaagactagccatcagttacaaaaggcaatgccattcctacaaaatagaggaccaacacccaagcctgatcttcttagagaaaataacaatcctgtagaattcaagaccactgcatcggtgttgcctaatcaagtatcagttatcacaaaacagacaagacctgaaaaggttcagagtgccaaattggaacacttgaggccacatagggttgagcctaccttagtaacagaaaatagtggcaacaaaaccggtatgtcaactgtagcaaaatgtgatggggaaagagatgatacaacacaaaacatcacggaggtggctgctgtgaaaagcatttcaccagaagtttctgcctctaggagaaaattagattttaattctccaggtggttcttcaccagtagaaaattctgattgttccacaaatagcagattatctttctctcctgaaaatatcctcatccaaaaccaagacattgtgagagaagctgcagtgcagggagatgggcagaagcaaaggcagcctcaggccacagatctggactccagtgggacacatggcagtgagatgcttccagccacagaagtgactgtgtcaggagggttttctgttgaagaaaccagctgtggagacacagggagatctggtggtgaggccctggctgttgcaaatgattctaccagcacaccacaaaatgctaatggactttggaaattgaaatctacaactcccggtggtgctttgcctgagtgttttggcaccacagacactactttttcttcagcattttgcagaaaacatggagagacacaggatacctcccaaagtagcctgcctggtaccttacattgttacacaggcattcgagaggggggagacgacactgaggtagagagtgaggcatttagctgcagtgaggggagcgaacagcaagatgctcctgatgactcacagaaaaatttaggagacacagatgctgctgtagccgaggtgagaccttccttagaggtaggttatttgacgtcagctctgcaagattttaacataagtactttttctgagctggatagactttccacatcagaggttgtgatgtttcttgagagctgtcagttaggggattatagttcaggggactctgtttctgaatgttctagtaaaggaaccctaagtaaagaaatgaacaaagaattaaaggcaagtgaaataggagaaaaatacagaaagcaaccctgtgaggaagaaacacttggaacctgtgaagagtggattgaatcagaggaagatgattattcgttaaaaaatacaagtcagctcactcagtgttctttggaaactctgtctgaggttctgaccaagattaggcaagaacttcaaacaaattctgaagattgcaatggtaaagatactggcagtttattgctcttaaatgtaaataacaacatgaccactgagaatttaaaagagaaaagtccatttcgggaaacgactggctcctcatcacatgcttcagaaccaaccccacaagcagctgccttggacactgagggcagctctcccatcagcggtatgcctcagaatgaaaaccctcagagcagaccagaggcccgttcagatgcaggcaggcaaaccgatggtggggaagaagacctgccagaacctgtggagccatcagccttgtgctctgactctgtgatggagccatccatagagcaaagttctaactgcgaggccgaaacaacatttcagtgtcagatagcaacagtgacctcagaagttataaacgtacttataaataaggatcagaatctagtcattgaaaagggggacaactggacaatcatcagtggtgtagctgtcttgccacatgtggaccaggtcacactgtgtgacattcctggagacatccctatttctcaggatcaaggagagctggaagctggttgcatcccagtgacttctgctgagaagtccccagaggccagtcacactggccctgcatttcaggaggctccatgtggcaataatctttcatgtccccaagaggatgtttcaagcagtggtcagagcaccaactttgataagagtcgtttgcgaaatagacccgttaagcctagtatatggattagttctcaaatctatgatcaaaacttcgagactcagattgttgcgtctgatcacacatattataactcaaaactagagccatctggcaaaaataagaatcgatcaaagatttcaaacaaagatcagtcaaacaaaccagtaaaaacttcagcgtcgagcagagttgaaactcatcagagtgaagttgctcagtcattttcaggggaaaaagctaatacaaaaactcaaagaagccaaactcagaccattttagcaaatgctgatacatccactcctacagattgttctcctgacacactgagtaaaatacggcaagaggtggggcctcctttgccgcctctgcttgctcctctgatagctacacctccaaggacttcacagccactgtctccactgatatcgagttctagtccttcctcaccagcctctcctgttggccaggtttctcccttccgtgaaaccccagtgcctcctgccatgtctccatggccagaggaccccagacgtgcctctcctccagatccttctccatctccatctgcagcttcagccagtgagagggtagtgccgtctcctctgcagttctgtgcggccacgccgaagcacgcacttcctgtgcctggccgactcccaccctgtgcatctggccacgctgctgtgggagggcctcaggagaattctgtgaaaatccttgacaccatgtatccagagttatctgccagggcccggaccctcaacatcctcaaagggaatattcaactcacacgaggtccgcctgctgactgtaagaatttaccgggacctgccagtgctatgataggattcaaaacgatcacttcagcagcaactgcttttgtcaaaactgggagcagctctggtggtgactgtaaccaagacaagtcaagagatttggggactcagcaggattcaagcgggaaaagaacactgtcaacgtctacactgagaagtgctaaaagactgcgcctggacactgggtccccagaaccagaaaccaggggagtcactgcagaaggaatccacaaaaacctcccagggaacctccctccagctgaagttgcaacaacaaatgaggaaagaagttgttctagtccagccgtcagtgcagtttcacagttgcctttaagcccaaaagaaactgtggagtcccatgataaagccatagctaatgccctgaagaaaattgcagagttttcttttgatctgttacctgtcattcgtagtcatgtgtatgtgggaaatatctccaaaaagcccgtaatgagagatcaagagaaggaagttgtttatgaatttagcacaacaaaaaagcatttagcagagtgcttgcttcactctattctctcagaactaaaaattcagaagatatctatggaccacaattacattcacgccctctgcagggtgtatgtgggtatttgtcggcaactcggagacttggaaagagctcgtttgttttgctacagcctacttaaagaagattttccggagtctgaaaaattaactttgtttattgcaaacatgtggcatgatatatttctctctcaatcggtgattaataaagcaatgcagttagttgccaggcaacgtgctaaaggagaggttctgaactgcttgagagcttttcttaattgggaaaagaatgccccggtagatgttggcttcatggtttctaagctgcttttgaccatacagttatgtccaaaaacagaatttcaacctagtgaaaaatttggtgaagacctaagtgataacacttgggaatacatatttgccattgatctgctctgctgccatcagaaatggatctggacgcatgataacatcataagtaaggagctgtggcctgtgatggataaatggataaaatacagaaaaggacatgcaaacattgcgtatactcctgatattattatagcctcaatactgaggctgattggtcgtttaggccaattgggtttgaaagaaggatttccatctgctgtgaaaaatattagttcggttattggtatgtttatacagcatgctcacgatgaagatataccatggggtatacagttagcagccgtgtatgctctttgtgacttgagtcccagcaatccagcagaaatttccaagatcctggaagcttggcggagagaggcctccaaaagcgttccgtctgcgattgtcagctgcctagaggaagtcagtgccctgagcacagaggagcttggctgacctgggatgccactgaggcttgagaagtgccttgacacattttgaacacaaatagtttgatcagctttcagaatacaaagggaggtttcaaaacaaaaagacataaaatagataaaacagaccagaggctctccttattgtttggcaaggagacaggagaaacaagcagtcgcatagtcgtttttccctaaatctaatacgtttcacttaaggctgttgtgatctgtgacatatgggttatattattgtgtctttgtcaaacaacaaaaacttgaacttagccctttttttgctgcagaaagtgtccttttagtggcttcttaaaattgagtggcattttataatgaacttaccaatataaaaacatgatttggttcctgagctgttgttgttggacttgtgttccaatgagtgactaggaaaaaataaattggcaaaaacctagagttttctgctatctttgctggaaatgagttgcaaaagtttttctcaagatgtagtgcgtaattgatcagagcaaaacatgcagagcccttagcagaaacccactttaatgcattttcttcatatccctaaagttccttaaaaatatgtgacaatgcatcaggaagaggagaactgaagagtagaagttcccttgcagatttttttatcagtgacatgtaatgagcaattcacagatgagcgcaggcagagctctgtgtgccgtgtacatatggaccgtgctatgatgtgtctcacattggatgatattccactttgggaattttagtatttgtatatagaaaatgggtttaataactcaccatggttttgatttgtcttatattcgttatttcttaaaactcttgtatgtgtttttataataaaaaataaaagtaagccatggatattaaaaaaaaaaaaaaaaaaaaaaaaaaaagaaagaaaaaaaaaaaaaaaa

SEQ ID NO: 3993 - DNA, 5075 bp, Homo Sapiens
  NM_015328
ggaggcggggccgaccaagagcaggagctggagtctgagccggtggttgcagcggaggcggtgatgtcggtgcaggttgtgtcagccgcggctgccgccaaggtgcctgaggtggagctgaaggacctgagcccctccgaggcggagtcgcaactaggactgagcacggccgccgtgggcgccatggcccccccggcgggcggtggagaccctgaggctccagctcccgccgcggagcggcccccggtccccggcccgggctcggggcccgccgccgctctcagccccgccgccgggaaggtgcctcaggcgtcggccatgaagcggagcgacccacatcaccagcaccagcggcaccgcgacggcggcgaggccctggtcagccccgacggcaccgtcaccgaggcgccgcgcacagtcaagaagcagatccagtttgctgaccagaagcaagaattcaacaaacgtcccaccaaaattggacgtcgctctttgtctcgttccatttctcagtcatctactgacagctacagctcagcggcttcatatacagatagctctgatgatgagacatcgcccagggacaagcagcaaaagaactctaagggaagcagtgacttctgtgttaagaacatcaaacaggcagagtttggacgaagagaaattgaaattgctgaacaagaaatgcctgcattgatggctttgaggaagagagctcaaggagaaaagcctttggctggagccaaaatcgtgggttgcacacacatcactgctcagactgctgtgcttatggaaactctgggtgctctgggggcccagtgccgatgggctgcctgcaacatctattccactctcaatgaagtggctgctgctctagcagaaagtggatttcctgtttttgcctggaagggagagtcagaagatgacttttggtggtgtatcgatagatgtgtgaatgtggagggctggcagccaaacatgatcttggatgatggaggggatcttacccactggatttataaaaagtatcccaacatgtttaagaaaatcaagggcatagtagaggagagtgttactggagttcacaggctgtaccaactgtccaaagctgggaagctgtgtgttccagccatgaatgtcaatgactcagtcaccaaacagaaatttgacaacctctactgttgccgtgaatcaattcttgatggacttaaaaggacaacagacatgatgtttggtggaaagcaagtggtagtctgtggctatggagaggtggggaaagggtgctgtgctgccctgaaagccatgggctccattgtgtatgtaactgaaattgaccccatctgtgccctgcaagcctgtatggatggatttcgactggtgaaattaaatgaggtcatccgacaagtggacattgttattacctgtacaggtaacaagaatgtggtaaccagagagcacttggaccgtatgaagaatagctgcatcgtttgtaacatgggacattccaacacagagattgacgtggcgagtctgcggacaccagaactgacctgggagcgagtgagatctcaagttgaccatgtgatatggcctgatggcaagaggatagtactgctggcagagggccgcctgctgaaccttagctgctccacagtgcctacatttgtgctctcaatcactgctactactcaggctcttgccttgatagagctttacaatgctcctgagggtcgctataagcaggatgtctacctgttgcccaagaagatggatgagtatgtggccagcctacacctgcctacctttgatgcccacttgacagagctgacagatgaacaggccaagtatctgggactcaacaagaatgggcccttcaagcctaattactacaggtattaagttcctgtaactcaaaccagaatttttaaggaatagaactccaagccttttctccactactatacaagaaagaattcagcaagctgcttctccaatcaaagctgcctgccgtgctcaccctgtgtgttaggttatttatttattaaaatcaagaatcctgtgcctgtagtgttggcccagagtgtggttactgccctgagggccatgaaagccacagaggatgggctgaggaaggaaagaaatggggttactgctcccagtgcatcatttgcatcattccccattgactgaatcctcagcagtggccgtttttcctcttgtccaggctcacgagttagtccagggattccatactccctattccctggagttttctggaataaattttcagcacctgcttttctcagcttggcccttccccgggtgaggccgtttggaattaacatggccagtgtttcacacaagattgggttcccaatcttgaccatcactatcactgccttctttatataaaggctaataaggaaggagtgttatttatggctttgccaagctacatcaagaactcagctgtgctgtgcctaccaggggtctcctttcttacccaggactcctttcttctccttgaatatttatgtccattttaacacttcctggttgcaagagggatgtgcctccattatttcctccacagttttggtatttgtcagacatttgttctgctgtctttctaatccagccaacgtctgctcaggaagtggggccagctccactgggacccatagttttacttccttgtcatttgattggatagtttccaaggaagcccctccagattggcactatctcagaaaaggagagcttgttgtgaaacactgcttcctgaaacttcctgctattgcctaaagctacgtctgaaactgagtagggaaaggcatacttttccagggacttagggggataggctttggaaatgggacaggtctttcagactcacagcttgataccctaacaaagcagagtatatttatttgtttcccaggaaggccattgcagtttgactggctgagggatacagagatgaaattgtaaactgtatccagattatcaaagctaatttgactagtttgaacctcgtcagacattcattcctttggccattgccatggatgaaaccgagatctgcagtctgatctgtggacttctctgctggcatatcttttatgatttaacctcttccatttgatgattctgtatttcagagtcagtttcttgagtaactccagtgctacaaaaagaattagtaatgtggtgtgggcagcgtgacattttatgtcccacccaaaaattggattccttttggagactgatctgttggtctcaggcatttcattaggaccagattggttctaagagttagtctggactggccctaggaaacttgaattaaataagcctcttccccttaccgatcctttttaacactctcaggtttgtttgtttcccacttttttcctatgctggtctgcctcaaagtctcaagaccaaggtgactcaagataacaccagaccacgcatgatcaccaaaaccttcccatcctgattctcttcttctacctctaccctctccaacttctcctggtcttcacatatactctcaaagctagtctgaaagtgaccttactttcggaagtagggaagtggaactttggtaaatgactgtttgcctcatttaatagtatacaggctcagcccatagactacagttcttcagaggccatatgtctcagcaagtactggttatattctttttttgtaaggaagatcataaatgctaaaaattccactaagccattcagttcttccttttgcctacctagtcctgatttttgtattaattggttccctttagcaagggattcagatctttgtaccttatcttatatccagagcagattccatttggcagatagatggtctctagcctattgtattcttagaccaaaaatcataacctgctgtttctcagcaaagccttgctctctggagcttactatgtgctggtacttaaagagtacattctgccttgctgtagtgaagagacccactccaaataaaaaaggggccacacggggcttctaagttaggttgccagtgttgctgcccatgatgagttatttgcctctgagtttcagatgacctctctgtagggacactgtgttatcaaccattaagaagaaagaaccacaagcctcccaagtatttgggttctatcttagggttgaaatctggtcattattccctctacccttggaatcagagcaatgtgtcttctttcctccaacctcttaccttagatgcatcctggttatctggaagcatgggaaagaaggctacttatctctttgtatgtggctccagtctgtgaggatacataacattttctctacaatgaatctgtgctaatattttgccttctttctttcttttcttttcacccttagagacagggtttcactatgttgcccaggctggtctcaaactcctgggctcaagcaatcctcctgcctcagcttcctgagtagctggaaccacaggtgtgtgctaccgtgcctggcacttttttgccttcttaatggagatattcagttttctttttttcatttaaacaaagaaaaaaaatgtatctactctaccttccctctgctctcctccctccctatcctacttgcccatatgagcacggctccccatggccacatactcctgcaaagcttttatgctgcttcgcttttctctaaacagatctgatattgctgctcctgtggttttctcaaaattaactttgccgtggtttttaaaaaggaatcaaaatgcattgttgcattaagctttttcaataaaggaaaattacggaaggaaaataggcaacaccagcaaattatatgtggacaggttctaaactctatatatacatatatatatatatatctatatatctatatacgtaatcatctagttctgtcatcttactgaaaggaataacacttctaaagatcaccatttctgagaagttcttggaaatctttatgtctaagtgattgtattagatcagcaataatgactatgtaatctcaaaaaacaaataaaatattcttaacatggaaaaaaaaaaa

SEQ ID NO: 3994 - DNA, 6795 bp, Homo Sapiens
  NM_015330
ggccaagggcggggcccgcgagggaggccgggcggcccggcaagcggcgctgcggggtaggctgctttcctgaggccggactcaacgggtctcggctgagccaccgggtgagctcaccgcccagcccaaaccaggagattgcgagggagcgatgcggtgcagcgcgtgttcttggggaagatcccgactaagccattttccagtggcacctcttccatcatgagttcctgaggcagtccgatggggctactttattccagaacaatcacaatttgcttgtaaatgcatcacgaagaggcagcccagaatgaagaaagcaagcaggagtgttggctcagtgcctaaagtgtctgcaataagtaaaacgcaaacagcagaaaaaattaaacctgaaaacagctcttcagcatctacgggaggcaaacttgtaaaacctggaacagcagcatcattgtcaaagaccaagagcagtgatgaccttttagctggaatggccggaggggtaacggtgactaatggtgttaaaggaaagaaaagcacctgcccatctgcagcaccttcagcatctgcccctgccatgaccaccgtggagaacaaatccaagattagcacaggcacagcttcttcaaccaagcggagcacttctacaggtaataaagaatccagttctactagagaaagattacgtgaacgtacccgattaaaccagagcaaaaaactaccttctgcaggtcagggagctaatgacatggcattggccaaacgttcccgcagtcgaactgctacagaatgtgacgttcgtatgagcaagtctaagtcagacaatcagatcagtgacagagctgctttggaggccaaagtgaaggatcttctcacgctggcaaaaaccaaagacgtagaaattttacatttgagaaatgaactgcgagacatgcgtgcccagctgggcattaatgaggatcattctgagggtgatgaaaaatctgagaaggaaactattatggctcaccagccgactgatgtggagtccactttattgcagttgcaggaacagaatactgccatccgtgaagaactcaaccagctgaaaaatgaaaacagaatgttaaaggacaggttgaatgcattgggcttttccctagagcagaggttagacaattctgaaaaactgtttggctatcagtccctgagcccagaaatcacccctgataaccagagcgatggaggaggaactctgacttcttcagtggaaggctctgcccctggctcagtggaggatctcttgagtcaggatgaaaatacactaatggaccatcagcacagtaactccatggacaatttagacagtgagtgcagtgaggtctaccagcccctcacatcgagcgatgatgcgctggatgcaccatcctcctcagagtcggaaggcatccccagcatagagcgctcccggaaggggagcagcgggaatgccagtgaagtgtccgtggcttgcctgactgaacggatacaccagatggaagagaaccaacacagtacaagtgaggaactccaggcaaccctgcaagagctagctgatttacagcagattacccaggaactgaatagtgaaaacgaaaggcttggagaagagaaggttattctgatggagtctttatgtcagcagagcgataagttggaacactttagtcgacagattgaatacttccgctctcttctagatgagcatcacatttcttatgtcatagatgaagatgtaaaaagtgggcgctatatggaattagagcaacgttacatggacctcgctgagaatgcccgttttgaacgggagcagcttcttggtgtccagcagcatttaagcaatactttgaaaatggcagaacaagacaataaggaagctcaagaaatgataggggcactcaaagaacgcagtcaccatatggagcgaattattgagtctgagcagaaaggaaaagcagccttggcagccacgttagaggaatacaaagccacagtggccagtgaccagatagagatgaatcgcctgaaggctcagctggagaatgaaaagcagaaagtggcagagctgtattctatccataactctggagacaaatctgatattcaggacctcctggagagtgtcaggctggacaaagaaaaagcagagactttggctagtagcttgcaggaagatctggctcatacccgaaatgatgccaatcgattacaggatgccattgctaaggtagaggatgaataccgagccttccaagaagaagctaagaaacaaattgaagatttgaatatgacgttagaaaaattaagatcagacctggatgaaaaagaaacagaaaggagtgacatgaaagaaaccatctttgaacttgaagatgaagtagaacaacatcgtgctgtgaaacttcatgacaacctcattatttctgatctagagaatacagttaaaaaactccaggaccaaaagcacgacatggaaagagaaataaagacactccacagaagacttcgggaagaatctgcggaatggcggcagtttcaggctgatctccagactgcagtagtcattgcaaatgacattaaatctgaagcccaagaggagattggtgatctaaagcgccggttacatgaggctcaagaaaaaaatgagaaactcacaaaagaattggaggaaataaagtcacgcaagcaagaggaggagcgaggccgggtatacaattacatgaatgccgttgagagagatttggcagccttaaggcagggaatgggactgagtagaaggtcctcgacttcctcagagccaactcctacagtaaaaaccctcatcaagtcctttgacagtgcatctcaagtaccaaaccctgctgcagctgcaattcctcgaacgcccctgagcccaagtcctatgaaaacccctcctgcagcagctgtgtcccctatgcagagacattccataagtggaccaatctcaacatccaaacccctgacagccctgtcagataagagaccaaactatggggaaatccctgttcaagagcatctgttaagaacatcttcagccagccggcctgcttccctgccaagagtgcctgcgatggaaagtgccaagaccctctcagtgtctcgacgaagtagtgaagaagtgaaacgggacatttctgcacaggagggagcgtcgccagcctctctgatggctatgggaaccacgtctccacagctttccctgtcctcttctccaacggcatctgtgactcccaccacccgaagccgaataagagaagaaaggaaagaccctctctcagcattggccagagaatatggaggatcaaagaggaacgccttgctgaagtggtgtcagaagaaaacagaaggctatcagaatattgacattacaaacttcagcagcagctggaatgatgggctggccttctgtgccctcctgcatacatatctccctgcccacattccatatcaagaactgaacagccaggataagagaaggaacttcatgctggctttccaggcagctgaaagtgtcggcatcaaatccacactggacattaatgaaatggtacggactgaacgacccgactggcagaacgtgatgctgtatgtgacggcgatctacaagtactttgagacctgagcatgccgggaggagccgccccaatagcgggggtacccctccacagcgaccgagcgacaccgacgccattagctacgcacccctgtaaagcttccagcaactctgggctgccccacagcgtgtgagcctccagctcggggcttccgtattggaagaactcagccgtgtggcccacagctcccaccagggcccctcccacatgacccgtccattcaggtcatgtgggctcagcacacatcctgcaggccggtggctgctggagttttccttctgaagagaatattgaactacactagtgctccagggcaccaaacaaaaagggctcatgcacagctgaatttgggaaaagggattcagttctgtgggaaactcactagggttgatgaaggctcggccgcggcacttcctgactattggctggggtgggttccggtgctggtgagaacccagaaggagagtcagcgcctggcagttcccagcgccctgggcccttcaccgtcctagtttggaggagcatgttcaccacagacgtgggtcagctgccccacacctgacggggctgtcccggccgacacaatccaggcgtgttcagcctgagctaggagagtatctagagggcgtggtgcgggcacgccagggctggggtgctgctgctgcactcacgcggctgggctttctggcgggaagcagttacgggggccccttgcctggactcagcgacctgtcttccagcctggaaggggtttggagtcccagctctggctttagatttcttcatcataaggagtttttctagttaacatttttgttttgttacgagcaatgctggaaaaggtcgctcctgttctgttagtaccaaagttacattgtttcaataagcatagaaatctaaacaacatctgtacattagcatggtgagagcaaggaataaagcaggaaataggagaaaagtaaacaactttagggagcccaggcagtgtcatttaaactcactgagtcactaagacataattctcctaggccagagttaaagaaagtgccttaactcttcttgtgagggcagccactgccctccgtggccaaggcaggacctccaagactcagtggttgagttgtctcctaccaccatgcccgccctccccaggtactgggtccatgccccctgtgcccaccctccccaggtgctgggtccatgctgtttgaaccaaagccttatttaaaggtggtcactggagatgctctcaggccagaactcaacagctatttttgggaatagggatctcccgtgtgcctaacgcagtagctattggtttgaacaatgtccagacaagacctgtacctttgagaatataactgtgtttggcacctgcatagcaccatgaggaagaccagccaccagtggaagcggggtcactgccccacagactggatgcaatgaggggctcacaggaggcccagccagcccgattgtgggctgaggggtctgcattcaagcacgatgttctagaataggagtttaacgtgtctacgtaacctagaatgtggttattaggaaaggggctgtgcatgtgggtgcagctggcggcacacctggtcaccagatggccagaagctgcccatcagccctgcccagatgtcagcctgggagctcaggctgctgccgctggctggatgccctttggtgaaatgcctgttttcagctaagaaaggagaggccaggcaagcaaagtcatgccacaaagcatatcagagacccccgcagactcctggccccgtcccgccccctgtctgagttgtgtttttgttgctgttcctctgttgatggccagctctgctgttggcatgagccactgatgttcatgtgagaattactgtttttaagtgtctctccacttaggtgtcctcagttcccacttttgctctcatttgccttcacagaggccactccacctgtccggatccagctgtctggtcatggtttggtttatttattttgtccttcaggggctgttttgccctaagaatgagggggcttcccctggtctgcagttcccaactttatcccttgctggccatgcgagcccagccctggtgcctcatgggatgggggggtaggggtccccaggatcttctggaggaaggtggccatggatggatgggctgtatctgtgttttccctctgggagtctcatgggtccagcatcaggcctgaggtcagcaacagggaaagagggtgggcacggggagggcttggccccgcctatctagaggcttgcctcgggcccctccttggggaaggtttgcgtgcagagctgcaagggagagggttccagaagcattgccttttgcctcgtctaataggatccttaggacactgtgggctttaggaatgactatagatgctcacacgtgtttaaagtgacatttggagatgctctcagtcctgtggcatctggcacgaagtctccaagaagccactttgcctcttctcccttcaagcacaagctttactgcaaaagggccagtcgcgtttctatttctctcgatcccaggcttctgcggaccgacgatacgtttaaatgttgttctagtaaatattcttgaatgtattaaaatggctgaaacaacaagcttgggcttttctagcttgccctccactccctgccgtccctctgacgtcgcataaaccagaacccagctccctcctgggactggctgtggagagaagggcacctctgagccagcctgtggccctaccccaaggcgcacttcctcatgtgggcagatcctgaccaggagtccagggtggcctcccctgggccacagcacatcaccgtgtggcctggggctgtgggacagtgagccctgtaaccactagggttctgtgacagatgccaagaccccagagaccgtggcagagctacccccaggagagcggaagcccctacacagcccagacacatgccttccctgggggctggggagtgtgtctcgaggggttttgtttgttttgaggcatgtatcatcttggaaataattgtcaggatgtataaaatagagaaaaagaaaaaaggtatcctacccagaggcaaccagataaacttttttgcctgtgcaaaaaaaaaaaaaaaaaa

SEQ ID NO: 3995 - DNA, 2944 bp, Homo Sapiens
  NM_015331
cgcctggaaacacgaacttccggtctcttaggctccgggccacagagacggtgtcagtggtagcctagagaggccgctaacagacaggagccgaacgggggcttccgctcagcagagaggcaagatggctacggcagggggtggctctggggctgacccgggaagtcggggtctccttcgccttctgtctttctgcgtcctactagcaggtttgtgcaggggaaactcagtggagaggaagatatatatccccttaaataaaacagctccctgtgttcgcctgctcaacgccactcatcagattggctgccagtcttcaattagtggagacacaggggttatccacgtagtagagaaagaggaggacctacagtgggtattgactgatggccccaaccccccttacatggttctgctggagagcaagcattttaccagggatttaatggagaagctgaaagggagaaccagccgaattgctggtcttgcagtgtccttgaccaagcccagtcctgcctcaggcttctctcctagtgtacagtgcccaaatgatgggtttggtgtttactccaattcctatgggccagagtttgctcactgcagagaaatacagtggaattcgctgggcaatggtttggcttatgaagactttagtttccccatctttcttcttgaagatgaaaatgaaaccaaagtcatcaagcagtgctatcaagatcacaacctgagtcagaatggctcagcaccaaccttcccactatgtgccatgcagctcttttcacacatgcatgctgtcatcagcactgccacctgcatgcggcgcagctccatccaaagcaccttcagcatcaacccagaaatcgtctgtgaccccctgtctgattacaatgtgtggagcatgctaaagcctataaatacaactgggacattaaagcctgacgacagggttgtggttgctgccacccggctggatagtcgttcctttttctggaatgtggccccaggggctgaaagcgcagtggcttcctttgtcacccagctggctgctgctgaagctttgcaaaaggcacctgatgtgaccaccctgccccgcaatgtcatgtttgtcttctttcaaggggaaacttttgactacattggcagctcgaggatggtctacgatatggagaagggcaagtttcccgtgcagttagagaatgttgactcatttgtggagctgggacaggtggccttaagaacttcattagagctttggatgcacacagatcctgtttctcagaaaaatgagtctgtacggaaccaggtggaggatctcctggccacattggagaagagtggtgctggtgtccctgctgtcatcctcaggaggccaaatcagtcccagcctctcccaccatcttccctgcagcgatttcttcgagctcgaaacatctctggcgttgttctggctgaccactctggtgccttccataacaaatattaccagagtatttacgacactgctgagaacattaatgtgagctatcccgaatggctgagccctgaagaggacctgaactttgtaacagacactgccaaggccctggcagatgtggccacggtgctgggacgtgctctgtatgagcttgcaggaggaaccaacttcagcgacacagttcaggctgatccccaaacggttacccgcctgctctatgggttcctgattaaagccaacaactcatggttccagtctatcctcaggcaggacctaaggtcctacttgggtgacgggcctcttcaacattacatcgctgtctccagccccaccaacaccacttatgttgtacagtatgccttggcaaatttgactggcacagtggtcaacctcacccgagagcagtgccaggatccaagtaaagtcccaagtgaaaacaaggatctgtatgagtactcatgggtccagggccctttgcattctaatgagacggaccgactcccccggtgtgtgcgttctactgcacgattagccagggccttgtctcctgcctttgaactgagtcagtggagctctactgaatactctacatggactgagagccgctggaaagatatccgtgcccggatatttctcatcgccagcaaagagcttgagttgatcaccctgacagtgggcttcggcatcctcatcttctccctcatcgtcacctactgcatcaatgccaaagctgatgtccttttcattgctccccgggagccaggagctgtgtcatactgaggaggaccccagcttttcttgccagctcagcagttcacttcctagagcatctgtcccactgggacacaaccactaatttgtcactggaacctccctgggcctgtctcagattgggattaacataaaagagtggaactatccaaaagagacagggagaaataaataaattgcctcccttcctccgctcccctttcccatcaccccttccccatttcctcttccttctctactcatgccagattttgggattacaaatagaagcttcttgctcctgtttaactccctagttacccaccctaatttgcccttcaggacccttctactttttccttcctgccctgtacctctctctgctcctcacccccacccctgtacccagccaccttcctgactgggaaggacataaaaggtttaatgtcagggtcaaactacattgagcccctgaggacaggggcatctctgggctgagcctactgtctccttcccactgtcctttctccaggccctcagatggcacattagggtgggcgtgctgcgggtgggtatcccacctccagcccacagtgctcagttgtactttttattaagctgtaatatctatttttgtttttgtctttttcctttattctttttgtaaatatatatataatgagtttcattaaaatagattatcccacacgaaaaaaaaaa

SEQ ID NO: 3996 - DNA, 4932 bp, Homo Sapiens
  NM_015332
caaagcccgtggggcagctgggtctggggaaaacagcccggggccgcgggggccgaacgagcacggaccggaagttccgcagccgcgccgtccggcggagccgttggctgcggacgccggaagtggccagtcggcaggtctgaggcggcgctgtgtgtgtgaagcgtacctagggcgggaggcgacatggagacaggggcggccgagctgtatgaccaggcccttttgggcatcctgcagcacgtgggcaacgtccaggatttcctgcgcgttctctttggcttcctctaccgcaagacagacttctatcgcttgctgcgccacccatcggaccgcatgggcttcccgcccggggccgcgcaggccttggtgctgcaggtattcaaaacctttgaccacatggcccgtcaggatgatgagaagagaaggcaggaacttgaagagaaaatcagaagaaaggaagaggaagaggccaagactgtgtcagctgctgcagctgagaaggagccagtcccagttccagtccaggaaatagagattgactccaccacagaattggatgggcatcaggaagtagagaaagtgcagcctccaggccctgtgaaggaaatggcccatggttcacaggaggcagaagctccaggagcagttgctggtgctgctgaagtccctagggaaccaccaattcttcccaggattcaggagcagttccagaaaaatcccgacagttacaatggtgctgtccgagagaactacacctggtcacaggactatactgacctggaggtcagggtgccagtacccaagcacgtggtgaagggaaagcaggtctcagtggcccttagcagcagctccattcgtgtggccatgctggaggaaaatggggagcgcgtcctcatggaagggaagctcacccacaagatcaacactgagagttctctctggagtctcgagcccgggaagtgcgttttggtgaacctgagcaaggtgggcgagtattggtggaacgccatcctggagggagaagagcccatcgacattgacaagatcaacaaggagcgctccatggccaccgtggatgaggaggaacaggcggtgttggacaggcttacctttgactaccaccagaagctgcagggcaagccacagagccatgagctgaaagtccatgagatgctgaagaaggggtgggatgctgaaggttctcccttccgaggccagcgattcgaccctgccatgttcaacatctccccgggggctgtgcagttttaatgaccagaaggaaaggaaaccctcgccggtggggaggcagagccttatcctcggctgcccttcttggctccctgcattccagggacttgctcgtcttgtttacccctagccatcctttctttcaagggtgaaccaggccttccaccctgaccttgcatctccagactgttccagagaaggtgcggggccagctgctatgtggtggccgctgtggctgacactgagtgaaggtgtttgaaatgcaggagaggatatcccagcaaattgggatcacatgcttttgtctccacagcaaccagccactgcaggcagcatgtctttcctcccctgctctctgcttgctgttgttttgacgctattctgcttgcatgtcttctggttgggatgtggagttgttgctggactctcaggcgaagctgaagtcattgaagtgtgtgaagctctgtgcttgcatgagggcaagcaaggaatggctgtgcctgaggctgctctgggaaactccttgccccttgacctcttttgagagcattcacgtggtcttcttgctcatccccttataaatgtgctttgcctgcctcagcctcatggtcagagcagtggagactggagccctgtttgcacgttctagttgttcggagaaagcctaggttctgggctcaggtccagatgcagcggggattctgttctctgactgtggcgaccttgctttggttcttgttgaagtgaaccaagcccggccaccacgcatggcatgctgtgcttggctccccataagacgtcctctttgggtgcacggtgtcaaagtgtgggcaggagtggagagctggtgccctcaggaggagaccacagcatgtccatcagctcagcagagctcgacagccacaagtcctgagaagctttgaccttgaagggcttctgggagaggaggaatttctgcatggggcgtgaaggcacactgtcccaccacaactgaaccagaagagagtgaagactcccctcttcccatcctctgtgccaggtgccagactgtgctccttggaacttatggcccaatcttacctgttctccagggactggtcactgcctcaggacccccaagcctatgccctgagccatggctgctgactgactccagccaaggtgcaaagacgagattatgagacaggtcctcaggcctgtgttccaagtactcacaggggctctgggtgcccatcgccgggagtatggttcagctgccaccggcactgtccatttgcctgtctgtcaagctcagagcatggataagccacacagcagggcagtgcaccctggcaccatgcacggccagcaagaatcaaggcccgcagatgctaagagggcctattgtcaggggaaggtccccgctcctgcacactctctatggatacttgggttgtgggggctctcttggagagtaagtttgtggtttgtttctggtttacagtggtggctgacaccccttgtaagaaagcattcctgggaagtcttctgtgggtccaaacatgttgctccgatcatcacaggagagcaaaaggccctagataccccctttggaatgtgagagtcttgttgtctgatatttgccactgagctggtgaagcccctctaaagagatctcgaccctggggagcagaattcttgtcatctatgaggggtcctgagaaagacttgtcattttttttcctggagttcttcccattgaggtcctaggatttgcacaccactgtcccacaagagctttcctgcctaatgaaaggaggtcttgtggtgtgtgtctcctctcttctctatagttcccgagttggcccccattgcagcccccaccctgtgggtagtcttccagaagtgatgcagtggtgtgagatgccctacaccttgttatttgggagactttgagagtcattcacttccatggtgactagtgtttgttttgcctgattttatattctgtgttgcatttctccccactccctgccctgctttaataaacagcaaaccaatatctaggaagaatgactgagggatagtattgggtattggccccatggcaggaacagccacttgcatctggtcccggtgccacactgcggtgcttggtgtggttgtggagcctgtccctgcgcgccttgctcccgttgagccacgctgtctggtgggtgattctctgccctgagccaccaccctggactggcccagtctccagagctggcacaccctgcctgttttctctttttagacacaacagccgcagtttggccagccactaagtcccaccagctgaggtccgaggaaagcggggtgactcatttcccttgtccagggcccgaggagagtgaggtgtccagcctgcaaagctattccagctccttggtgttggtttgcaataaattggtatttaagcagttctgggtctgcgtgtgacatttgctgctgagacagttctgtctgtgcatggtcattattgttgcattctagccttgaggtcccaggccaacgtacacagcaaacaccagcatggggaattcttaggggttgtttcccatctggtctgaatgcactgggcaagatctcaatacagctttagaaatcctgtaagattttgaccagtggggagaaaaagaatgtagctatagatcttacatcctttcaaacaggttctggaattctgtagttactggaaagcttagggtgagtgcagagttgggaatgattccactgaagggccacctttgcccaccaggctccaaggccctccttggtctccaggtgcatacctgctgttaactttgctgagccctcgcaatgggcttcctccaggacataacgccgtgtctgacacagaagtctcccaggtggctggccacctgcttcttcctcagtcagatctttgactctccttctctgtgcccaccccatctccagcctcctctgaccctgctcacccctggggacaggacctaggggtgtgagaagtacttggctgaataaagactgtttcaaaggcaatccttagaattgcctagcatactcccagggccagaaataacccgccagaaaggagaggcgtatttgcccctgaagagtgcaggagggagaacagttgagaagtgttttgtgtggaaatgtgtccaagaggcgtcagctgctgcacagagaactcactgcccagaacactgcgcttggggaacagacctcacccccacctcaaatctgctctccactgggcctgttggcagccagctcagctggggaagggacagcatgactcgctttgtcgatgaaaagcacgaagttgtcagcacagaacctggccagtccttgagaaactccctccttggtggtcagaggtcaagcagcccatgtggcccacggtcctgaagaactgggctatgtccctgaggctcctctctaccgtctgactgtggggtctggggaacaggcatttaaaccaggctgctgccctggggagtgcccactggacgccagggtgccccatagggacagggtcacaaagccctggggcttcccctgccagtcctggtgaggacagtgtggtcactatctcagagagacgaaaaatgaatattctgtcatttcagactaaactactcacccagctcacactaaaaaaaaaaaaaaaaa

SEQ ID NO: 3997 - DNA, 4771 bp, Homo Sapiens
  NM_015336
agaaacccgcgccctccgaggggggaggggacagagggggcgtcacgggggcaggagaagaaggaggaggaggcccgcgtcgcctccggcggggctcgcgctcgccccgcgctcgccctccgcctcgcccgagccccgggagggtgaaacgctttctcccagcatgcagcgggaggagggatttaacaccaagatggcggacggcccggatgagtacgataccgaagcgggctgtgtgccccttctccacccagaggaaatcaaaccccaaagccattataaccatggatatggtgaacctcttggacggaaaactcatattgatgattacagcacatgggacatagtcaaggctacacaatatggaatatatgaacgctgtcgagaattggtggaagcaggttatgatgtacggcaaccggacaaagaaaatgttaccctcctccattgggctgccatcaataacagaatagatttagtcaaatactatatttcgaaaggtgctattgtggatcaacttggaggggacctgaattcaactccattgcactgggccacaagacaaggccatctatccatggttgtgcaactaatgaaatatggtgcagatccttcattaattgatggagaaggatgtagctgtattcatctggctgctcagttcggacatacctcaattgttgcttatctcatagcaaaaggacaggatgtagatatgatggatcagaatggaatgacgcctttaatgtgggcagcatatagaacacatagtgtggatccaactagattgcttttaacattcaatgtttcagttaaccttggtgacaagtatcacaaaaacactgctctgcattgggcagtgctagcagggaataccacagtcattagccttcttctggaagctggagctaatgttgatgcccagaatatcaagggcgaatcagcgcttgatttggcaaaacagagaaaaaatgtgtggatgatcaaccacttacaagaggcaaggcaagcaaaaggatatgacaatccgtccttccttagaaagctgaaagctgataaggaatttcggcagaaagtaatgttaggaactcctttcctagttatttggctggttgggtttatagcagacctaaatattgattcttggctcattaaagggctaatgtatggtggtgtttgggctacagtacagtttctttcaaaatcctttttcgatcattcaatgcatagtgcattgccccttgggatatatttggcaaccaaattctggatgtatgtgacgtggttcttctggttttggaatgatctcaactttttatttatccatcttccattccttgccaatagtgttgcacttttctacaattttggaaaatcttggaaatcagatccagggattattaaagcaacagaagagcaaaagaaaaagacaatagttgaacttgcagagacaggaagtctggacctcagtatattctgcagtacctgtttgatacgaaaaccggtgaggtccaaacattgtggtgtgtgcaaccgctgtatagcaaaatttgatcatcattgcccatgggtgggtaactgtgtaggtgcaggcaaccatagatattttatgggctacctattcttcttgctttttatgatctgctggatgatttatggttgtatatcttactggggactccactgtgagaccacttacaccaaggatggattttggacatacattactcagattgccacgtgttcaccttggatgttttggatgttcctgaacagtgttttccacttcatgtgggtggctgtattactcatgtgtcagatgtaccagatatcatgtttaggtattactacaaatgaaagaatgaatgccaggagatacaagcactttaaagtcacaacaacgtctattgaaagcccattcaaccatggatgtgtaagaaatattatagacttctttgaatttcgatgctgtggcctctttcgtcctgttatcgtggactggaccaggcagtatacaatagaatatgaccaaatatcaggatctgggtaccagctggtgtagcgacatcttatcctatgaagcatattgctgagtggtgcctgaaaattgtgtctgtccgtgtctttctcacactcgaatccacatcctttgaacaagagcatgctatgtgtagggctaatggtgaattttacagtctttttttcaacacttttattaacaaaagtaaacatggacagaacacactgccatttctgggaagagtaaagatgataaaaaataattttaatggttcttaatgtggaaattcacaacatactcaacttttgggttttgttctcacagtatttttcacaaaaaaagggtaaacttattctattgacagacatggtgtactgatcagaaatgttcagttttaactaaaactaaatttatgttatttggctaaatgttatgatgcagtctagtacgagtattgcatctaattccaggagcattgttttaagttgattgactagttattatgtacatttcagaatgtacacataaatactgtgatgaaaatcatgtgattgggatctactgtgatgttgtcttcaaaggcaggagaaaataatgttcacaataaaatgtgctaacaatgttttgtttctatcagctgttgcaatgctgatatatttctagttcagtgaaataatttgtagtaaccttactctgaggttttacggtctgataatgaagcacttgcatgagtatagtaagtcatgtttttttgttcaaatttaaaagccctgctaattgcatgacacaccacatagaatgtatactagcagatactatccagtgaagcataaattagaatttaatttgatgttcaaaaacagttccatttttaagggttaaggtggtattttcaagaaaaggcagaacaaataatgcaaaattctcagtaatagtgatacatggatatacttccttttaaattctcagctgcaaaataattgtagacaaaataatggcatttaactaaagatggagcatgatctaagtacatagcacatgtgaataaaagaaaagctgacagtatattctggtttcaataaaatgacctatcagaaagtagaatttcatccccaagagtatttcagtttatccaatattgagtaagttctgaaacagttttagaaaaaattttctttttgttaaatgtgatgcactgatcaatttttgtcacagcattttcataccttcatggtggactactagtcactgcttccataaatattgtttacagggtgagatttggtttattcatcttaagtgctgtagcaaactgtggttcgagcaacctgtgggaaatctgtgagagggaatggggtgggagatgtgggggaatggtggtcagactgatgacagatcctagaccaatgtaaagaatgtgtatctgtatataaataatttatcaaatagttttctctttgtgtctgtgttagtgtttttaaagctgctcatttcattttgtccaaccaaaaagaaaagggagataactaatgagcttctagtgatgttcaaaattgctgttaataggcattataccctgcaagttcactgcatgtctgatgcttggtaaaactagtcttccctgtaaaatgcagattacaggtattaaagcaatctagtggtatacccgccccttgccttagtaagaggagcagtgaaatgtatatagttgatgttcagtatttccaagtaccatttttatatagtagcttatttgaccataagtcacacatcaaaaaaagattacccttagtgtatgtgttttaatattagaaaattggcatatgtactttatttttgaaaagggaagagatgggtgtggggtggcaatagcattgtgccattttgtcatagaatgtaaaaattggttaactttacaaatgtcagctagttttgactactaattgggggaaattttagataatttttaaattcaaagttatttataaaatgctagaatttgttttaattttttgtattttgagccacttcacatgaagactcagttgcatttttatcgaatacatttttatcaacagttaaagactatggtggttttttcagagtttggctaagaatgttgttaccatcttctttgtttgtggtacaatattttcagtgcaaaagagatgtcattcagttaaaaagacaaacctctagatgtgtaattacatggaaaatactagcaatgtgaatgcttttgtagtaaccatcttgtagtacctgtgaaatctataactcagaaatggtcagatggtcaggagccagctatgcagcagtataccatctgtttaattattttgtaggtcctgtgtgtggaaccaactataaacccagttctaaagttgtgtatgatggtgaacctttgggaatagttcttatcaacttaattggatacttttagcaaataggaacttaattctcagcactgaacatgaattacttccttggagttttttttcattcatatttttgttgtttccaggaatttatttgatattaatgggcgtaaaacagcatcattgtacttaagctatggatgtttttattttatattttctttatttataactgtgccaagtattattttgctacttaccgtgttattctgtggaaagaaaaacctgtaaagtgtttaataaattagccctccttacataaattaaatgtcaaaattttgtaaaatattaatcagaataaatactgactctt

SEQ ID NO: 3998 - DNA, 7056 bp, Homo Sapiens
  NM_015338
cacacccacggcagacacgcacgcacccgggcgccgaagggaaagccgcgtctcgccctcccgccccgccgtcggtcctgtctcagtccctcagcagagcgggaaagcggaggccggagccgtgacctctgaccccgtggttatgcggagccgccgcattccttagcgatcgcggggcagccgccgctgccgccgtgggcgactgacgcagcgcgggcgcgtggagccgccgccgcccctcccccaccgccgctctcgcgccagccggtccccgcgtgcccgccccttctccccggccgcacccgagacctcgcgcgccgccgctgccacgcgccccccccaccgccgccgccgccccagccccgcgccaccgccccagcccgcccagcccggaggtcccgcgtggagctgccgccgccgccggggagaaggatgaaggacaaacagaagaagaagaaggagcgcacgtgggccgaggccgcgcgcctggtattagaaaactactcggatgctccaatgacaccaaaacagattctgcaggtcatagaggcagaaggactaaaggaaatgagaagtgggacttcccctctcgcatgcctcaatgctatgctacattccaattcaagaggaggagaggggttgttttataaactgcctggccgaatcagccttttcacgctcaagaaggatgccctgcagtggtctcgccatccagctacagtggagggagaggagccagaggacacggctgatgtggagagctgtgggtctaatgaagccagcactgtgagtggtgaaaacgatgtatctcttgatgaaacatcttcgaacgcatcctgttctacagaatctcagagtcgacctctttccaatcccagggacagctacagagcttcctcacaggcgaacaaacaaaagaaaaagactggggtgatgctgcctcgagttgtcctgactcctctgaaggtaaacggggcccacgtggaatctgcatcagggttctcgggctgccacgccgatggcgagagcggcagcccgtccagcagcagcagcggctctctggccctgggcagcgctgctattcgtggccaggccgaggtcacccaggaccctgccccgctcctgagaggcttccggaagccagccacaggtcaaatgaagcgcaacagaggggaagaaatagattttgagacacctgggtccattcttgtcaacaccaacctccgtgccctgatcaactctcggaccttccatgccttaccatcacacttccagcagcagctcctcttcctcctgcctgaagtagacagacaggtggggacggatggcctgttgcgtctcagcagcagtgcactaaataacgagttttttacccatgcggctcagagctggcgggagcgcctggctgatggtgaatttactcatgagatgcaagtcaggatacgacaggaaatggagaaggaaaagaaggtggaacaatggaaagaaaagttctttgaagactactatggacagaagctgggtttgaccaaagaagagtcattgcagcagaacgtgggccaggaggaggctgaaatcaaaagtggcttgtgtgtcccaggagaatcagtgcgtatacagcgtggtccagccacccgacagcgagatgggcattttaagaaacgctctcggccagatctccgaaccagagccagaaggaatctgtacaaaaaacaggagtcagaacaagcaggggttgctaaggatgcaaaatctgtggcctcagatgttcccctctacaaggatggggaggctaagactgacccagcagggctgagcagtccccatctgccaggcacatcctctgcagcacccgacctggagggtcccgaattcccagttgagtctgtggcttctcggatccaggctgagccagacaacttggcacgtgcctctgcatctccagacagaattcctagcctgcctcaggaaactgtggatcaggaacccaaggatcagaagaggaaatcctttgagcaggcggcctctgcatcctttcccgaaaagaagccccggcttgaagatcgtcagtcctttcgtaacacaattgaaagtgttcacaccgaaaagccacagcccactaaagaggagcccaaagtcccgcccatccggattcaactttcacgtatcaaaccaccctgggtggttaaaggtcagcccacttaccagatatgcccccggatcatccccaccacggagtcctcctgccggggttggactggcgccaggaccctcgcagacattaaagcccgtgctctgcaggtccgaggggcgagaggtcaccactgccatagagaggcggccaccactgccatcggaggggggggtggcccgggtggaggtggcggcggggccaccgatgagggaggtggcagaggcagcagcagtggtgatggtggtgaggcctgtggccaccctgagcccaggggaggcccgagcacccctggaaagtgtacgtcagatctacagcgaacacaactactgccgccttatcctctaaatggggagcatacccaggccggaactgccatgtccagagctaggagagaggacctgccttctctgagaaaggaggaaagctgcctactacagagggctacagttggactcacagatgggctaggagatgcctcccaactccccgttgctcccactggggaccagccatgccaggccttgcccctactgtcctcccaaacctcagtagctgagagattagtggagcagcctcagttgcatccggatgttagaactgaatgtgagtctggcaccacttcctgggaaagtgatgatgaggagcaaggacccaccgttcctgcagacaatggtcccattccgtctctagtgggagatgatacattagagaaaggaactggccaagctcttgacagtcatcccactatgaaggatcctgtaaatgtgacccccagttccacacctgaatcctcaccgactgattgcctgcagaacagagcatttgatgacgaattagggcttggtggctcatgccctcctatgagggaaagtgatactagacaagaaaacttgaaaaccaaggctctcgtttctaacagttctttgcattggatacccatcccatcgaatgatgaggtagtgaaacagcccaaaccagaatccagagaacacataccatctgttgagccccaggttggagaggagtgggagaaagctgctcccacccctcctgcattgcctggggatttgacagctgaggagggtctagatcctcttgacagccttacttcactctggactgtgccatctcgaggaggcagtgacagcaatggcagttactgtcaacaggtggacattgaaaagctgaaaatcaacggagactctgaagcactgagtcctcacggtgagtccacggatacagcctctgactttgaaggtcacctcacggaggacagcagtgaggctgacactagagaagctgcagtgacaaagggatcttcggtggacaaggatgagaaacccaattggaaccaatctgccccactgtccaaggtgaatggtgacatgcgtctggttacaaggacagatgggatggttgctcctcagagctgggtgtctcgagtatgtgcggtccgccaaaagatcccagattccctactgctggccagtactgagtaccagccaagagccgtgtgcctgtccatgcctgggtcctcagtggaggccactaacccacttgtgatgcagttgctgcagggtagcttgcccctagagaaggttcttccaccagcccacgatgacagcatgtcagaatccccacaagtaccacttacaaaagaccagagccatggctcgctacgcatgggatctttacatggtcttggaaaaaacagtggcatggttgatggaagcagccccagttctttaagggctttgaaggagcctcttctgccagatagctgtgaaacaggcactggtcttgccaggattgaggccacccaggctcctggagcaccccaaaagaattgcaaggcagtcccaagttttgactccctccatccagtgacaaatcccattacatcctctaggaaactggaagaaatggattccaaagagcagttctcttcctttagttgtgaagatcagaaggaagtccgtgctatgtcacaggacagtaattcaaatgctgctccaggaaagagcccaggagatcttactacctcgagaacacctcgtttctcatctccaaatgtgatctcctttggtccagagcagacaggtcgggccctgggtgatcagagcaatgttacaggccaagggaagaagctttttggctctgggaatgtggctgcaacccttcagcgccccaggcctgcggacccgatgcctcttcctgctgagatccctccagtttttcccagtgggaagttgggaccaagcacaaactccatgtctggtggggtacagactccaagggaagactgggctccaaagccacatgcctttgttggcagcgtcaagaatgagaagacttttgtggggggtcctcttaaggcaaatgccgagaacaggaaagctactgggcatagtcccctggaactggtgggtcacttggaagggatgccctttgtcatggacttgcccttctggaaattaccccgagagccagggaaggggctcagtgagcctctggagccttcttctctcccctcccaactcagcatcaagcaggcattttatgggaagctttctaaactccaactgagttccaccagctttaattattcctctagctctcccacctttcccaaaggccttgctggaagtgtggtgcagctgagccacaaagcaaactttggtgcgagccacagtgcatcactttccttgcaaatgttcactgacagcagcacggtggaaagcatctcgctccagtgtgcgtgcagcctgaaagccatgatcatgtgccaaggctgcggtgcgttctgtcacgatgactgtattggaccctcaaagctctgtgtattgtgccttgtggtgagataataaattatggccatgggaaacattgtatatttagtgtgtgtattttgataatgattgatcttaaatctgtatacagaatatcattgatataatactctttaggcaggagcactcttgccttcccccaaaatttacactgctaaagccctctgtcacttggcgacccttctggtcttgctggaggggtttcctgggtataacccattgggctgcccaaggccagccagcctgagctctcctgcaagacagagcctgatgtggcacggagtggggttgcggggggtggggggactgcctgactcccagagggacttgaaactgaagcaagaaggttgcattctccaccaagggagttaacctacctgaactaagtagaaatgccagtcttccactaccccctccctgccatcttttcttctgctactttggggagttgatggccaggaaagaagccagcacagggttaaagtaactcctggcattgcccaccagggggctggtgcacctgctgacctcagggtcacagttgagtcatttgccagttgacggagcaagtttgaccttggttctgttgctgaagcaaatttggaacttttctgtctcagtgtgatccactaacccacaggatcatttggaaccttgaatagctctgcttggacaatggggttggggaatagggttgtctttcctatgaaaatgccatctgtagaccttgtgagtcagccgtccagatgtttgcaggtgaattcctctgcttgacatcctccctgtcactttggaccctatgggagtgggcatctccacgcacctgtgtatgtgaaagtcattttacatttcaaagcagtgtgtgtttcttatttttatatttttaactctttattcttggatgtataaagtgaactttttggcttctgtaagtatgctctatgcacctctaatgttttatcatgtatttatatgttgtacacagtactggctgattctgtaaatggatgtattgtacagagaacatgaacgtctcttcctaattttacatcttcagcatcattgcattaaagtggtgtaatctccttctctacatctgttgtcagagccactgagtgctgtgctgctcgacgtgagggtgaaatgattgacttgtgacctgccaggttgcccgatgccctgttgggtcaccggctggacctgctgcagcctgcagagccacagtcagcctgcccacatgccaccgagcaaacgcatcttgcttttcacatctctcctcctacagccttaatggctgcttgctgccatatgtgacaaatcaccaccaccagtgttaagtgcttctggattcatgggtgagttccctgggcagcccccaggaaggccttccagatctggctccagggtcaccacctgtcacagcaatacctgggaccatgctctcctgggactgtgaggctccttttgacgtacttttgacatcaggcaggtttgggaagaaacaaagccatgcctgctcctgcctctctcccaacatgtttccagcaagtagatgcccctgtgtgtgttttcccttgccttgtttcctgccttatatcttgtatttcgacttattacagagttgagggttcttgcttaatttagatcaagtataaaatttgtatgacttcaagtctcattttatctgaaaggtttttttctcatttaatctgatgtggcattttcgtcatctgaagcatgagtgacaagttgggaatgatgtggtgatttagaatgcagtattggccaagtccaagttgtcaacttaagcgtctgtttaccaaagaccgggaacaggggcccaaacatgtccagtcctcttcttccctctgctggaacctttggggacactcaagggtacagtttgacactgatctggtccatgaggctgcccagagaaagcactgcttctgtatgtctcttgtggtattggaacaataaacccgtacaacctgcaaaaaaaaaaaaaaaaaa

SEQ ID NO: 3999 - DNA, 4713 bp, Homo Sapiens
  NM_015339
cggccgcggcgcgagccggagtccgccgagccggagcgcgacgaggccccgggcgcgccctccccgctgccgccaccgccgtgccgccgccatccgcccgccgccgccgccgctgtccggcccccgagcacgccggccccgcgcgcgcctcgaggccgagtcaaggtgtgagatgcacaatgcgaaacctaggccccagcttttacaccatgatgcgcagggttgtactttttgtactgaactgataggtggcctagtggttatgccctgtactaccattttgaggatctggactccgtttcctgccttgctctttggaccacattgtcaattcacaccgaaactatgttccaacttcctgtcaacaatcttggcagtttaagaaaagcccggaaaactgtgaaaaaaatacttagtgacattgggttggaatactgtaaagaacatatagaagattttaaacaatttgaacctaatgacttttatttgaaaaacactacatgggaggatgtaggactgtgggacccatcacttacgaaaaaccaggactatcggacaaaacctttctgctgcagcgcttgtccattttcctcaaaattcttctctgcctacaaaagtcatttccgcaatgtccatagtgaagactttgaaaataggattctccttaattgcccctactgtaccttcaatgcagacaaaaagactttggaaacacacattaaaatatttcatgctccgaacgccagcgcaccaagtagcagcctcagcactttcaaagataaaaacaaaaatgatggccttaaacctaagcaggctgacagtgtagagcaagctgtttattactgtaagaagtgcacttaccgagatcctctttatgaaatagttaggaagcacatttacagggaacattttcagcatgtggcagcaccttacatagcaaaggcaggagaaaaatcactcaatggggcagtccccttaggctcgaatgcccgagaagagagtagtattcactgcaagcgatgccttttcatgccaaagtcctatgaagctttggtacagcatgtcatcgaagaccatgaacgtataggctatcaggtcactgccatgattgggcacacaaatgtagtggttccccgatccaaacccttgatgctaattgctcccaaacctcaagacaagaagagcatgggactcccaccaaggatcggttcccttgcttctggaaatgtccggtctttaccatcacagcagatggtgaatcgactctcaataccaaagcctaacttaaattctacaggagtcaacatgatgtccagtgttcatctgcagcagaacaactatggagtcaaatctgtaggccagggttacagtgttggtcagtcaatgagactgggtctaggtggcaacgcaccagtttccattcctcaacaatctcagtctgtaaagcagttacttccaagtggaaacggaaggtcttatgggcttgggtcagagcagaggtcccaggcaccagcaagatactccctgcagtctgctaatgcctcttctctctcatcgggccagttaaagtctccttccctctctcagtcacaggcatccagagtgttaggtcagtccagttccaaacctgctgcagctgccacaggccctcccccaggtaacacttcctcaactcaaaagtggaaaatatgtacaatctgtaatgagctttttcctgaaaatgtctatagtgtgcacttcgaaaaagaacataaagctgagaaagtcccagcagtagccaactacattatgaaaatacacaattttactagcaaatgcctctactgtaatcgctatttacccacagatactctgctcaaccatatgttaattcatggtctgtcttgtccatattgccgttcaactttcaatgatgtggaaaagatggccgcacacatgcggatggttcacattgatgaagagatgggacctaaaacagattctactttgagttttgatttgacattgcagcagggtagtcacactaacatccatctcctggtaactacatacaatctgagggatgccccagctgaatctgttgcttaccatgcccaaaataatcctccagttcctccaaagccacagccaaaggttcaggaaaaggcagatatccctgtaaaaagttcacctcaagctgcagtgccctataaaaaagatgttgggaaaaccctttgtcctctttgcttttcaatcctaaaaggacccatatctgatgcacttgcacatcacttacgagagaggcaccaagttattcagacggttcatccagttgagaaaaagctcacctacaaatgtatccattgccttggtgtgtataccagcaacatgaccgcctcaactatcactctgcatctagttcactgcaggggcgttggaaagacccaaaatggccaggataagacaaatgcaccctctcggcttaatcagtctccaagtctggcacctgtgaagcgcacttacgagcaaatggaatttcccttactgaaaaaacgaaagttagatgatgatagtgattcacccagcttctttgaagagaagcctgaagagcctgttgttttagctttagaccccaagggtcatgaagatgattcctatgaagccaggaaaagctttctaacaaagtatttcaacaaacagccctatcccaccaggagagaaattgagaagctagcagccagtttatggttatggaagagtgacatcgcttcccattttagtaacaaaaggaagaagtgtgtccgtgattgtgaaaagtacaagcctggcgtgttgctggggtttaacatgaaagaattaaataaagtcaagcatgagatggattttgatgctgagtggctatttgaaaatcatgatgagaaggattccagagtcaatgctagtaagactgctgacaaaaagctcaaccttgggaaggaagatgacagttcctcagacagttttgaaaatttggaagaagaatccaatgaaagtggtagcccttttgaccctgtttttgaagttgaacctaaaatctctaacgataacccagaggaacatgtactgaaggtaattcctgaggatgcttcagaatctgaggagaagctagaccaaaaagaggatggttcaaaatacgaaactattcatttgactgaggaaccaaccaaactaatgcacaatgcatctgatagtgaggttgaccaagacgatgttgttgagtggaaagacggtgcttctccatctgagagtgggcctggatcccaacaagtgtcagactttgaggacaatacctgcgaaatgaaaccaggaacctggtctgacgagtcttcccaaagcgaagatgcaaggagcagtaagccagctgccaaaaaaaaggctaccatgcaaggtgacagagagcagttgaaatggaagaatagttcctatggaaaagttgaagggttttggtctaaggaccagtcacagtggaagaatgcatctgagaatgatgagcgcttatctaacccccagattgagtggcagaatagcacaattgacagtgaggatggggaacagtttgacaacatgactgatggagtagctgagcccatgcatggcagcttagccggagttaaactgagcagccaacaggcctaagtgccaggttccctggcgttggtgacatgctgcagcctggaactctgatctccagtgtgactgcaaagctgtcttctcactggtactgccttgtgagtactggttggactgtggggcatgtggccgctgcagttccagtggttatttctaagtctatgacaggacaggctgttcttgcttcagaaccttctctgacagacacggtaactaaatgtgaaaaaccaataagctggtgactcatgaatacacacgaggaaaagcagaggtttattttatctgccttttcaacatttctttccctctgtgaaatgattggtcagatgtctttgagaagtgttaaactaattcacatggtagtgtagggccaacatacaagctaccagtctaatgtgtatagtagactttgggaaaagcgattttttttcatgtattcattctgaatagttgaaatgtatatttgtacagtcttttagacctattcaagtgatgctcatgatcctgttactgtgtgcccatcatagatttctttttttagtgttgcccttgctgtgtaataaacgctctatctagtttacctagcaaaagctcaaaactgcgctagtatggactttttggacagacttagtttttgcacataaccttgtacaatcttgcaacagaggccagccacgtaagatatatatctggactctcttgtattataggatttttcttgttctgaatatccttgacattacagctgtcaaaaacaaaaactggtatttcagatctgttttctgaaatcttttaagctaaaatcacatgcaagaattgactttgcagctactaattttgacaccttttagatctgtataaaagtgtgttgtgttgaagcagcaaaccaatgagtgctgcattttggatatttagttttatctttagttcaacaccatcatggtggattcatttataccatctaatatatgacacactgttgtagtatgtataattttgtgatctttattttccctttgtattcattttaagcatctaaataaattgctgtattgtgcttaatgt

SEQ ID NO: 4000 - DNA, 4203 bp, Homo Sapiens
  NM_015340
tgacaacatggcggcgcccatggtccgtggcccggcagtgctcgcctaaaggtggagaacgaggagtagaggagccgcaggccagagcctgtgagcagatccagacctacagataaaaaacattatttaatctatctgggatttactccggcttatgatttgagggccttctcaccttctgaagaatggcttctgtttggcagagattgggtttttatgcctctcttctgaaaagacagctaaatggtgggccagatgtcatcaagtgggaaaggagagtaattcccggatgtaccagaagcatctacagtgccacgggaaagtggacaaaagagtatacattgcagacaagaaaggatgttgagaaatggtggcatcaacgaataaaagaacaggcctccaaaatttcagaagctgataaatcgaagccaaaattttacgtgctttccatgttcccttatccttctggtaagctgcacatgggccatgtgcgtgtctacaccatcagcgacaccatagcacggttccagaagatgagagggatgcaggtcatcaaccccatgggatgggatgcttttggattgcctgctgaaaatgccgcagtcgagaggaatctacatccacaaagttggacacaaagtaatattaaacacatgaggaaacagcttgatcgtctgggcctgtgtttcagctgggatagggaaataactacgtgtttgccagattactacaagtggactcagtatctctttattaaactgtatgaggctgggctggcctatcaaaaggaggccctggttaactgggacccagtggatcaaacagtgcttgccaatgagcaggtggatgaacatggctgttcatggcgttctggagcaaaggtggaacagaagtacctcagacaatggtttattaagacaaccgcttatgcaaaggccatgcaggacgcgttggcagaccttccagaatggtatggaataaaaggcatgcaagcccactggattggggactgtgtgggctgccacctggacttcacattaaaggttcatgggcaagccacgggcgaaaagctgactgcctatacggccacccctgaagccatttatggcacctcccacgtggccatctcgcccagccacagactcctacatgggcacagctctctgaaggaagccttgaggatggcccttgtccctggcaaagattgcctcacgcctgtaatggctgtgaacatgcttacccagcaggaggtccctgtcgttattttggccaaagctgacttggaaggctctctggattcaaaaataggaattcccagtactagctcagaggacaccatcttagcccaaaccctgggcctggcctactctgaagtcattgaaactttgccagatggcacagagagactgagcagctctgctgagttcacaggtatgacccggcaggatgcttttctagccctgactcagaaagcccgggggaagagagtgggtggagacgtgacaagtgataaactgaaagactggctgatttcacggcagcggtactggggcacaccaatccccattgtccactgcccagtctgtggccccacacctgtgcccctggaggacttgcctgtgaccctgcccaacatcgcgtctttcactggcaagggaggccccccactggccatggcttcagagtgggtgaactgctcctgcccaaggtgcaagggagcagccaagagagagacagacacgatggatacctttgttgattctgcttggtactacttcagatacactgaccctcataatccacacagcccttttaacacagcagtggccgattactggatgcctgtggatttgtacattggagggaaagaacatgccgtcatgcacttgttctatgcaagattctttagtcatttttgccatgatcaaaaaatggttaaacatagggagccttttcataagctgctggcccaaggccttatcaaggggcagacattccgcctaccatctggacagtatctacagagagaggaagtggatctcacaggttccgttcctgttcatgcaaaaacgaaagagaagttagaggtgacgtgggagaagatgagtaagtccaaacacaacggggtggacccagaggaagttgtggagcagtatgggatcgacacgattcggctctacatcctttttgctgcccctcctgagaaggatatcttgtgggatgtgaaaactgatgctctccctggggtgctgagatggcaacaacgactgtggaccttgacaactcggtttattgaggccagggcttctgggaagtctccccagcctcagctgctgagtaacaaggagaaagctgaggccaggaagctctgggagtacaagaactccgtcatctctcaggtgaccacccatttcacagaggacttctcactgaattctgcaatttctcagctgatgggactcagcaatgccctctcgcaagcctctcagagcgtcattctccacagccccgagtttgaggatgctttgtgtgccctgatggtaatggctgctccactggcccctcatgtaacctcagagatctgggcaggcctggcgctggtgccgaggaagctctgtgcccactacacttgggatgccagtgtgctgctccaggcatggcctgctgtggacccggagttcctgcagcagcctgaggttgtccagatggcagttctgatcaacaataaagcttgtggcaaaattcctgtgccccaacaagttgcccgggaccaggacaaagtccacgaatttgttcttcaaagcgagctgggtgtcaggcttttgcaaggacgaagcatcaagaagtccttcctttccccgagaactgccctcatcaacttcctggtgcaagattgacagccaggaggctgcagctaccacgagggcctctgaggaacctccttccaggcctgggatgagggggcgatgtctgctggcccaggggaagggaaaagacaaatgtcttgactgttgacctcggtcctgtggcagactgcagtcaacagtgtgcctctgtagtgtggcctggtgctggggtgaaggtgagctgggcaaaggagaaatatgagctactgaggagggggttggacatcctgcccctcaccccccacccacactgcaggtagaggaggccatctgatcccatgggaagccatcagagacactgctggtgggagcaggaaggagcagtgcccctcgagcagccaggaagcctgcggatctgggaaatggctctgccttaggcacttctcgggaatttgaggccagcctgaggaactgcaggactcaggtgcaatgtgccagccacttggaactgctaactgagcctccagatggtagtgaatggtctctttgccttcaggctggatgaggaagtcatttaggaaatgttcaaataaccaatatgtggaaatggacacagggatcttctgaagttgctttgaatcaaaaggcaggcagtgctggttcctctgcctgtgtccccaccactccccagctctgtcatgcaggcctgtcctccccaaccccagctggatgtgcctcccaggcctgctgtggttctgacacacaggatcccaggcaaggcaccacttcctcacatgaatgaggagcagcaagtcataaccactcccttgggtatacaatttgctgtgtagtgaagtggaaccaggctcaggctgctggtcccaacctcagagccccaccgcagcccagtagggatgcagcacgccccagagggctcatgtgggccccagatggcaatgccaccattgttgatgtgactccagagccagttattaggaagagcaagctcaccacagaggagtggaactgaggccccccagatgttgcctccggtgtccaagccacagcggtctggctgttgggaagatggccaggaatggactcataccattggcacattaggctaatcctggttttatgtgaagtcagcaattaagtgttcccactagaactgacctaagccactgattaatatttaatgagggaaggtaggggagaatctagccattttataatgccagaaatctatatatgttatctgatgccatttttctgaagtagcctcacatgtggtccccctgcagttcagcagttaacagatgacttttttagtgtaataaaatgtttatcatctatg

SEQ ID NO: 4001 - DNA, 2114 bp, Homo Sapiens
  NM_015342
gaacaacatggcggcggaaagtggtagcgattttcagcagagacgtagaaggcgccgggacccggaggaaccggaaaaaacagaactcagcgaaagagagctggcagtagcagtggcggtgtcccaggagaacgatgaggagaacgaagagcgctgggttggacctttacctgtggaggcaacactggccaagaagaggaaagtcttagagtttgaaagagtctatcttgataatctccccagtgcatccatgtatgagcgcagttacatgcatagagatgttatcacccatgtggtatgcaccaaaacagattttattattactgccagtcatgatggacatgtcaagttctggaaaaaaatagaagagggaattgaatttgttaaacattttcgtagtcacctgggagttattgagagtattgcagttagctctgagggagcattgttctgttctgtgggtgatgataaagcaatgaaggtgtttgatgtagtgaactttgacatgatcaacatgctgaaacttggctattttcctggacagtgtgagtggatctattgcccaggggatgcaatttcttcagttgctgcttccgaaaagagtacaggaaaaattttcatttatgatggccgaggagataaccagccacttcatatttttgacaaactccatacatcacctcttactcagatacggctaaacccagtttacaaagcagtagtgtcttctgacaaatctgggatgattgaatactggactgggcctcctcatgaatataaattccccaaaaatgtgaactgggaatataaaactgacactgatttatatgaatttgccaagtgtaaggcttatccaaccagcgtatgtttttcaccagatgggaagaaaatagctactattggttctgatagaaaagttagaattttcagatttgtaactggaaaactcatgagagtctttgatgaatcactaagcatgtttactgaactgcaacagatgaggcaacagttaccagacatggaatttggccgacgaatggctgtagaacgtgagttggagaaggttgatgctgtaagattaattaatatagtttttgatgaaactggacacttcgtgctgtatggaacaatgctgggcattaaagttataaatgtagagacaaaccggtgtgtgcggattttaggcaaacaagaaaatattagagtgatgcaattggctttgttccaggggatagccaaaaagcatcgtgctgcaactactatagaaatgaaagcttctgaaaatcctgttcttcagaatattcaagctgacccaacaatagtctgtacatcattcaaaaagaatagattttatatgtttaccaaacgagaaccagaagatacgaaaagtgcagattctgatcgagatgtttttaatgagaaaccttctaaagaagaagtcatggcagctactcaagctgaaggacctaaacgagtttcggacagtgccattatccacaccagcatgggagacattcacaccaaactttttcctgttgagtgccctaagacagtggaaaacttctgtgttcacagcagaaatggttattataatgggcatacatttcaccgtataattaagggctttatgattcagactggagatccaacaggtactggtatgggaggagaaagcatatggggaggagaatttgaagatgaatttcattcaacattacgacatgacaggccatacacactcagcatggctaacgcgggatcaaatactaatggatcccagtttttcataacggtagtaccaacgccttggcttgataataagcatacagtatttggacgagtgactaaaggaatggaagttgtacagaggatctccaacgtcaaagtcaatcccaaaacagataagccctatgaggatgtcagcatcataaatattactgtcaagtaaaataagatttgttttaatgtacttgcaaataaaaatacaatattaaacagattattttacattaggaagcttaggacttgctgaatatacagatcatgtttcaaagatacagtatttttgtattttttattaaaggctattttttaaaaaaaaaaaaaaaaaaaaa

SEQ ID NO: 4002 - DNA, 2721 bp, Homo Sapiens
  NM_015344
gcgcacttccgggtgttgtctggccgccgtagcgcgtcttgggtctcccggctgccgctgctgccgccgccgcctcgggtcgtggagccaggagcgacgtcaccgccatggcaggcatcaaagctttgattagtttgtcctttggaggagcaatcggactgatgtttttgatgcttggatgtgcccttccaatatacaacaaatactggcccctctttgttctatttttttacatcctttcacctattccatactgcatagcaagaagattagtggatgatacagatgctatgagtaacgcttgtaaggaacttgccatctttcttacaacgggcattgtcgtgtcagcttttggactccctattgtatttgccagagcacatctgattgagtggggagcttgtgcacttgttctcacaggaaacacagtcatctttgcaactatactaggctttttcttggtctttggaagcaatgacgacttcagctggcagcagtggtgaaaagaaattactgaactattgtcaaatggacttcctgtcatttgttggccattcacgcacacaggagatggggcagttaatgctgaatggtatagcaagcctcttgggggtattttaggtgctcccttctcacttttattgtaagcatactattttcacagagacttgctgaaggattaaaaggattttctcttttggaaaagcttgactgatttcacacttatctatagtatgctttttgtggtgtcctgctgaatttaaatatttatgtgtttttcctgttaggttgattttttttggaatcaatatgcaatgttaaacacttttttaatgtaatcatttgcattggttaggaattcagaattccgccggctctattactggtcaagtacatcttttctcttaaaattatttagcctccattattacaaaaaattataaaaataagttttcagtcagtcaggatgacatcactcccaatgttatgcagacatacagacggttggcatacgttatagactgtatactcagtgcaaatatagctgcatttatacctcagaggggccaagtgttaatgcccatgccctccgttaagggttgttggttttactggtagacagatgttttgtggattgaaaattattttatggaattgctacagaggagtgcttttcttctcaattgttagaagaatttatgttaaactttaaggtaagggtgtaaaaacatttttgagataaggtttttatttatgtttattattgttagagtgagttgcaatgtgggaagaaatgacattgaaattccagtttttgaatcctgtttctatttataagtgaaatttgtgatctcctatcaacctttcatgttttaccctgttaaaatggacatacatggaaccactactgatgagggacagttgtatgtttgcatcatatatgccagaaaaccttcctctgcttcctccttttgacttatttggtatgttgtatatattacataaaataacttttcaaatatagtttaataacacttagaagtgtttacttacctggaaaataattgctatgccgtacattcagagtgccccctcccctgcaaggccttgccatgattaacaagtaacttgttagtcttacagataattcatgcattaacagtttaagatttagaccatggtaatagtagttcttattctctaaggttatatcatatgtaatttaaaagtatttttaagacaagtttcctgtatacctctgaactgttttgattttgagttcatcatgatagatctgctgtttccttataaaaggcatttgttgtgtgagttaatgcaaagtagccaagtccagctatatagcagcttcagaaacatacctgaccaaaaaattcccagtaaccaggcatgatcaatttatagtggtcgtttacatctaataattatcaggacttttttcaggagtgggttataaaaacattcaagttggtctgacagtattttgttaaggatatttgtttgtatgtttattcagtatacttacataaaaattatttcgccatcagccaaaactcagtaatcatgacagctgtctgttgttttatgaagtttatttctcaagaaaatgggaataaatttgggatttgttcagcttttttactaaagatgcctaaagccacaggttttattgcctaacttaagccatgacttttagatatgagatgacgggaagcaggacgaaatatcggcgtgtggctggagccttcccactggaggctgaaagtggcttgtggtattataatgttcagatttcaagaggaaggtgcaggtacacatgagttagagagctggtgagacagttgggaactctttgtgcttgtgatctactggacttttttttgcaggaagtgcattctctggtccttccctattttctgttctggatgtcagtgcagtgcactgctactgttttatccacttggccacagactttttctaacagctgcgtattatttctatatactaattgcattggcagcattgtgtctttgaccttgtatactagcttgacatagtgctgtctctgatttctaggctagttacttgagatatgaattttccatagaatatgcactgatacaacattaccattcttctatggaaagaaaacttttgatgatgaaacaataaagattttaaatatctattttaaaaaaaaaa

SEQ ID NO: 4003 - DNA, 6252 bp, Homo Sapiens
  NM_015345
gggcgggggaaggagcatctcaggaaaggggtccccggactctggggctctcagcacctgcggtcgcaaaccaacctcatgccctgactttaccaggcgtcgggactctgacttaaccggggaatgagggacttggtctggcggcagatcacaatgaggacctagggcatctgtctgctgacgccccctggcctgcagtgaccatggccccccgcaagaggagccaccatggcctgggcttcctgtgctgcttcgggggcagtgacatccccgaaatcaacctccgggacaaccaccctctgcagttcatggagttctccagccccatcccgaacgcagaggagctcaacatccgctttgcagagctggtggatgaattggatctcactgacaaaaaccgagaggctatgtttgcactgccccctgagaagaaatggcagatctactgcagcaagaagaaggagcaggaggaccccaacaagctggcaaccagctggcctgactattacatcgaccgcatcaattccatggctgcgatgcagagtctgtacgcgtttgatgaggaggagacggagatgaggaaccaagtcgtggaagacctgaagacagccctccggacacagcctatgaggtttgtgacccgcttcattgagctggagggcttgacctgtctgctaaatttcctccggagcatggaccacgccacctgtgagagccgcatccacacctcactcattggctgcatcaaagcattgatgaacaactcccaggggcgggcacatgtgctggcacagcctgaggccattagtaccatagcccagagcctacgcacagagaacagcaagaccaaggtggctgtgctggagatcctgggtgctgtgtgcctcgtgcctggtggccacaagaaggtgctgcaggccatgctgcactaccaggtgtatgcagcagagcgaacccgcttccagaccctgctgaacgagctagaccgaagtctgggccggtaccgggatgaagtgaatctgaaaacagccatcatgtccttcatcaatgctgtcctcaatgctggagctggagaggataatctggagttccgcctacatctacggtatgaattcctgatgctgggtatacagcctgtgattgacaagctccggcaacatgaaaatgccatcctggacaaacatttagacttcttcgagatggtgcggaatgaggatgacctggagctagccaggaggtttgacatggtccacatcgacaccaagagtgcttcccagatgtttgagttgatccacaagaagctgaagtacacggaggcctacccctgcctgctctctgtgctgcaccactgcctgcagatgccctacaaacggaacggtggctacttccagcagtggcagctcctggaccgcatcctccagcagattgtcctccaggatgagcggggtgtggaccctgacctggctcccttggagaacttcaatgtcaagaacatcgtcaacatgctcatcaacgagaatgaagtgaaacagtggcgagaccaggcagagaagttccggaaagaacacatggagcttgtgagccgtctggagaggaaggagcgggaatgcgagacaaagacattggagaaggaagagatgatgcggacgctgaacaaaatgaaggacaagctggcccgggagtcccaggagctgcgccaggctcggggacaagtggcagagctggtagcccagctcagtgaactctcaacaggccctgtatcttccccaccaccccctgggggcccactcaccttgtcttcctcaatgacaaccaatgacctgcctccaccccctcctcctctgccctttgcctgttgtccccctcccccaccaccaccccttcctcccgggggacccccgactcccccaggtgccccaccttgcctcggcatgggcctgcccctccctcaggacccctaccccagcagtgacgtcccactcaggaaaaagcgtgtcccccagccttctcacccactgaagtccttcaactgggtgaagctgaatgaggagcgtgtccctggcaccgtatggaatgagattgatgacatgcaggtatttcggatcctggacctagaggattttgaaaagatgttttcagcctaccagaggcaccagaaagagctgggctccactgaagacatctacctggcttcccgcaaggtcaaagagctgtcggtcattgatggccggagggcccaaaactgcatcatccttctttccaagttgaagctttctaacgaggagatccggcaggccatcttgaagatggatgagcaggaggaccttgctaaggacatgctggagcagctcctcaagttcatcccagagaagagtgacattgacctcctggaggagcacaagcatgaaattgagcggatggcccgtgctgaccgcttcctctatgaaatgagcaggattgaccactaccagcagcgactgcaagccctcttcttcaagaagaaattccaggagcggctggctgaggcaaagcccaaagtggaagccatcctgttggcctcccgggagctggtccgcagcaagcgtcttagacagatgctagaggtcatcctagccataggcaacttcatgaacaaagggcagcgtgggggcgcctacgggttccgggtggccagcctcaacaagatcgctgacaccaagtccagcatcgacagaaacatctctctgctccattacctgatcatgatcctggagaagcattttcctgatattctaaacatgccttcagagctgcaacatcttccagaagctgccaaagtcaacctagcagaactggagaaggaggtgggcaacctcaggaggggcctgagagcggtggaggtgctggagtatcagaggcgccaggtacgggagcccagtgacaagtttgtccctgtcatgagcgacttcatcacggtgtccagcttcagcttctccgagctggaggaccagctaaatgaggccagggacaagttcgccaaggccttgatgcacttcggggagcatgacagcaagatgcagccagacgaattctttggcatctttgataccttcttgcaggccttctcagaggcccggcaggatctagaggccatgaggaggaggaaggaggaggaggagcggcgggcgcgcatggaagccatgctgaaggagcagagggaacgtgagcggtggcagcggcagcggaaggtcctggctgcaggcagctcgctggaggagggaggagagttcgatgacctggtgtcggccctgcgctctggggaggtcttcgacaaggacttatgcaagctcaagcgcagccgcaagcgatcagggagccaggccctggaagttacccgggagcgggcaataaaccggctaaattattgacctggggaactagccacacaggaggccgggagacagggactggtgagaatggggctgagtggaggaggtggtgatatttaaaccatttggtgcttggtttagagccttgggctgggtcctgggatggggggctgtgtgtggctggaccaggtgtctccccacgcttaccttaaggggctcctcttatctccccttcacatgattccttctgtgccctggccccaggtattattctgaggctgccttggatggcctcaggccaggtaaccccaggctgaaggggccctgctccccatcccctaccatgggcacccatgtgctggcacagaacagttccagatctagactggagaggtccacagccttgtccagagttcctgtgtagcacggggagcaatgatggagggagcccctgagagggaatctggtgagggaatccagactcccttctctcaaggggaggctcaacagaacattgacctgggggcaaactttcctcttgaatgggaacagaggaggcattatatattctagttagatcagctctggtaggttccagagaacagtcaatgttggaaggatgatgcagggaccaaagccatcaggacagagtagcagtgtctgtttcccatgtcacaagtcctctggcctctccctgcatgtcttaagtatctttcccttccttctctaccctcacctccatcctgtctactaatccacagtcctagaagactcaccttgggtttccacagctatggctcactaccaggtgcttgatgaatctggcgaggggctcaagacagacctcatgcatcaccacacctcatgccttttgggcatctcccatgtccccatctcctggacacctggccattgttgtgaagccagacagtgacctcaaatgttgccttggagtcccctacagcccctcagcagagggcagcacttgaatgcttagctccatcccatagttctctacttcatataaattgctcaggccctcccaccccttctctaacactagcttcaaggcagaagccacagcagcctctgtccagcctgcaggtggccacttggaaccatgtgtccactggcgttggggagttggttcctgagaggtctgagggccagagctgccctctacattaacatgctgtctctaagggtggcccctcctctcaggcgttcagatggtgcgaacagcagagcaggcaagggaaactggggagatggggatggaggaggaaggctgatatcctctggggagcacatcacctgaaggtgccaaggaggaaggctgagaggggggccaccccatttctggtacccaatttggttcttcagcccaacttgcaaggggttccttctggtcctcccatccactgccaccttccattttgtccatctcatgctggccttggtggatgggatggctgtatctagacaaaatttttctaaaactccatcaaggctcttattcaataccacgttccgagttggcctttcatcttctttgagactggccctgcctaacctctaccatcaatgagctcttggcccttctgcccttccctgtgtttctcactttccaacctaatccctggctcagggttattgccagtggagactggtgagctgggcctactctcagctgcctatcttctgcctttcacttgcatccaactcctggggctgggaccgtagtagctgcgggggggaagaaacacagggtcggtgagcccagcatgtgcgttggtttgagggggcgggcggtgtgtgtgtgttctggtgggagggatctgagcaagtgcaagcctggctgacacaggtgtgaagaggccatcctggaacccaggtgagggcaagatgaaggcttccaggcagaacagctgcagagagtttggctatatgcatctgcagccccaagagctcccactgcaagacaagtgttggggaagatgggaggttgtgggtgaggcctctaaaggtcctctcccaaactgaccaggctgatgtcaacctaaccccctcaggggcagggaacaggggagggctccacaagcgtgtctggcattcccacccaccatggaagactggatacgcacctggaaacaaaaggactatggaagctgttcaagatacatttgatcttcagaaaagcagaatttggttcaactgttgacagaggacacaaatacgttgttccagagctcagccttctcactctaaaagaaagatatttttctatttattttctacatctggccagtggctctggtgctagatgccactgtagccagatctccaacagtgccttggaccatggactcatactcaactgagtaagaaggggctggtgcccagtcggggtggctgagctggtccttaataggttgtttcttggtcttgctttcttcatgccctccccactgctcctgccacctttagataagtttctctagctaattttgtggccaatgtaaaattcgtcatcaacctaacaaacacaaccttctcagcagcatttctcccctgtgatggaaataaagtgtttagggcagtgggaggagaaaattctccaggtgaatggggaagggtctgttccagcctctccctactcccatcccatttccaccaactggggaactgtgactatctatctcccccgacttctaccagggatgccttcacgccaaggctgttctcaccagctgcctcagatgacaaatgaggctaatggacataatctacagtgtcctttttcacttgcaccttttttataagaatatattgtaatactaaaaaatattaaattcataccatccctacccagtctgcctaaaaa

SEQ ID NO: 4004 - DNA, 9675 bp, Homo Sapiens
  NM_015346
actcggctcaaacatggctgcgctgagagctctattgctttgggcgccgggagcaggaggtactccgcgaatgagaacattgagaatgtgttcggcataactcatttctttgtatctccctgcactctgtgctgggaaaatgaatcatccatttggaaaagaggaagctgcttcgcagaagcagctttttggatttttctgcgaatgcctgcggaggggagaatgggagctggcacaggcatgtgtacctcagctacaggagggacaaggggatatcccaaagagggtagaagacatacttcaggcattggtggtgtgtccaaatctgctgagatgtgggcaggacatcaaccctcaaagagtagcctgggtctggcttcttgtactggagaaatggttggcccgggaaaagaagttactcccagttgttttccggagaaagcttgagtttcttttattgtcagaagacctccaaggtgacattccagagaacatcctcgaggagctgtatgagaccttaacacagggtgcagtaggccacgtgcctgacggaaatccaaggagggagagctggactcctcgtctcagctccgaagctgtctctgtgctctgggatctcctgaggcagtctccccagccagcacaggccctgctggagctcctgcttgaggaggatgacggtactggcctctgtcactggcctctgcagaatgcactggtggacctcattcgaaaggcattgcgggctttgcagggccctgattcggtgccccctggggtagtcgatgccatctatggagccctgcggactctgcgttgccccgcagaaccacttggggttgagttgcatctcctgtgtgaggaactactagaggcctgcaggaccgaggggagtcccctgcgggaggagcggctgctcagctgcctgctgcacaaggccagccggggcctgctgtccctgtatggccatacctatgcagagaaggtcacagaaaagccaccgagggctacagcctcgggaaaagtctcaccggatcatctagatcctgagcgggcaatgctagccctgttctccaatcccaacccagccgaggcttggaaagtggcctatttctactgcctgagcaacaacaaacacttcctcgagcagattctggtaacagcactaacattgttgaaagaagaagacttcccaaatcttggctgcctacttgatagagaattcaggcccctcagttgcctgcttgtactcctgggctggacacactgccagagcctagagtcagccaagaggctgctccagaccctgcacaggacccagggcccaggctgtgatgagctcctcagggatgcctgtgatgggttgtgggctcacctggaggtcctggagtggtgcatacagcagagcagcaaccccataccaaagagagatctgttgtatcatttacacggtggagacagccactcagtgctctacactctccatcaccttacaaaccttccagccctcagggaggaagatgttctcaagctcttacagaaagtgccagccaaggacccccagcaagagcctgatgcagttgatgctccagtccctgagcacctgagccagtgtcagaacctgacactctaccagggcttctgtgccatgaagtatgccatctatgccctctgtgtaaactcacaccagcactcccagtgccaggactgcaaagacagcctctctgaggacctggcctcagctacagagccagcgaatgactctctctcctccccaggtgctgcaaatctcttctcaacttacctggccaggtgtcaacagtatctgtgcagtattcctgactctctgtgcctggagcttctggaaaacatcttctcattgcttctcatcacctctgctgatcttcacccagagcctcacttgcctgaggactatgctgaggatgatgacattgaggggaagagcccctcaggtttgaggtccccatcagagagccctcagcacatagcacatcctgaaaggaagtcagaacggggttccctgggagtcccaaagacccttgcttatacaatgccaagccatgtgaaggcagagccaaaagacagttacccagggcctcataggcacagctttttggacttaaaacactttactagtggtatcagtggatttctggctgatgaatttgcaataggggccttcctcaggcttctccaagagcaactggatgagatcagtagccgcagcccccctgagaagccaaagcaagaaagtcagagctgctcaggaagcagagatggactgcagagccgcctgcatcgactttccaaggttgtctctgaggcccagtggagacacaaggtggtgacaagcaaccatcgttcagaggagcaaccttcccgaagataccagcctgccacacgtcaccccagtctccgccggggtcgtcggacaagaaggagccaggcagatggccgagacagaggttcaaacccatccctggaaagtacaagtagtgagctgagcacaagtacgtcagagggaagtctgagtgccatgtctggccggaatgagctgcacagtagattgcacccccatcctcaaagttcactcatccccatgatgttctccccacctgagtcactgctggcatcctgcatccttcgcgggaacttcgcagaagcccatcaggtgctgttcacgttcaacctgaagtcctcacccagttcaggggaactgatgttcatggagcgctaccaggaagtgatccaagaactggcccaagtagagcacaagattgaaaaccagaactcagatgcgggtagcagcaccattcggagaactggcagtggccgctcaactctacaggccattggcagcgctgcagcagcaggaatggtgttttactctatctctgacgtgactgacaagctgctcaacacctctggagaccccatccccatgctccaggaggacttttggataagcacggctctagtggagcccactgctcccctgagagaggttctggaagacctcagtccccctgccatggctgcatttgacctagcttgctctcagtgccagctctggaaaacctgcaagcagcttttggagacagccgaacggcgtttgaatagtagccttgaaaggcggggtcgacggatagaccacgtactcctaaatgctgatggcattcgaggttttccagttgttcttcagcaaatcagtaagagtctcaattatctgcttatgtcagccagtcaaaccaaatcagagagtgtggaagaaaagggaggaggccctccacggtgcagcatcactgaactgcttcagatgtgctggcccagcctaagcgaggactgtgttgccagccacaccaccctctcccagcagctagatcaggtccttcagtcactgagagaggcactagagctgccagagcccaggactcctccactgtcttccctggtggagcaggcagcccagaaagctccagaggcagaggcccaccctgtgcagatccagactcagctcctccagaagaacctgggcaaacagaccccatcaggcagcaggcagatggactacttgggcaccttcttcagttactgcagcacccttgctgcagttctccttcaaagtttgagctctgagcctgatcatgtggaggtcaaggtaggaaatccctttgttctgctgcaacagagctcttcccaactggtgtcacatctcctgtttgagagacaagttcccccagagagactggcagcccttctggcccaagagaatctcagcctaagtgtgccacaggtcatcgtcagctgctgctgtgagccccttgctctttgctcatcccggcaaagccagcagacctcctccctcctgactcgtctgggtactctggcccagctacacgcctctcactgcctggatgacctcccactttctacaccgagctccccgaggacaactgagaaccctacattggaaagaaagccctactcctccccaagggactcatcactcccagccctcacctcctctgccttggcctttcttaagtcacgctcaaagctcctagctacggtggcctgcctgggggcttccccgaggttaaaggtcagcaaacccagcttgtcatggaaggaacttcgtggccgcagggaggtgcctctggctgcagagcaggtagcccgggagtgtgagcgccttctggaacaattccctctgtttgaggccttcctcctggctgcctgggagcccctgcgagggtctttgcagcaggggcagagtctggcagtgaatctctgtggttgggccagtctttctaccgttctcctgggcctacattctcccattgccctagatgtactgagtgaggcttttgaggaatccttggtggccagagattggtcccgggcccttcagctcactgaagtgtacgggcgagatgtggacgatttgagcagcataaaggatgcagtcctgagctgtgctgtggcatgtgacaaagaaggttggcaatacctgtttcccgtgaaggatgcatctctgagaagtcggctggccctacagtttgtggacaggtggcccctggagtcatgcctggagattctggcctactgcatttcagacacggctgtccaagaaggactaaagtgtgagctacagaggaagctggcggagctgcaggtgtatcagaagattctgggtttgcagtctcccccagtgtggtgtgactggcagaccttgaggagctgttgtgttgaggacccatcaactgtcatgaacatgattctagaagcacaggagtatgaactgtgtgaagagtggggctgcctgtaccccattccaagagaacatttaatcagccttcatcaaaagcatcttctccaccttctagaaagaagagatcatgacaaggctctgcaactcctgcgaagaatccctgaccccaccatgtgccttgaagtgacagagcaatccctcgaccagcacactagcttggccacttctcacttcttggccaactacctcaccacccacttctatggacaactgactgctgtccgacaccgtgaaatccaggcgctgtatgtgggatccaagattctgctgaccctgcctgagcagcaccgggccagctattcccacttgtcctctaaccccctgttcatgctggagcagctgcttatgaacatgaaggtggattgggccactgtggctgtgcagactctccagcagctgctggttggacaggagattggcttcactatggacgaggtggactcactgctttccagatacgcagagaaagccctggactttccataccctcagagggagaaacgatcagattctgtgattcacctccaagaaattgtccaccaggctgcagatcccgagaccctccctagatcaccatcagcagagttctctcctgctgctcctcctggtatctccagtatacattcccctagtctaagggaaaggagtttcccaccaacccagccctcacaggaatttgtgcccccagcgacaccccctgccaggcaccagtgggtaccggatgagactgagagtatctgcatggtctgctgcagggagcacttcaccatgtttaacaggcgtcatcattgtcgccgctgtggccggctagtgtgcagctcctgctccactaagaaaatggtggttgaaggctgcagagagaaccctgctcgtgtgtgtgatcagtgctatagttactgcaacaaagatgtaccagaggagccttcagaaaaaccagaagctctagacagctccaagaatgaaagccctccatactcgtttgtggtgagagtccccaaagcagatgaggtggaatggattttggatctcaaagaggaggaaaatgagctggtgcggagtgaattttactatgagcaggcccccagcgcctccttgtgcattgccatcctgaatctgcaccgggacagcattgcctgtggtcaccagctgattgagcactgctgcaggctctccaagggcctcaccaacccagaggtggatgccgggctgctcacggacatcatgaagcagctgctgttcagcgccaagatgatgttcgtcaaagccggccagagccaagacttggctctttgtgacagctacatcagcaaggtagatgtgctgaatattttagttgctgctgcctatcgccacgtgccatctttggatcagatcttgcagccagctgcagtaaccaggctaaggaaccagcttttggaagccgagtactaccaactgggcgttgaggtctccacaaagactgggcttgataccaccggggcgtggcatgcttggggcatggcctgcctcaaagccgggaacctcactgctgcacgggagaagttcagtcgctgtctgaagcccccatttgacctcaatcagctgaatcatggctcaaggctggtgcaggatgtggttgagtacctagagtccacagtgaggccctttgtatccttgcaagatgacgattactttgccaccctgagggaactggaagctacccttcggacgcagagcctttctctggcagtgattcctgaagggaaaatcatgaacaacacctactaccaggaatgcctcttctacctgcacaactatagcaccaacctggccatcatcagcttctacgtgaggcacagctgcctgcgggaagctcttctgcaccttctcaacaaggagagtcctccagaagtttttatagaaggcattttccaaccaagctataaaagtgggaagctacacactttggagaacttgctagaatccattgatccaaccttggagagctggggaaagtacttgattgctgcctgccaacatttacagaagaagaactactaccacattctgtatgagctgcagcagtttatgaaggaccaagttcgggccgccatgacctgtattcggttcttcagtcacaaagcaaagtcatatacagaactgggagagaagctctcatggctacttaaggccaaggaccacctgaagatctacctccaagaaacatcccgcagctctggaaggaagaaaaccacattcttcagaaagaagatgactgcagctgatgtgtcaaggcacatgaacacacttcagctgcagatggaagtgaccaggttcttgcatcggtgcgaaagtgctgggacctctcaaatcaccactttgcctctgccaaccctgtttggaaataaccacatgaaaatggatgttgcctgcaaggtcatgctgggagggaaaaatgtagaagatggttttggaattgctttccgtgttctgcaggacttccagctggatgctgccatgacctactgcagagctgcccgccagttggtggagaaagagaagtacagtgagatccagcaactgctcaaatgtgtcagtgagtcaggcatggcagccaaaagtgacggggacaccatcctcctcaactgcctggaagcgttcaagagaattccgccccaggagctggagggcctgatccaggcaatacacaatgatgacaacaaggttcgggcctacctgatatgttgcaaactgcgttctgcctacttgattgctgtgaagcaagaacactcacgggccacagcccttgtccagcaggtgcagcaggccgccaagagcagcggggatgcagtagtgcaagacatctgtgcccagtggcttctgacaagccacccccggggtgcccatggcccaggctccaggaagtgaccttgggcagtggggccaggaacacgtggcctgagagctgggcaacagcagtgatggcgatgccctccacctctttcctccagtggagtgggacttctctggctctgccctaggttggaaagagttggattggaccctacttgccttcccgggcaaggataggacctttcacgcaagtgccatgtttctctaaaattgtggaatctatgtgtgtttgtctggagatggccagttctttctacctcagagtgagtgagtgagtatgtgtgcacacacgtgtgcatgttcctgtgcgctgatgtttacgcccaagcatttctgaacaaatgaaactcttctccatttaaaagaggcactttactttagacttgccactctgaaaaccttccctgcgttttggttcttgacccgggttgtcctgtttgtatagtcccccctctgtggacgtgctttagtagctcctcttacctagagggcttttacagagaattagagcaacaccaaaaggattgcctcttttccttccttcccattccaaaattcagagatggctttggggcaagtgctacctgtggaataaacctgttttccaggtgtctcttctcccaagcacaagaagtcctggagtctttggaaggtagtctgaatagaagggttttcaggtgcaggcatctgaaagctgtgggtatgtgtataaatgatcaggtctgtgaggctaacacgggcaagagggaaagaaaggctaaccatccaaacagggatacaggggaggcggtggggggtggtggggggagcgggtgctcacaagcacagagctgcctgttgtgaatgtccctgctgcaaagttggtgggtgagagaatgggacttcctctttgagagtctggggagagaaaaggtggccaggatcctaggactgaatgactcgattttacctatttgagctgcagtcctgtttgcgctccttgaattggttaggaagctgcttccttttccctcctgcttcccttcagtctcttcaggaccacaggatggatatgcagacatgtggggtcattgggaagggagtgcgcttcttttctctgtcttagaaaagggagtcaagggttggctttggaattgggcctctggacagagtcagaatgagggaataatgaataggtcacatctggttggtggaaaactaggtgaagtgcttctttaatatgcactgtcttgtcttcccacgcaagatgtgacaatgtttgagaaaaggtgtgtcatactcagtgacttcaatttgcaaatgtggggcctaaagaaagctctgcagctctgaacctctcactggccagagctcagcctattggtcccatccatgatgctgagacaaacagaaactggaagctgaagtcagtgtctctggtgctcagaaaccctgtggatttccctctgaaccaagatttttagtagtaaaataaacaactcatggacatctgtcagatgagaagttttggtcctgttagagaggagaaagactgtaatgaaactactagacccatttgggctaaagtttggcttttccttccttgagtcatagaacgtatccatctcccaggaaatgtccttctctggcgtctgcttgcccttctgagtctgccttttttgcactgaacataagcactttatactaatgggtcacaaatcttgcagcccttaatttgggataagaccagattttcctgacattttcctctaactcattgaactatcaaattataggcaaccactgactagactgatatgagatgaggctaaaagcctttgaacaccacgctgtagtctccaacagaaaaacaccaccaaaacagatacccatgttgaggggttgaatgttttactacaaacaagccacaataaagtgtctatcaacatgtt

SEQ ID NO: 4005 - DNA, 5249 bp, Homo Sapiens
  NM_015352
cttccctccccgactgtgcgccgcggctggctcgggttcccgggccgacatgggcgccgccgcgtgggcacggccgctgagcgtgtctttcctgctgctgcttctgccgctcccggggatgcctgcgggctcctgggacccggccggttacctgctctactgcccctgcatggggcgctttgggaaccaggccgatcacttcttgggctctctggcatttgcaaagctgctaaaccgtaccttggctgtccctccttggattgagtaccagcatcacaagcctcctttcaccaacctccatgtgtcctaccagaagtacttcaagctggagcccctccaggcttaccatcgggtcatcagcttggaggatttcatggagaagctggcacccacccactggccccctgagaagcgggtggcatactgctttgaggtggcagcccagcgaagcccagataagaagacgtgccccatgaaggaaggaaacccctttggcccattctgggatcagtttcatgtgagtttcaacaagtcggagctttttacaggcatttccttcagtgcttcctacagagaacaatggagccagagattttctccaaaggaacatccggtgcttgccctgccaggagccccagcccagttccccgtcctagaggaacacaggccactacagaagtacatggtatggtcagacgaaatggtgaagacgggagaggcccagattcatgcccaccttgtccggccctatgtgggcattcatctgcgcattggctctgactggaagaacgcctgtgccatgctgaaggacgggactgcaggctcgcacttcatggcctctccgcagtgtgtgggctacagccgcagcacagcggcccccctcacgatgactatgtgcctgcctgacctgaaggagatccagagggctgtgaagctctgggtgaggtcgctggatgcccagtcggtctacgttgctactgattccgagagttatgtgcctgagctccaacagctcttcaaagggaaggtgaaggtggtgagcctgaagcctgaggtggcccaggtcgacctgtacatcctcggccaagccgaccactttattggcaactgtgtctcctccttcactgcctttgtgaagcgggagcgggacctccaggggaggccgtcttctttcttcggcatggacaggccccctaagctgcgggacgagttctgattctggccggagcaccagaccctctgatcctggagggaccagagtctgagctggtccttccagccaggcctggcagccagaggtgctccgggattgcaaactcctcttctcacctgccaaagatggagaagagtgccagggacccctcaaggagggagacgctccatatcccagggcataggacttgcaggttcctaggagcaggagcatctcccatcgcacgtgctttctgctcttctgggaatttctcacactggcaaagcagtccagcctccgtcttctggtccactctgctctgagcagcctgggatgctgaactcttcagagagatttttttatagagagatttctataattttgatacaaggtcatgactatcctagaactctctgtggtttttgaaaatcattgaattctattaatgtaggtacctaaagtgaccttaactgaatgtggatgaggctggggctggtgtgggtcttttggctgcttttcaaggtgtcccccaatgtggccctcaagagccatccccactgcctggccagagccattgttgtcccctacttcctaggccatttctggggcttgggggatgaatgctgtcctgtgctgtaaacactatgcaaatggaagttatcggttgtggtgctgtgcagcgctctgtgggcgactaagtgccactcacgcagcatgttcctggcaaggagcacataccatcaagccacactatcatggtattgttctcacagtcttttggtggttgatggccactgcaaacctggcaccatcagatctcttctgatctcttgccccagtggggcctggttggtagaatgttggcattcggttgatatccaaagcctgttctcccagccgtcctcctgcagctggagccttcaggccgtattctcacgagggaacgtttgccaaggctctgacctcacagaagatgcccagggcccagaagccatcagaattatcagtggagaagcaccttttgactcttcccttccaatgtaatctctgccaacaccatgaggcttaaggtgctctaagtcatgagtgttttggtctcaaatgctgcagttttaataatctgtgactcctgagagcccatggttttttgaccttgtggttctaaaattccttgtctgacccctgtagatcttttccttgccatgtcacctcccttggcctttgatcctggaaaggtggcagagcctccactgagccaggcccagagctccttgcagtgccttcttccttgtttacctgtgggaggaaacactttttttgtcaggggcagcctggttcagagctcagaggtcacactgtatcaaagatctcaaacagcaaagtcagcatttgctgtatagagctgccacccaactctaagcaggagaaactgtacagaaagggctttgctatttttcccttttgggaaaacaatgaagtgttttaagtcctgggtggactgagagatggtttgcctgtccagacttgctctcaagcctcatccagagaaggagctgcagatgagggagcccgtacactccctgccaccactaggttgtaagcctgtagctggctggctgatttcattttggaattcatttgccatccacagccttacactaggcacacactttagagtctggggctccagtggggcccgcctaattttttttccccccaagacagggccttgctctgtctcccaggctggagtgcagtggcatgatcatggcttactgcagccttgatctcccaggctcaagcgatccttctgcctcagcctctctggtagctgagactgcatgcccagctccaaatcaccttgattcatatcagcagtaataatcacttgtgttctgaaagaaagggcaccagaagttctagcaaaattcagttgtgttctgtgagctagcactttttcctctgacccaattttcttacctataaaatggtgataaaaaccgacaggttgttcaaaggcccagatcagctaaagcatgtatataagagcacgttgtaaacttgaaagagacaaaggcacaaatgtggctgttgattaatttgactgcttctcgttgctcgtcacctccatgccaggcactgtgcttgctaattgctttatgggggcattctcttatttattccccagccctgggaaataggagctgtcattatccttctctttctgcacaaggaaaaattaatgccctgagaattgtcataattttcccaaggctgcccagctggtggtgttaagccagaatttgacctcccagagccagtttccattagctgccatgctctgctgcctctaattcacagaatgcactttctaccctgtgtgccatggagacctcctatggaaaaatgatcagccaccttaccttctactgggtacctgctgtgagtctgcctatgccagaaggattaaggaggggaggttacccaagaaacaaagcctacatgccgcttacagcccccgttggatggttgctcagtacaacagtcttgcattcagcaggtgtttgttcatcacctactatgtgtcaggctctatgctaggtactggggatacaggagagaatcaagcgtaaagtctttgttctcaaggaatttgcattctagaaagtagaagatgtaataaatgtactgtgggacatgttaataagtgctataaagaaatataaagggtttgggagcaaaaagagggagtggatctattttagatgagcccaggtaagacctctctgaagagctgtcatgaaggagggagggagcacattcctggcagagaaaacagcacgtgcaaaggccccgagactggagtgtgttcctgaagagcagccaggaggccagcatggctggagaggcaggcataggcagggaaccgagcagcaggtcagagcaggcgagctgacattctgcagcctggacggccatggcaggaagcttttagttggagagatacaggaagcctcctagggttctgagcagaagaggggcatgagctgattcacattctgaaggacctctctagctggccagtgctgaggaggttggagagagaaagggtgaaagcagagagaccagtgcagggctgttaacagggttgcaggcgagagactggggtgctgggctcccctagactaggactccagtgccctcctctcccaagagacaaaggccattgcattgaaggaggtgggaaatgattagattctgaacatatgtaattatttttcagtctttttcaaagatacaaatatttacatagttttaatcatgtaatatatacaatttaatgtcctagtgttttacttaatagtgtatcatgttttccctgttggtatgtagcctggataaatgctcttaattataaaaaattctgtcgaggagtgttccatagtttattgttttcctattatgagaatttaggccaagtgtggtggctcatgcctgtaatcccagcactttgcgaggccgaggtgggcagatcacttgaggtgaggagttcaagaccagcctggccaacatggtgaattatctctactaaaaatacaaaaaaataataataatagccaggcgtggtggcacatgcctgtattcccagctgcttgggaggctgaggcaggagaatggcttgaacctgggaggtggaggttgcagtgagccgagatggtgccactgcattccagcctgggcaacagagcgagactccatctcaaaaaaaaggagacttcatgtgcccccaatttttcactattgttatttgaaaaaatatttttatttgtaagagtttttctttatttaaaatgttcattaataaagttgttggacgggaagcaaaaaaaaaaagttgtttaagataaattcccagaagtgaatttgttagatcaaacacttaaaactttttgttatggaagaattcaaatataaataaaaaattgtgagtaataaaatgaactcacagtttcaacaatgacccacaaaaaaaaaaaaaaaaaaaaaaaaaaaaaaa

SEQ ID NO: 4006 - DNA, 5689 bp, Homo Sapiens
  NM_015354
tagggcgagcgggcgcgcgaagatggcggcggccgccggcgggccgtgtgtgaggagcagtagagaactgtggactattctgcttggaaggtcagctctgagagagctgagtcagattgaggcagaactgaataaacattggcggcgattgttagaggggctttcttactacaaacctcccagtccaagttcagctgaaaaagtgaaagctaataaagatgtagcttcaccattgaaggaactgggtttaagaatcagcaagtttttgggtcttgatgaagaacagagtgtgcagttactccagtgttacctgcaagaggactacaggggtactcgggactcagtaaagacagtactgcaagatgagaggcagagccaggccttaatcctgaagattgcagattattattatgaagaaagaacctgtattcttcgttgtgtcttacaccttctcacttacttccaagatgaaagacacccctatagggttgaatatgcagactgtgttgataaattggagaaggaactagtttcaaaatacagacagcagttcgaagagctttataaaactgaagcaccaacttgggagacacatggaaatctcatgacagagcgccaagtgtctcgctggtttgttcagtgccttcgggaacagtccatgctgctagaaattattttcctttattatgcatactttgagatggcacccagtgacttacttgtattaaccaagatgtttaaagagcaaggatttggtagtaggcagaccaataggcacctggtggatgagactatggatccttttgtagatcggattggctacttcagtgccctcatcctggtggagggcatggatatcgagtccttgcataagtgtgctttggatgacagaagagaactgcatcagtttgcgcaggatgggcttatttgtcaggatatggactgtttaatgttgacctttggggacattccacatcatgccccagtgcttttggcctgggctctcctccgtcacactctgaacccagaagagacaagcagtgtggtccggaagataggtggcacagccatccagctgaatgtgtttcagtacttgacccgattgctccagtcccttgccagtgggggaaatgattgcaccaccagcactgcatgcatgtgtgtctatggactgctctctttcgttctgacctcgttggagctgcacaccctgggcaatcagcaggatataattgatacagcatgtgaagtattggccgacccttctcttccggaactgttctggggaacagagccaacttctggccttgggatcattctggacagtgtgtgtggaatgtttccccaccttctctccccactcctgcaactgctccgagccctggtatcagggaagtccacagccaaaaaggtgtatagcttcttggataagatgtctttctacaatgaactttataaacacaagcctcatgatgtgatctcccatgaagatggaactctttggcggagacaaacacccaaactcctttatccccttgggggtcaaaccaaccttcgcatacctcaaggcactgtgggccaagtaatgttggatgatagggcatacctggtacgctgggaatactcctatagcagctggaccctctttacctgcgagattgaaatgttgcttcatgttgtttcaactgcagatgtgattcagcactgccagcgagtcaaacccatcattgatctcgtccataaggtcatcagtacagacctgtcgatagcagactgtctcctgcccatcacatctcgcatctacatgctgctgcagcggttaacgacagtgatctccccacctgtggatgtcattgcttcttgtgtcaactgcttaactgttttggctgcccgcaatccagcaaaggtctggactgatcttcgtcacacaggttttttaccatttgtggcccatcctgtctccagcctgagtcagatgattagtgcggaagggatgaatgctggagggtacggaaacctcttgatgaacagtgaacagcctcagggcgagtatggggttactattgcctttctgcgcttgatcaccacccttgtcaaggggcaacttggtagtacccagagccaaggacttgtaccctgtgtaatgtttgtgctgaaggagatgcttcccagctaccataagtggcgctacaactctcatggagtgagggaacagattggttgcctgatcttggagctgattcatgcgatactgaacctgtgccacgagacagacctgcacagcagtcatactcccagcctgcagtttctctgcatctgcagcctggcatacacagaagcaggacagacagttatcaatatcatgggcattggcgtggacaccattgacatggtgatggctgctcagcctcgaagtgatggggcagagggccaggggcagggccagctgctgatcaagacagtgaaactggcattctccgtcaccaacaatgttattcggctgaaacctccttctaatgtggtgtcccccctggaacaggctctctcacaacatggtgctcatggaaacaacctcattgctgttctagccaaatacatctaccacaaacatgaccctgctttgccacgtcttgccattcagctgctgaaacgtctggccacggtggccccaatgtcagtgtatgcttgtctgggcaatgatgcggctgccattcgtgatgccttcctgacccgattgcagagcaaaattgaggacatgcgcatcaaagtcatgattctagagttcctcactgttgcagtagagacccagccaggcctcatcgaactgtttctgaacctggaagttaaggatggcagtgatggctcaaaggaattcagccttgggatgtggagctgtctccatgcagtgctggagctgattgattcccaacagcaagatcgatactggtgcccacccctgctgcatcgtgccgccattgcctttttgcatgctctgtggcaggatcggagggacagtgccatgctggtcctccgaaccaaacccaagttttgggaaaatttaaccagtccgctgtttggaaccctttctcctccctctgaaacatcagagcccagcatcctggaaacctgtgccctaatcatgaagataatttgcttggagatatactatgtagtaaagggttcattagaccagtcattaaaggatacactgaagaaattttccatcgagaaacgctttgcctactggtcagggtatgtcaagtcattggcagttcacgtggccgaaacagaaggcagcagctgcacctccttgttagagtaccagatgctggtgtccgcctggaggatgcttctcatcattgccaccactcatgcagatataatgcacctgactgactctgtggtgcgtcgccagctctttcttgacgtgcttgatggaaccaaagcattactcctagttccagcctcagtgaactgccttcgccttggctccatgaagtgcactctgctgcttatcctcctccggcagtggaagagagagttaggttctgtggatgaaatccttggacccttgacggagatcctggagggagtgctgcaggccgaccagcaactcatggagaagaccaaggccaaggtgttctcagcattcatcacagtgttgcaaatgaaggagatgaaagtaagtgacatcccccagtactcccagctggtgctgaatgtctgtgagaccctccaagaggaagtgattgcactcttcgaccagacccgccacagtctggcattaggcagtgccacagaggacaaggacagcatggagactgacgactgttctcggtcccggcacagggaccagcgtgatggggtgtgtgtcctgggcctgcacctggccaaggagctgtgtgaggtagacgaggatggtgactcctggctgcaggtaacccgcaggctccccatcctacccaccctcctcaccactctagaggtgagccttcgcatgaagcagaacctgcatttcactgaggccacattgcatctgctcctcaccctggctcgcactcagcagggagccacagcagtggctggagctggcatcacccagagcatttgtttgccccttctgagtgtgtaccagctgagcaccaacggcacagcacagacacctagtgcctctcggaagtccctggatgccccctcttggccaggagtctaccgcctgtccatgtccctgatggagcagctgctcaaaactctgcgctacaacttcctgcctgaggccctggacttcgtgggtgtccaccaggagcggaccttacagtgcctcaacgcagtgaggacagtgcagagtctggcctgcctggaggaggcggaccacaccgtgggttttattctgcagctctctaacttcatgaaggagtggcacttccacctgcctcagctcatgcgtgatatccaggtcaacctgggttacttgtgccaggcatgtacctctctcctgcacagtcgaaagatgctgcagcattacttacagaacaaaaatggggatggcctcccctcagctgttgcccagcgagtccagaggccaccgtctgctgcttctgctgccccctcctcctcaaagcagcccgctgctgacacagaggcatcagagcagcaggccttgcacacagtccagtatggccttctcaagatcctcagcaagacgctggcagccctgcgccacttcaccccagatgtctgccagattctgctggatcagtccctggaccttgctgaatacaacttcctgtttgccctgagctttaccactcccacctttgactccgaagtggccccctccttcgggacccttctggccacagtgaatgtggccctcaacatgcttggagagctggacaagaaaaaggagcccctcacccaggcagtggggctcagcacacaggcagaagggaccaggacgttaaagtccctcctgatgtttaccatggaaaactgcttctacctgctcatctctcaggcgatgcggtaccttagggacccggctgtgcacccccgggacaaacagcggatgaagcaggagctcagctctgagttgagcacgctgctgtccagcctctcgcgctacttccgccggggagcccccagctcccctgccactggtgtcctcccctcgccgcagggcaagtccacctctctctccaaagccagccctgagagtcaggagcctctgatccagttggtgcaggcgtttgtccggcatatgcaaagatagggcagtgctgttctgcccacctacccctctccaccagcctacactgcaccctggctggcaggggtgctgctggctgctagggcctatacaatggagggcacctcctgtcacccccctcccggagtagccacgactccagccaccacccactgacgttatttttatactagatgaagaggtcaacagcaggcatggggagccgagtcttctgtgctcaggtcctcacgctgcagacgccccctagaggaactttccttcctttccagcattccccacagcactgccggccaggggagaggcggcagcccagcagagggctctatgcacgggtttcaaacctgttttccacactctgtctttgcagttttggtaattctgtggtctatttatacagatattaaaatcttgtttatagac

SEQ ID NO: 4007 - DNA, 5201 bp, Homo Sapiens
  NM_015356
ccgcaccatgctcaagtgcatcccgctgtggcgctgcaaccggcacgtggagtcggtggacaagcggcactgttcgctgcaggccgtgccggaggagatctaccgctacagccgcagcctggaggagctgctgctcgacgccaaccagctgcgcgagctgcccaagccttttttccggctgctgaacttgcgcaagctgggcctgagcgacaacgagatccagcggttgcctcccgaggtggccaacttcatgcagctggtggagctggacgtgtcccggaacgatatccctgagatcccggagagcatcaagttctgcaaggctctggagatcgcggacttcagcgggaaccccctctccaggctccctgatggcttcactcagctgcgcagcctggctcacctggccctgaatgatgtgtctctgcaggcactgcccggggacgtgggcaacctcgccaacctggtgaccctggagctccgggagaacctgctcaagtccctgccagcgtccctgtcatttctggtcaagctggaacagctggatctgggaggcaacgatctggaagtgctgccagacactctgggggctctgcccaatcttcgggagctgtggcttgaccggaaccagctgtcagcactgcccccggagctcgggaacctgcggcgcctggtgtgcctggacgtgtcggaaaaccggctggaggagctgcctgctgagctcggcgggctggtgctgctcactgacctgctgctgtcccagaacctgctgcggaggctgcccgacggcatcggtcagctgaagcagctatccatcctaaaggtagaccagaatcggctgtgcgaggtgactgaggccatcggggactgtgagaacctctctgagctgatcctcacggagaacctgctgatggccctgccccgctccctgggaaagctgactaagctgaccaacctcaacgtggaccggaaccacctcgaggcgctgccgcccgagatcgggggctgtgtggcactcagcgtcctctccttgagggacaaccgcctggccgtcctgccaccagagctggcccacacgacagagctgcacgtgctggacgtggcggggaaccgcctgcagagtctgccgttcgcgctcacccacctcaatctcaaggccctgtggctggcagagaaccaggcgcagcccatgctccggttccagacggaggatgatgcccggaccggcgagaaggtgctcacctgctacttgctgccccagcagcccccactcagcctcgaggatgctgggcagcaggggagcctctcggagacctggagcgatgccccgccgagccgcgtcagcgtcatccagttcctggaggcccccataggtgatgaggacgctgaggaagctgcagctgagaagcggggcctacagcgccgggccacacctcaccccagcgagctcaaggtgatgaagaggagcatcgaggggcggcggagcgaggcctgcccttgccagccagactctgggtcgcccttgcctgcagaggaggagaagcggctgagtgccgagtctggcctgagtgaagactctcgcccatctgccagcacagtctctgaggctgagcccgagggcccgtcggctgaggcacagggtgggagccagcaggaagccacgactgctggcggggaggaagacgccgaagaggactaccaggagcccacggtgcatttcgcagaggacgcactgctgcccggggatgacagggagatcgaggaggggcagcctgaggccccctggaccctgccaggcgggaggcagcggctcatccgcaaggacacacctcactacaaaaagcacttcaagatctccaagctgccccagcccgaggccgttgtggctctgctgcagggcatgcagcctgatggggagggccctgtggctcccgggggctggcacaatggcccccacgcaccctgggctcctcgggcccagaaggaggaggaggaggaggaagagggtagtcctcaggaggaggaggaagaggaggaggaggaaaacagggctgaagaggaagaggccagcactgaggaggaggacaaggagggggccgtggtttctgcgccctctgtcaagggagtgtcgtttgaccaggccaataacctgctgatagagcctgctcgcattgaggaggaagagctgaccctcaccatcctgcggcagactgggggcctgggcatcagcattgcgggcggcaagggctccacaccctataagggggacgacgagggcatattcatctctcgggtgtccgaggaaggccctgcggcccgggctggagtccgtgtgggtgacaagctcctggaggtgaatggtgtggctctgcagggcgccgagcaccacgaggccgtggaggcgctccggggggccggcactgccgtgcagatgcgagtgtggcgggagcgcatggtggagcctgagaacgcggtcaccatcacgccgctgcggcccgaggatgattacagcccccgagagcggcggggaggggggctgcgcctgcccctgctcccgcctgagagccccgggcccctccgtcagcgccacgtggcctgcctggcacgcagcgagagggggctgggcttcagcattgctggtgggaaaggctccacaccctacagggctggtgatgcgggcatcttcgtctcccgcattgccgagggcggtgctgctcaccgcgcgggcacactgcaggttggcgaccgcgtcctctctattaatggagtggacgtgactgaggccaggcatgaccacgccgtctccctgctgaccgctgcctcccccaccatcgccctgctgttggagcgggaggctgggggccctcttcctcccagccctctgccacattcctcaccccccaccgctgctgttgccaccaccagcataaccactgccacccccggggtgcctgggttgccgagcctggcccccagcctgctggctgccgcgttggaagggccatacccagtggaggagatccgtctgccaagagctgggggccctctggggcttagtattgtcggaggctccgaccattccagccacccgtttggtgtccaggagcctggtgtgttcatctccaaggtgctcccgcggggcctggccgctcgcagcggcctgcgggttggggaccgcatcctggcagtgaacgggcaagacgtgcgggatgccacgcaccaagaagcagtcagtgccctgctccggccctgcctggagctgtcgctgctggtgcggagggacccggcacccccgggcctacgggaactgtgcatccagaaggcacctggggagaggctgggcatcagcatccgcgggggtgccaggggccacgctggcaacccccgcgaccccacagacgagggcatcttcatctccaaggtgagccccacgggggcagccgggcgcgacggtcggctgcgtgtgggtttgcggctgttggaggtgaaccagcagagcctgctgggcctgacgcacggcgaggcggtgcagctgctccgcagtgtgggcgacaccctcaccgtgctggtctgtgacggcttcgaggccagcaccgacgcagccctggaggtgtccccaggtgtcattgccaacccctttgcggcaggcatcggccaccggaacagcctggagagcatctcttccatcgaccgggagctgagccctgagggcccaggcaaggagaaggagctgcctggacagaccctgcactgggggcccgaggccacagaagccgcaggtcggggtctgcagcccctgaagctggactaccgcgccctggccgccgtgcccagcgctggcagcgtgcagagggtaccgtctggagcagctggagggaagatggctgaatctccctgctcccctagtggccagcagccgccctccccgccttctccggatgagctgcccgccaatgtgaagcaggcctacagggccttcgcggccgtgcccacttctcacccgcctgaggatgcccctgcccagccccccacgcctgggcctgcagcctccccggagcagctgtccttccgggagcggcagaagtactttgagctggaggtgcgcgtgccccaggccgagggcccccctaagcgcgtgtccctggtgggtgctgacgacctgcggaagatgcaggaggaggaagccagaaaactacagcagaagagagcgcagatgctgcgggaggcggcagaggctggggccgaagcgaggctcgccctggacggggagacgctgggcgaggaggaacaggaggatgagcagccaccctgggccagcccgagccccacctcaaggcagagcccggcgtcccccccgcccctgggaggtggcgccccggtgcggacggccaaagctgaacggcgccaccaggagcggctgcgcgtgcagagtccggagccaccggcacccgagcgtgccctgtcccctgccgagctccgggccctggaggccgagaagcgtgcgctgtggagggcagccaggatgaagtcattggaacaggacgctctccgagcacagatggtcctcagcaggtcccaggaaggccggggcacgcgggggcccctggagcgactggccgaggccccttcccctgcgcccaccccgtcgcccacccctgtggaagacctcggcccccagaccagcacctccccgggacgcctgtcaccggactttgctgaggagttgaggtccctggaaccatctcccagccctggcccgcaggaggaggatggagaagtggctctggtgcttctgggcaggccctcacccggcgctgtgggccctgaagatgtggcactgtgcagcagccgccgccccgtaaggcctgggcgccgtggcctgggccctgtgccctcctagaggagcaggcacctcccccagacttggggtgggggccctgccagctccagcaccacccttgccccaagtcttttaacctgggtgttagcattttaaagagaccccacaggagttctggcctgtgactaactaactgccccaccccagccgagacctcggcgagactgtaactagtgatgtttgtacaaccaaagactctattttgtggtttaaggagaataaagttgactacattttacctccaaaaaaaaaaaaaaaaaaaaaaaaaaaaaaaaaaaaaaaaaaaaaaaaaaaaaaaaaa

SEQ ID NO: 4008 - DNA, 4222 bp, Homo Sapiens
  NM_015360
cttgagtcgccagctgcctgccacacgccaggcgccacgcgccgccctcgctctttatccactgagcagcttatccactttaggtcggaaaggaaaggaaagaaaagcaggaaaaaaaaaaaaagtcaggggaacatttttgtcggctgcgcgactcgactacttttgtctcctgcgggccactgttgagccttcacgagacgtcactgtcttcggtcgcggggcatcgtgggtaggagggagatttgctctcactgctcccaaaaatggcggacgcattcggagatgagctgttcagcgtgttcgagggcgactcgaccactgcggcgggaaccaaaaaagacaaggaaaaggacaaggggaaatggaaggggcctccagggtctgcagacaaggcagggaaacgttttgatggtaaattacaatcagaatcaactaataatggaaaaaataagagagatgtagatttcgaaggtacagatgaacccatttttggaaagaagcccaggatagaagagtcaataactgaagacttaagtttggcagacctgatgcccagagtcaaggtacaatcagttgaaactgttgaagggtgtacacatgaggttgcacttcctgcagaagaggattatttaccacttaaaccacgagttggaaaagctgctaaggaatacccgttcattcttgatgcttttcaaagagaggccattcagtgtgttgacaataatcagtctgttctagtatctgcacatacctcagcgggaaaaacagtatgcgccgagtatgccattgcattggccttaagggaaaagcagcgtgtaatatttaccagcccaattaaggctctgagtaaccaaaaataccgtgaaatgtatgaagaatttcaagatgttggtttgatgactggtgatgttactattaatcctacggcatcttgtcttgttatgaccacagagattttgagaagtatgctttacagaggttccgaagttatgagagaagttgcttgggttatatttgatgaaattcattatatgagagattcagaacgtggtgtagtatgggaagaaactattattttgcttcctgataacgtccactatgtctttctttcggctactattccaaatgcccgacagtttgctgaatggatttgccatttacataaacagccttgtcatgttatttacacagattatcggcccactccattgcaacactacatttttccagcagggggagatggcctgcatcttgtggttgatgaaaatggtgacttcagagaagataattttaatactgcaatgcaagtgcttcgagatgcaggtgatttggccaaaggagaccagaaagggcggaaaggaggaacaaaaggaccatcaaatgttttcaaaattgtgaagatgattatggaaagaaatttccaacctgtgattattttcagttttagtaagaaagattgtgaagcctatgcacttcaaatgaccaaattagatttcaacacagatgaagaaaagaagatggttgaagaagtattcagtaatgcaattgattgcttatccgatgaagataaaaaactccctcaggtagaacatgtacttcctcttttgaagaggggaattggtattcaccatggtggtttacttcctattttgaaagaaactatagaaattctcttttctgaaggattgataaaggccttatttgccacggagacctttgctatgggaattaacatgccagctagaactgttttatttacaaatgcccgcaaatttgatgggaaggatttccgatggatttcttctggtgaatacattcagatgtctggtcgtgctggaaggagaggaatggatgatagaggaattgtaattcttatggtagatgaaaagatgagcccaacaattggaaaacaattacttaagggctccgctgatcctctaaatagtgctttccatttgacctacaacatggttttgaacttactacgtgtagaagaaattaatcctgagtacatgttggaaaaatccttctaccagtttcagcattatagagcaattccaggagtagtagagaaggtaaagaattcagaagaacagtataataaaatagtaattcccaatgaagaaagtgtggttatctattataagattagacagcagcttgccaaattgggtaaagaaattgaagaatatattcacaaaccaaaatactgcttaccttttctacaaccaggtcgtttggtaaaggtaaagaatgaaggagatgactttggctggggagtagtggtgaatttctcaaaaaagtcaaatgttaagcctaactctggtgaactggatcctttgtatgtagtagaagtacttctgcgctgtagcaaagagagcttgaaaaattcagctacagaagctgcaaaaccagctaaacctgatgagaaaggagagatgcaggttgtcccagttttggtgcatctcctgtctgctatcagcagtgttaggctttacattcctaaagaccttcggccggtggacaatagacagagtgttttaaaatcaatacaggaagttcagaaacgttttcctgacggcatccccttattagaccctattgatgatatgggcattcaagatcaagggctgaaaaaagtcattcagaaagtagaagcttttgagcatcgaatgtattctcatccacttcacaatgatccaaatttggaaactgtgtatacgctttgtgaaaaaaaagcacagattgcaatagatattaaatctgcaaagcgagaactgaagaaagcaagaacagtcctacaaatggatgaactcaaatgtcgcaaacgtgttttaagaaggttgggatttgctacttcttctgatgtaatagagatgaaaggacgagtggcttgtgagataagcagtgctgatgagctccttctaactgagatgatgtttaatggccttttcaatgacctttctgcagaacaggcaacagcattattaagctgctttgtgtttcaagagaattctagtgagatgcccaaattaacagaacaattagcaggaccacttcgtcaaatgcaggaatgtgctaaaagaattgcaaaagtttcagcagaagccaaattggaaattgatgaggaaacttatctaagctcatttaaacctcacttaatggatgtagtatatacctgggcaactggagctacatttgcccatatctgcaaaatgacagatgtctttgaaggcagcataattcgttgtatgaggcgcctggaagaattgcttcgacaaatgtgtcaagcagcaaaagccattggaaacactgagctggaaaataaatttgcagaaggaatcaccaaaatcaagagagatattgtgtttgctgccagcctctacttgtagagtcagctaaaggaatgtgagattttaaattattgaccacctgtttgattacagttgactacaaatgcctgcaagtgtggatttggttctcccatacattttaatatgtattatatttaaatcaaacatcattcatagaaagcatattacatacatgtttatacataagcattacatttttttaataaaaatgtatacaggtggggcactgttttggtggaaggcttggagtttttttaatgagtttagagctattagataaccactgagttaaaggtaactatgtacacacaaagtgtgcatccaagaggcatagcagcagcagaagtctttaaaggcttgtacaccaggaagaaagatgcatcctcttgccttgtggcaatcattttcctttagaaaacaggccagcttcacctgggcaccctgctgcctttcaaggctggtgattgctcggatagtgattcccagttgttggtgtttcatgcagagttgtatgagagtcctcctcttttctttctttaaaagaagttctttctttgaagaaatccgatacatatacagcctacagtgcaaaatatttaatggtataatttagatcaagttaaaaactacatacaaagttgtgatcaacagcatcctaagataaatataaacaaaaggatatactttgaggtgtacagattaagcatataaaaaattagagactaactgggattttttaaagattattccaaattaagagttgctttgttatgccttcagcaaatagcttcattttgccaatactgaataaaagagttatttctacaaaaaaaaaaaaaaaaaaa

SEQ ID NO: 4009 - DNA, 4666 bp, Homo Sapiens
  NM_015361
cggtgtccgggctggtgatggggttaattccctttcgtaagactcttacttgcacccacccagccccgccgtcgccccgccgcgccgcgctccaaccgcctcctcctcctcagtaacgcgggccacggaaaggtatgatatatttgatccaagacagtccattccagtccgggaatctacagtggtgacaaggacatgggactcctcctgccagattacagatggttcactacagttgacatcctggctgacaactgtgaaaaagaaccttggattattttattttatttttgtgggacaccacaatcccaaatccaaaggacgcatcaggcttcaagctccctgtagaattcgaaaataaccttttctaatgaggatgtctgatactgttactgtaaaagatgaaactgcaacaatgaaggatttggaggcagaagtgaaagatacaaccagagttgaaaatcttatcaaatcagaaaactatgggaagattttggtagagaagaatgaacattgtattgagaacaatatagatttgcagcggccattgcagtcatttggacagacaggaaaaaggtctaagtcaagctcaaagttaaagctagttcggagccttgcagtgtgtgaagaatctccaccaccccctgcaccagagatatcacaggagaaccaggagaaaattcagatccagttaacacaatcatttgagaaagaagagaagccctcaaaagatgaagcagaaaaagaaaaggccagtgataagttgcccagaaaaatgttatcaagagattccagtcaagaatacactgattcaactggcatagatctacatgaatttttagtaaatacattaaaaaacaatcccagggacagaatgatgctgctgaaattggaacaagaaattttagatttcattggtaataatgagtctccacgtaaaaaattccccccaatgacatcttaccataggatgctattacacagagtagccgcttactttggattagaccacaatgttgatcagagtgggaagtctgtcatagtaaacaaaactagcaatacaagaatacctgatcagaaatttaatgaacatattaaggatgataaaggtgaagactttcagaaacgttatatcctcaagagagataactctagctttgacaaagatgataaccagatgagaatacgtttgaaagatgacagaagaagcaaatctatagaagaaagagaagaagagtaccagagagccagagaccgaatattttcccaagattccctgtgttcccaagagaattacattattgacaaaagactccaagacgaggatgccagtagtacccagcagaggcgccagatatttagagttaataaagatgcttcagggagatctacaaatagccatcaaagcagcactgagaatgagttgaagtactcggaaccacgaccctggagcagcacagattcagacagctctcttcgaaacctgaaacctgctgtaaccaaagccagcagcttcagtggaatctcagtcctgacaagaggtgatagttctggaagcagcaaaagcataggcaggctttcaaaaacaggttctgagtcttctggtagtgtagggtcatctacaggctctctttctcacatccagcagcctcttccaggtacagctctcagccagtcttctcatggcgcacctgtcgtctatccaactgtcagcactcatagttctctttcctttgatggtggcctaaatgggcaagtcgcatctcctagcactagcttctttttgcttcccttggaagcggcaggcataccacctggcagtattctgatcaacccacaaacaggtcagcccttcataaacccagatgggagtccagttgtgtataatcctcctatgactcaacaaccagttagatcccaagtgcctggacctccacagccacctctgccagccccacctcaacaaccagcagctaatcacattttctcacaggataacctagggtctcagtttagccacatgagtcttgctcgccagccatctgctgatggttctgaccctcatgccgccatgttccagtccactgtggttcttcagtctccacagcagtctggttatatcatgacagcagcccctccaccacatcctcctccaccgccaccaccaccacctcctcctcctcccctaccacctgggcagccagtccctactgctggatatcctgcctctggtcatcctgtcagccagcctgtgctccagcagcagggatatattcagcagccatcaccacagatgccagcctgttattgcgctccaggccactatcactccagccaacctcagtatcgcccagtcccttctgttcattacaattcacatctaaaccaaccactgccacaacctgcgcagcagacaggttatcaagttatacccaaccagcagcaaaactaccaaggaatagttggagttcagcaaccccagagtcagagcctagtcagtggccaacccaacagcattggaaatcagattcaaggagtggtcatcccctatacttcagtgccaacatatcaggtttcactgcctcaaggttctcaaggaattccccatcagacttatcaacagcctgttatgttccctaatcagtctaatcaaggatctatgcccacaacaggaatgcctgtttactatagtgtcattccacctggtcaacaaaacaatttaagctcttcagtaggttacctgcaacatccaggatcagaacaagtacaatttcctcgaaccacttcaccatgcagttcccagcagcttcaaggccaccaatgtacagctggaccaccaccgccacctggtggggggatggtgatgatgcagctcagtgtaccaaacaatccacaatcttgtgcccactcacccccgcagtggaaacaaaacaaatattactgtgatcaccagagaggacagaagtgtgtagaatttagcagtgtagacaatattgtccagcacagccctcaactcagtagccccattatttcaccagctcagtcgccagcaccagctcagctgtccaccctgaaaactgtacgtccctctggaccaccactttccatcatgccccaattttctagaccttttgtccccgggcaaggagattccaggtatccattacttggccagccactgcagtacaatcctcctgctgttctgcacggacacattccaaaccaacagggtcagcctggcagcaggcatggaaaccgaggaaggagacaagctaaaaaagctgcatccacagaccttggagcaggagaaacagttgttgggaaggtcttggaaattactgaactaccagatggaataactcgcatggaagctgaaaagctttttggggaactctttaaaattggcgccaagatccggtggctccgggacccccagtcccaaccacgtcgtcaccccctctgctgtggcagtggggacaacactgccaaccctgaacgctctaaacccagtgacttggcctccacctacaccgtcttagccacattcccctccatttcagctgcacagaatgcactgaagaaacaaattaactcagttaacaagtttaagctgagaacaagcaagaagcactatgactttcacattttggaaagggcaagttctcagtaacagccacctttggacccttcgcctttatggttcccctgccctctcccatctttgattggcttggtatttggagcttctgttaacattatagagactcctaggatgtgtgttcatggcattatagcctttgaagaaaggccagtgatccagcaaagggggaaaaatatgcatttcaccccacatgactaggaatccacatcagaatgatacagagttagcaggtttttctaaggaaatgccattcaaatgcctcctaacttttatagttattttgttttatatttctaaattcttgtatcagatccaaagctctattgtacagcaaattattcttcaaaatgattataaccagttgcaccctgtatttctttttgcagccagcacaatgtgacccaacttaaaatttgggggaaaaagaatgcaggagtgaaataaccaagtcaaaaccatgtactatctccttgggggttagggatgctaagaagagcccacaaatagaggattactcttcccctgaatctctaaactcagaaacaattaccaaaaaatacataactcttccttgtagggccctttccttattcatttaggtagtgtgaacattaagtataaaataaattatgttcttaatgcctcttaaaccacttacattcaaaggggaacagaaatcattctaagcaggaaaatacttccactttttttttttcaagtatctctctaataactaaatgccacttatttgcattctccttgtggattttttgtcacctaaggaaatgcatttgatgagtgctggaaacttcttaagtgctttacagtttgttttcattgtttgcagcggatcactggacatcaaagattcattgcacttatgaacaaggaaccttcttttcaatttctgtgtaatttgcaaggctgtacaatgtgtgctgatgcaagcctttttcagttcaagagaataaatgtttacaaatataaaaaaaaaaaaaaaaaaaa

SEQ ID NO: 4010 - DNA, 1398 bp, Homo Sapiens
  NM_015362
ggccctcgcggggggcttgtgggtcctcctccccctcccactgacaactgccccaactgctcttcccgccccggtcacagtgaaaatgtagacggggtcgttgtccactatgttaggtcttaatggtgggaggacgcccgagtgctcggcccgtttcaccccgaggaggaaggacactgggtcatgacgccatcagagggcgccagagcagggaccggacgcgagttggagatgttggactcgctgttggccttgggcggcctggtgctgcttcgggattccgtggagtgggaggggcgcagtctcttgaaggcgcttgtcaagaaatctgcactgtgtggggagcaagtgcatatcctgggctgtgaagtgagcgaggaagagtttcgtgaaggttttgactctgatatcaacaatcggctggtttaccatgacttcttcagagaccctctcaactggtcaaaaactgaggaggcctttcctggggggccgctgggagccttgagagccatgtgcaagaggacagatcctgttcctgtcaccattgctctcgattcactcagctggctgctacttcgccttccctgcaccacactctgccaggtcctgcatgctgtgagccatcaggactcttgtcctggtgacagctcctcagtggggaaagtgagtgtgctgggcttgctacatgaagagcttcatggaccaggccctgtgggagctctcagcagccttgctcagactgaggtgaccctgggcggtaccatgggccaggcctcggcccacatcctgtgtcggaggccccgacagcgcccaactgaccagactcagtggttctccatccttccggacttcagcctggatctccaagaggggccctctgtagagtcccagccctactccgatcctcatatacccccggtggatcccacaactcatttgacctttaaccttcacctgtccaagaaagagagagaagccagagatagcctgatcctgcccttccagttcagttctgaaaaacagcaggctctcctgcggcctaggccagggcaggctaccagccacatcttctatgagccagatgcttatgatgacctggaccaagaagacccagatgacgacctggatatttgactggccagatttgattagattgtaattggagggggcgcgggaagactttgggcccagaaccatctttctattgtttgtgttagccttaccctgtccctgccccaccttggttccccttgtctatggagccccgccttgtgagccaggaagcagcgtctcatcaggacagaaggtaggatgaagacatggggtaatgtgagagagtagaacacccccgtacctaataaaaatctttatttttttattaaaaaagaaaaacaaaaa

SEQ ID NO: 4011 - DNA, 642 bp, Homo Sapiens
  NM_015364
agaaatcatgtgactgatgactaagttaaatcttttctgcttactgaaaaggaagagtctgatgattagttactgatcctctttgcatttgtaaagctttggagatattgaatcatgttaccatttctgtttttttccaccctgttttcttccatatttactgaagctcagaagcagtattgggtctgcaactcatccgatgcaagtatttcatacacctactgtgataaaatgcaatacccaatttcaattaatgttaacccctgtatagaattgaaaggatccaaaggattattgcacattttctacattccaaggagagatttaaagcaattatatttcaatctctatataactgtcaacaccatgaatcttccaaagcgcaaagaagttatttgccgaggatctgatgacgattactctttttgcagagctctgaagggagagactgtgaatacaacaatatcattctccttcaagggaataaaattttctaagggaaaatacaaatgtgttgttgaagctatttctgggagcccagaagaaatgctcttttgcttggagtttgtcatcctacaccaacctaattcaaattagaataaattgagtatttaaaaaaaaaaaaaaaaaaaaaaaaaaaaa

SEQ ID NO: 4012 - DNA, 5431 bp, Homo Sapiens
  NM_015365
tgagccgcagcgtgctcgcccccgccgccagctcgcctcacttatgggtcggaaacgctgcgtgggggagactgttccaagatggcggcgggttgctgcggggtgaagaagcagaaactgtccagttcgcccccctctggctcgggtggcggtggtggcgcctcctcctcctcccactgcagcggagagagccagtgccgagctggggagctgggactaggaggcgccggtacgcggctcaacgggctgggaggtctaaccggaggaggtagcggcagcggctgtaccctctctcccccccagggctgcggcggcggcggcggggggatcgccctgtcgccacctccgagctgcggagtggggaccctactttctaccccggccgccgccacctcttcctcaccctcctcatcgtccgccgcctcgtcctcatcgccgggctcccggaagatggtggtgtcagcagagatgtgctgcttttgcttcgatgtgctctactgtcacctgtatggataccagcagccccggaccccccgattcaccaacgagccctacccactgtttgtaacatggaagattggtcgagacaaaagattacgtggatgcataggtactttttctgccatgaatttgcattcaggactcagggagtacacacttaccagtgcccttaaagatagccgttttcccccaatgacaagggatgagctgccacggcttttctgctcagtgtctctgctcactaactttgaagatgtctgtgattatttggactgggaggtgggtgtacatggcattagaatagaattcatcaatgaaaaaggatcaaaacgcaccgccacctacctaccggaggttgcaaaggagcaaggatgggaccatatacagaccatagactccttattgaggaaaggaggatacaaagctccgattactaatgaattcaggaaaaccataaaactgaccaggtatcgtagtgaaaagatgaccctgagctatgctgaataccttgctcatcgccagcatcatcatttccaaaatggcattgggcatccccttccgccatacaaccattattcctgacactgagccgcacaaccagtcactgggcctctctgcagacctcttcccaggagaccctacaccttcttggtctagctatctcttttactgtaccattttatgatgatagtttccgttgccatggtgaagcttcgacatcgtcaactaagatcatcatggtaacgggtagaaaaatggcatttgttaagatcctgttttattattttagatcgttgattttttttttgcagcatatataattttgggtttttttttccttataatattatgtagaattttgctttgctgtctcagtcaggtttctgtttttctgtcctccttgcctttcttcccgttttgcttcctgttttccttcttccttcccgttttccttcttccttccctgcctcccttcctttgactgtggatggaagaaagtgtgcagtttttagggattttacttaggttcgtctttagttttcctcagtaagatagttgttttttgatacctgagtttgggattaattcatatcaaattcaggtatttgtatattactcttgatttttgtctgaaattcactttgctatgacagcctagtagttgggtcttcactccttaagtatatgtttttcccatggtgaaaatacatgaactttagttctagtagtgagcattcaaaggtccgtgatagggcttgtcacagagagagagaaatcatttatccctattgtgctggttatcatagaagagactgcctcaccactttatagaaccaatttgcaaactaaaacactgtttggagaaggtacaaactacctttcaaaaaggctacaggaaacattttatgagcagcaaatattaggaagagagcagatacagaatttagtgcctttgagaagaatataattaagtggaattaagaggggttagaaaaaaggcaatttagaaaaatattcttgtaaaactttattgtttctatatgtgaaacagaagattagacaaattccttactcttaagtatttttttaagctgaaaaaaaattattttgagcaaataaccaataagagacatttgtctattttatattaatttaaatttgttagctctaggtttcaataagtcatgattggctagaatccattttagctaccatctaaagatatggtaaagataatttagtaaaacaaaagttcatatttgccatgatttcagatatgtttgtcatggggacaatattagagttttagagatactataaaatagcttgaatttctttctgcactacatacttttgatagaaacacatttactacattgataagatgttatgtcacacctgtgaaaatggagttggcattcagatatgctatagttagagcccagctcatctgcaagtatagtcttcccatgatgcatacaaagataacttactgatgtcgataggaggtccatacatatatccccaggaaaaatgacagattattctggaggaagatgaccttcattttatggttatgtgtgtgtgtctgtgtgtctttggaaaaatatatataattttttcaaataggaagccaacatatcaagtgatgaattaaagtatgctgcagaatatatattctaaaactacaaaaaagtcactgaatatcaaaatgatacagcttatacatatagttactgtgacaagtgacagactgctagttcagaattcaaaaatcctttcctagtttgtgagataatgggctaaattccttctgcctgccactggggcaaagcaaattgctttagtttttgatgagagttcttagaagtttgttggtattccttcatccacagcatccattgttgaaataaccattttcagttgtgatgccttaactaagaagccaattgttagcctgaaatgcaatcttggtagccagtttcaatgaagctagagattagtcagaaaaagttagctgttgggctttagaaagggattttgagtcctgtcatttctacttgggagcattttggagcagattagtctttcagtataaaaacaagtggctacctgatggaaacttttcttacccttatagggaaactgagcacaagctgaatgatattgtctgctgcaaaaaaaaacaaacaaaaaaaaaacaaaacaaaaaacaaaaaaaaggaaaaaaaggtaaataaaacaagcaaactgaagagagacaaaatagaccaatattatcgtgaaatccatcttatccatcatctcatcggttcaacaggctcctcgtcctgggtgagcttatggttagaagtttttttagcaaagatttattacatacatagatgtgtgtgtgtacatatacttacacatacatacatacatatatgtgtgtttatttaacggtgctaatcaatcttgagcaggtcacgtgactggtcatgcggactctaaaatcatatcagattttttaaaatccttgatatatgcagatgttatacagattttcttagcagtgtaataacgttaaactgaagaaataaccatcctgcaggcttcaaaggacgaggtcagcaatatttcccaacatggcttgggggaaaaggatagttttgtctccttttgtattcaagtaatgcaaagtgcatttttgtctctaagtagcttttgactaaaagactttgtagtgtaaagggtgttatacaaactgtaatggtgtgcttcaaacaaatgctagaccctttcacctttgtcgtatatacaaagctgttaattatgtggtatgaattaactttgaacatgttgaaatatgtagcatgtctttaactcagacgaagattctgattgcacaggttgtgttctagccagttgtgatttatttgttcagaaacacaaatgtgaattgcactcttatcatcagaatattgtatgagttcagtgatctttaaacagctcagaagtaatacttgaacttcatttgagtagcacaaagtttacatagccccttttaaatgttaattcgttccatttaagttttccattttcagatgcaactgggtatttttcctcttggaaatagtacgtactttgctttggtatgtagcaaaaggcttccatttctggaagggttttcttgttcttaaacaaggtcagccaggtaccagattctaaaagaacaaattgtcccccacccctcaagtggccttctgactgcacgagaatgtgctactaccctctgtagtctcccctaacacgagaggtcagtgaaattgatggaggaagtgcaaggcttgcttcccctcacccttaaagcttaaagcagttgtaagattttcagtccagcacatacagtcccagtgcccagcacaccggaagtttgtatactggcctcttatcttgtcttcaaatgtgcaggaaatttgaaactgtcatctggaataggttccatctcttatgtgtgttagatcaaaccaaagaagcccccagccatgcccaaatgctgcttcaaaagcctgccttccagtccttacaaaaaccttgcaggattaaatgtgttaacttttttatttttgtacagtttctaagtgatttttgctagtgatgttaaaatgaattaagtttatttgaggggtgtgagcacctcctccatttaaataaactggtgactttccttttattttttaaaagtggaaacccgttgtgtgcctctcgatttaagggtttctgatgacattattcttaagaccagcattgatcctttatatacaaatatatgttttccttgttttttattgctatttcagaagaaaatgaaccttttattttgctctacccagtaactgcgctggtacatagacgcactgagcaaacaaacttttgtaaccacctctgactacttttgtatatcaaagttgattacttttgaaatatttggatctagtttctaagttattttagtgttttatatgttccccaaaattactttgaatctgtcaccagcataatgagttcttggtgatacaatggtgagacttgtaatgagcaaaaagctacctggagtagctcctcttttccttctttcttagtaacctgttttttgattaccgtaagacatcacagattacctgaaaccccttccagtataactaggccctccttccttccacatttaattgcttaatagtttgaagaaactattggaaatgggcattttatatgacatgtatggctttacaatattaaatatgagcaaaaagaaaaaatatgagaaggtttatgtgggtctgtaaggtatggctgtggaaagatattgtagtagttttgacactattgttattacctttaaaatcatttacccaataaaatgttaaaaccgaaaaaaaaaaaaaaa

SEQ ID NO: 4013 - DNA, 1147 bp, Homo Sapiens
  NM_015373
aggcggcaggaggcgggtgggtcaaggtaactctgggctacagagtccttgctgggggttcggggagcgcttggaccccggcttctgggacgcgtcaggagaagggagcactggctttgctttcatcaggccaaagatgcctttctttgggaatacgttcagtccgaagaagacacctcctcggaagtcggcatctctctccaacctgcattctttggatcgatcaacccgggaggtggagctgggcttggaatacggatccccgactatgaacctggcagggcaaagcctgaagtttgaaaatggccagtggatagcagagacaggggttagtggcggtgtggaccggagggaggttcagcgccttcgcaggcggaaccagcagttggaggaagagaacaatctcttgcggctgaaagtggacatcttattagacatgctttcagagtccactgctgaatcccacttaatggagaaggaactggatgaactgaggatcagccggaagagaaaatgaagaccccagagacatttattggggagtaggatgtggctgagtgctttttttttggccagactagcggattcagtcctggaagagagtatcatataatgagacccacaggcactggcacccttgggttggcaatagaaggtgacatggaatggagaaaaccaagattccagatggggatagtaactagaaggtgcttcagatgcactgcctgcgggtgccagtctgaaaaccagaccgcacagaggcctggggctgctgatgagctttttggtgctctccacacacaagctcgcaaacacacatgtcccagaatagctctgttgggttgtgttgggagaagcggctggagttcattctctcacccccttatgttggtgtttggcgtgtgacagcagttctacagagctctgtgttggggtcatggatgagcggctctcttggctcttaaaggcaggcctctctcttcttgcctttaaagaatcctccttcctcacacctggcctcctctggcttcagcttctcagcagcaagcaccagccttccacaacaacactatatttttatgctactttcctgtttgcactactacttttttattaaacgatgttaaataaaaaaaaaaaaaaaaaa

SEQ ID NO: 4014 - DNA, 4007 bp, Homo Sapiens
  NM_015374
cgcacacatacagagtcggccacacgcgcgccgcccggccccactcgcgcagcgcgggcctccgccggccgcattgtccgcccgcccgccttgtcccgcgtcgccgctcttcgcgtgcccgcgcgccccgggcccggccgctgtgtcgccctgagcggagcgccgcccgcgggatccccacgcggaaagggggcgcgccccggcggcggcctggcctcggacgcccccggccgggctagaagccgccgcggcagcagattctcttcaggggaagagtccacatcccacctcatcatgtcccgaagaagccagcgcctcacgcgctactcccagggtgacgatgacggcagcagcagcagcggagggagctcggtggctgggagtcagagcaccctgtttaaagacagtcctctcaggaccttgaagaggaaatccagcaacatgaagcgcctgtccccagcgccacagctgggcccgtcctctgatgcacacacctcctactacagtgagtcgctggtccacgagtcctggttcccacccaggagctccctggaggaactgcatggtgacgccaactggggtgaggacctgcgggtgcggaggaggagaggcacgggtggctcagagagcagcagggccagcgggcttgtggggcgcaaggccaccgaggacttcctgggctcttcctcgggctactcctctgaggacgactacgtgggctactcggatgtggaccagcagagttccagctcgcggctccgaagcgccgtctcacgggcgggctccttactctggatggtggccacttcgccaggccggctcttcagacttctctactggtgggctggcaccacctggtaccgcctgaccacagctgcctccctccttgacgtcttcgttttaaccaggcgcttctcgtccctgaagacgttcctctggttcctgctgccgctgctcttgctgacgtgcctgacgtatggtgcttggtatttctacccctatgggctgcagacattccaccctgctttggtttcctggtgggcagcgaaggacagcaggaggccggatgagggctgggaagccagagactcatcgccacatttccaggctgagcagcgtgttatgtcccgggtacactctctggagcggcgtctggaagctcttgctgctgaattttcctccaactggcagaaggaggccatgcggctggaacgtctggagctgcggcaaggggctcctggccagggaggtggtggtggcctgagccacgaggacaccctggcgctgctggaggggctagtgagccgccgtgaagctgccctgaaggaggatttccgcagggaaactgctgctcgcatccaggaagaactgtctgccctgagagcagagcatcagcaagactcagaagacctcttcaagaagatcgtccgggcctcccaggagtccgaggctcgcatccagcagctgaagtcagagtggcaaagcatgacccaggagtccttccaggagagctctgtgaaggagctgaggcggctggaggaccagctggccggcctgcagcaggagctggcggctctggcactgaagcagagctcggtggcggaagaagtgggcctgctgccccagcagatccaggccgtgcgggacgacgtggaatctcagttcccggcctggatcagtcagttccttgcccgaggtggagggggccgcgtggggctccttcagagagaggagatgcaagctcagctgcgagagctggagagcaagatcctcacccatgtggcagagatgcagggcaagtcggccagggaagccgcggcctccctgagcctgacgctgcagaaagaaggtgtgattggagtgacagaggagcaggtgcaccacatcgtgaagcaggccctgcagcgctacagtgaggaccgcatcgggctggcagactacgccctggagtcaggaggggccagcgtcatcagcacccgatgttctgagacctacgagaccaagacggccctcctcagcctcttcggcatccccctgtggtaccactcccagtcaccccgagtcatcctccagccagatgtgcacccaggcaactgctgggccttccaggggccacaaggcttcgccgtggtccgcctctctgcccgcatccgccccacagccgttaccttagagcatgtgcccaaggccttgtcacccaacagcactatctccagtgcccccaaggacttcgccatctttgggtttgacgaagacctgcagcaggaggggacactccttggcaagttcacttacgatcaggacggcgagcctattcagacgtttcactttcaggcccctacgatggccacgtaccaggtggtggagctgcggatcctgactaactggggccaccccgagtacacctgcatctaccgcttcagagtgcatggggagcccgcccactagccctgcttactggtgcctgctgccagccatctgggagtgggtgaacagcaccccgccgcttcccccacacgcttgctcggcgctctgacttctaggagcacaagagaggagcctgtggccccatgcagatgaaaaggacgggcagggtctcctgagcagcaggtggctcgaggcggttagcaggctccagcagctcccttcttccttccctctgtgcccgtggcgtctgcttcccatcctgggagtgtgtatatatgtagcatatcatgggggactgggaagttgggagaggtaggacctgactggtcttggctggggtcaggggctggtgcctgggagctgatgaagcaggtgccagggctgtgggaggggcaagctacggcctgggctaggtgagctgcctctgcccctgggcaaggaagcgaggccctctgggaggagggtgcttagctccagagcaggatgggacttccccaggcaggaagcacttgatggagagctgcccagctctcctacaaggttagtgccctccacctagggaagcatgaaccacagggtccctgagggccttcgacaaaagtgtgtatttgtcccggggagggtagcagtgggccatggggcttcttgtgccctaaaggggactggctgctgtgatcttctaaggggcccagggccaaccctgtaggcttcccctctgctggggacggtagttgcttttctctctcctgatgctaggttggggcccaccctgctccctgttcctgctagggcctgccagtgcccctgagcttgctttccacattctcccagggtatggagacctagacctgtctttggggccattagcatctggggttatagcaagaagagtggggagcatggaactcctgggctcttgtggggacgttcagggtatcggggtgcgaggtctgtctgcaccggcccccacatctaaccaggccctgatgtaggggtcgtccgctcaggctgcccccttgggctcttgcagctcttgttcaggtagtcgcccttctggtttgttctctgtggggcagttggtgggggctgggggaagaggctggcagaagttaccctggatagggaagggggaggaggggacttttagagccagcaggccccactgtattatgtatatatttttcaaggtctgtttttctaactgaaaagctaagggcttgattcctagccccgttctgtggggcactgggtgatactcagtttcttgttcctggccgtggagaggggcctggggcactggttccggctgtgtctggtggtctggctgcggggaaggggcaagaaggcgggcaggccttcactgcagcactgagcctcaaatccgctctggagcatgaggctggatgcagtggtggtgaggccgccccgctccatcccgaggcagccagggtttgttttgcgctctcctgtcacaaatgctgcactattggttcttaagttttttatctccagatcctaatttatgcctatgcaaaaaataaatgacgcccaagagctgtgggatgtggctttcaaaaaaa

SEQ ID NO: 4015 - DNA, 16341 bp, Homo Sapiens
  NM_015378
aggagcggcggggaggaaacgccgcgcagcgccgggctggggcgggcggcccgggacaccgacagatttttctgtgaccatgaaagagagaaataaagaatgatccatgatttctaaacaccttttcctgaggatatagtcatgttggaaggccttgtagcctgggttctcaatacctatttgggaaaatatgtcaataacctgaacactgaccagctctcagttgcacttctcaaaggtgctgttgaattagaaaacttgccattaaagaaagatgccttgaaagaattggaattaccatttgaagtcaaagctggcttcattgggaaagtaacccttcagattcccttttatcgcccccatgtggacccttgggtgatctccatctccagccttcacttaattggagccccagagaaaatacaggatttcaatgatgaaaaggagaagctgttggaaagggaacgtaagaaagcactacttcaagccctggaggagaaatggaagaatgaccgccagcagaaaggggagtcctattggtattcagttaccgcctccgtagttacaaggattgtggagaatattgaattaaaaattcaagatgtccatttacgctttgaagatggtgtcaccaatccctcccatccttttgcttttggcatctgcattaagaatgtgtccatgcaaaatgctgtgaatgagcctgtacagaaactaatgcggaaaaagcaattagacgtagcagaatttagcatctattgggatgtcgattgcactttactgggggatttgcctcagatggagttacaggaggccatggccaggagcatggagagtcgcagccatcactacgtcctggagcctgtgtttgcatctgctcttttgaagagaaactgctccaagaagcccctgcggtctcggcacagtccccgtattgattgtgatattcagctggagaccattcccttgaaactctctcagctgcaataccggcaaatcatggaattcctcaaggagctggaacgaaaggagaggcaggtgaagttccgaaggtggaaacccaaggtggcgatatctaagaactgccgagaatggtggtattttgctttgaatgctaacttgtatgagatcagagagcagaggaaacgttgcacctgggactttatgttgcaccgcgctcgtgatgctgtatcttacactgacaaatatttcaacaagttaaaaggaggcctgctgtccacagatgacaaggaggaaatgtgtcggattgaagaggaacagagctttgaggaattgaagattttgcgtgaactggttcatgatcgatttcacaaacaggaagaactagcagagagtctgcgggagcctcagtttgattctccaggagcctgtccgggagccccagaacccggtggaggcagtgggatgctgcagtatctccagtcctggtttcctggatggggtggctggtacgggcagcagaccccagaagggaatgtggttgagggactgtcagcagagcaacaggagcagtggattcctgaagagatcctgggcactgaggagttttttgaccccactgcagatgcctcgtgtatgaacacgtatacaaagcgagatcatgtctttgccaaactgaatttgcagttgcagcgaggtacagtgactctgttacacaaggagcaaggaactcctcaaatgaatgaaagtgctttcatgcagctcgagttttcagatgtaaaacttctagcagagtctcttcctcgaagaaattcctcgttgctttcagtccggttgggtggactgtttcttcgagacctggctacagaaggaactatgtttcctcttctagtcttccctaatccacaaaaagaagttggcagagtctcacaatcttttggtctacaaactacatctgcagacagaagtgatcattacccagctgcagatccagatggccccgtttttgagatgctgtatgagagaaatccggcgcacagccactttgagaggcggctcaatgtcagcacaaggcccttgaacatcatatacaatccgcaggccattaaaaaagtagcagactttttctacaagggaaaggttcatacctcaggttttggttatcagtctgaacttgagctgagagtggctgaagctgcccgaagacaatataacaagctgaagatgcagaccaaggcagaaatccggcaaactcttgatcgtttgctagtgggtgatttcattgaggagagtaaacgatggaccgtgcggctggatatttctgcccctcaggtgatatttcctgatgatttcaaattcaagaatcctgtgttagttgtcgtggatctaggaagaatgcttttgacgaacacccaagataactccaggaggaaaagtagggatgggtcagcatctgaagagacccagtttagtgatgatgaatataagacccccctggccacacctcctaacaccccacctcccgagtcaagcagcagcaacggagagaaaacacctcccttttctggagttgagttcagtgaagaacagcttcaagcacatttaatgagcacaaagatgtatgagaggtactcgctgtcatttatggacctccagatcatggttggacgagtgaaagacaattggaagcatgtccaggatattgacgtgggaccaacacatgtggtagagaagttcaacgttcacctacagttagagcgtcgattgatttatacttcagatcccaaatatccaggagccgtgctctcaggcaacttaccagacttaaaaatccacattaatgaagataaaatatctgcactaaagaattgctttgctctcctcaccaccccagaaatgaaaacttctgacactcagattaaagaaaagatttttccccaggaggagcagcggggaagtttgcaagactccgtaatgaatttaacccagagcattgtgttgttggagcagcatacccgcgaggttctggtggagtcgcagctcctcctggcggaatttaaagtgaactgtatgcagcttggtgttgagagcaatggccggtacatttctgtgctcaaggtgtttggtaccaatgctcactttgtgaagaggccttatgatgctgaagtctccctaactgttcatggtttgctcctggtggataccatgcagacatatggtgctgattttgaccttttgatggcttcacataagaacttgagctttgatattccaacgggaagccttcgggatagcagggcccagtctcctgtctctggaccgaatgtggcccacttaactgatggagctacactgaacgaccgatcagctactagtgtttcacttgacaaaattcttaccaaagagcaagagtcccttattaagttggaatatcagtttgtgagttcagagtgcccatcgatgaatttagacagtactcttcaggtgatttccctacaggtgaataatttagatattatcctcaatccagagacgattgtggagctaattggttttcttcaaaaatcctttcccaaggaaaaagatgatttaagtcctcaacctttaatgactgattttgaaagaagcttcagagaacaaggaacttaccagtctacatatgaacaaaacactgaggttgcagtggaaatccataggctgaacttactgcttcttcggacagtgggcatggcaaatagagagaaatatggcagaaaaattgcaactgcaagtataggtggcaccaaagttaatgtctcaatgggtagcacgtttgacatgaatggttctcttggctgtttacagcttatggatttgacacaagataacgttaaaaaccagtatgttgtcagcattgggaattctgtaggctatgaaaatatcatcagtgatattggctactttgaatctgtgtttgtcagaatggaagatgcagccctcactgaagctttgagtttcacgtttgttgagagatctaaacaggagtgttttctcaacctgaagatggcttctttacattataaccactctgctaagtttttgaaggagttgacgttatccatggatgaactggaagaaaattttcgaggtatgctgaaaagcgcagccaccaaagtcaccacagtactagctaccaagactgccgagtatagcgagatggtatcgctctttgaaactccaaggaagactcgggaaccctttatcttagaggaaaatgaaatatatgggtttgacctagcttcgtctcatttggacactgtaaagctaatcttgaacataaacattgaatcaccagttgtttctatccctcggaagccggggagtcctgagttgttggtgggacacttgggacagatattcatccagaattttgtggcgggagatgatgaatccagaagtgaccgtctgcaggtggaaatcaaggacattaaactgtattctttgaattgcacccagttggcaggtagagaagctgttgggtctgaaggaagccggatgttttgcccaccttccgggtctggcagtgccaacagtcaggaggaagctcatttcacacgacatgatttctttgaatctttgcatagaggtcaagcttttcacatcctgaacaacaccaccattcagtttaaactggagaagatccctatagagagagaatctgaattgactttttctcttagcccagatgacctgggaacttctagcatcatgaagattgaaggaaaatttgtcaatccagttcaggtggtgttagcaaagcatgtatatgagcaggttttacaaaccctggacaatctcgtgtacagtgaagatctgaataagtatccagccagtgctacctcctccccttgccctgattctcctctgcctcccctcagtacctgtggagaatcttctgttgaaaggaaggagaatggattgttcagccactccagcctttctaacacctctcagaagtcattgtcagtgaaggaagtcaaatcctttactcagattcaagccaccttttgtatatcagagcttcaggttcagctaagtggagatctgactttgggggcccaaggtcttgtgagcttaaagtttcaggactttgaggtggaattcagtaaagaccatccccagactttatctattcagattgccctgcattctctgctgatggaggacttattggagaagaatccagattctaaatataagaacctgatggtgtctcgaggagcccctaagccatctagtttagcacaaaaagaatacctttctcagtcttgcccctcagtgtccaatgtggaatatcctgatatgcctcggtctctcccttcccacatggaagaagctcctaatgtcttccagttgtatcaaaggcccacctctgcgtcccggaaaaagcaaaaggaagtccaagacaaggactatcccttgaccccacctccttctccaacagtggatgagcccaagatacttgttggaaagagtaaatttgatgattccttagtccacatcaacatattcttggtagataagaaacatccagaattctcttccagttacaatcgagttaaccggagcattgatgttgattttaattgcttggatgtgctgatcacactgcaaacctgggttgtgatattagacttttttggaatcggctccactgcagacaaccacgcaatgaggctgcctcctgagggcattctgcacaacgtgaagttggagccacatgcctccatggagtctggacttcaggatccagtgaacaccaaactggatctcaaggttcattcactttctctagtgctgaataagaccaccagtgagcttgccaaagcaaatgtgtccaaattagtagcacacctggaaatgattgagggagacctggccttacagggcagcattgggagtctgtctctaagtgacctcacatgccatggagagttctacagagaacggttcactaccagtggtgaagaagcactcatcttccagacttttaaatacggacggcctgaccctctgctccggagagaacacgacattcgcgtgagcctccggatggcctctgtgcagtatgtgcatactcagcgtttccaggcagaggtggtggccttcattcagcatttcactcagctgcaggatgtcttagggcgccagcgagctgctattgaggggcagacggtgagagatcaagcccagcgctgttcacgggttctcctggatattgaggctggtgctcccgttctcttgatcccagaaagttccagatcaaataatctgattgtagcaaatttggggaagttgaaagtcaaaaataagtttctgtttgctggttttcctggcaccttttccctacaagataaggaatctgtgccttcagcttccccaacgggtattcccaaacacagtctgaggaaaacgacaagcacggaggagcccaggggaacccattcccaggggcagttcacgatgcctcttgctggaatgagcctaggaagcctgaagagtgagtttgtgcccagtacctccaccaagcagcaagggccgcaacccacactgtctgttggccaagagtccagtagtccagaagaccatgtctgcctgctggattgcgttgtcgtggatctccaggacatggacatctttgctgcagagagacatccgagagaatactcgaaggcaccagaggatagtagtggagatctgatcttcccttcctattttgtgcgacagacaggaggaagcctcttaaccgagccttgtaggctgaaattgcaggtggaaaggaatttggacaaagaaataagtcatactgtgccagacatatctatccatggcaatctctcctcagtccactgctctctggatctgtataaatacaagctgatccgcggcttattagagaacaacctgggagaacccatagaggaatttatgcggccttatgatttacaagatccaagaattcatactgtcctgagtggagaagtgtacacctgtatgtgcttcctcattgatatggtgaatgtaagtctggagcttaaagatccaaaaagaaaagaaggtgctgggtccctagccagatttgacttcaagaaatgcaaactgctctatgaaagtttttccaaccaaaccaagtccattaacttggtttcccattccatgatggcttttgacacccgttatgctgggcagaagaccagccctggcatgacgaatgtgttcagctgtatctttcagcccgctaagaacagcagcaccacccaagggtccattcagattgaactacatttcagatctaccaaggattcctcctgctttacagtagttctcaacaatctccgtgtgtttctcatatttgactggctactgttagtccatgattttctccacactcccagtgatattaagaaacaaaatcatgttactccttctcgccaccgtaactctagcagcgaatctgctatagttcccaaaactgtgaagagtggagtagttaccaagcggtcttcccttcctgtgtccaatgaaaggcacctggaggtcaaggtcaatgtaacaggtacggagtttgtggtcattgaagatgtgtcctgcttcgacaccaatgccattattctgaaaggcaccacagtgctcacctataagccccggtttgttgatcgccccttttcaggaagtttgtttggcattgaggtgttttcatgccgactagggaatgagcatgatacagctctttcaattgtggatcccgtacaaattcaaatggagttggtggggaattcttcttatcaaaatagttcaggattgatggatgcattcaatagtgaagatttcccacctgtcctggagattcagttacaagccctggatatcagactctcctataatgatgttcagctgtttcttgccattgcaaaatccatcccagagcaagctaatgctgcagtgccagactcagtggccctggagtcagactccgttggcacttaccttccaggtgcatctcgcgttggagaggaaatcagagaagggacaagacacaccttagatcctgtcttggagttacagctggctaggctgcaggagctgggattcagcatggatgattgtcgcaaagctcttttggcgtgtcaaggccaattgaaaaaggcagcaagttggttgtttaagaatgcggaacctctgaagtctctttccttggcctccaccagccgagatagcccaggggctgtggcagcgccattgatctctggcgtggagatcaaagctgagagtgtgtgcatctgtttcatcgatgactgcatggattgtgatgttcctctcgctgaactcaccttttcccgtctgaattttcttcagcgtgtaagaactagccctgaaggctatgcccacttcaccctttctggagattattataaccgtgctctttcaggctgggagccatttattgagccttggccatgctctgtatcctggcaacagcaggcagctagtcgtctccatcctcctcgactgaagctagaagccaaggccaaacctcgtttggatatcaatatcacttctgtgctaattgaccagtatgtaagtaccaaggaatcgtggatggcagattactgtaaagatgacaaggacatagagtcagctaaatcagaagactggatgggctcttcggtggatcctccatgttttggacaaagcctcccccttgtctaccttagaactaggagtacagccagtctgactaacctagagcaccagatctatgctagagcagaggtgaaaacccccaagcgccggcagccctttgtcccctttgctctgaggaaccacacggggtgcactttgtggtttgccaccctgaccaccacacccaccagagctgcactctctcacagtgggagtccaggggtagttccagaagggaacggaacatttctcgatgatactcacaatgttagtgaatggcgagaagtccttacaggtgaagagattccctttgaatttgaagcaagaggaaagttaagacacagacacacccatgacctccggattcatcaactgcaagtgagagtaaatggctgggagcaagtgagcccagtgtctgtggacaaagtcgggaccttttttcgatatgcagcaccagataaaaattcatcttcctctacgattggcagcccaagcagcagaacaaatattatacatccccaggtttatttctcttcactcccaccagtgcgggtggtctttgcagtgactatggaaggcagtgcacggaaagtcatcactgtccggtcagccctcattgtgaggaacagacttgagacaccaatggaactaagactggatagcccatcagctccagacaagccagtggtgcttcctgctatcatgccaggggattcgtttgctgtgcctttacacctcacttcttggcggctacaggcccggcccaaaggattgggtgtatttttctgtaaggctcccattcattggaccaatgtagtgaagactgcagaaattagtagcagtaaacgagagtgccactctatggacacagaaaaaagccgatttttcaggttttgtgtggctataaagaaagagaattatccagattatatgccctcaaacatattttctgacagtgcaaaacagattttcagacagcctgggcataccatatatctcctgccaactgtggtaatctgcaacttgctaccctgtgaacttgatttttatgttaaaggaatgccaattaatgggacgctgaaacctggcaaggaggcagctctccatacagctgatacatcccagaacattgagctgggggtatcactggagaatttccccctctgtaaagaattgctcattccacctggaacccaaaactatatggtgagaatgcgactctatgacgtcaaccgtcggcagctgaacctcaccatccggattgtgtgtcgagcagaaggatccttaaagatcttcatttctgctccatattggctgattaacaaaacagggttgccactgatcttcagacaggacaatgccaagacagatgctgcaggccagtttgaggagcatgagctggcccgtagcctgagtcctctcttattctgctatgctgacaaagagcagccaaacctctgcacgatgagaatcggaagggggattcatccagaaggcatgccgggctggtgtcagggcttctccctggatggtggtagtggtgtccgagctttgaaagtcatccagcaaggaaaccgcccagggctgatctataacattggtattgatgtcaagaaaggccgaggtcgatacattgatacctgcatggtcatctttgccccccgttacctgttagataataaatcatctcacaagcttgcatttgcacagagggaatttgccaggggacagggaacagccaatcccgaaggttacatttccacccttcctggttccagtgtggtgttccactggcctcggaatgactatgatcagctattgtgtgtcagactgatggacgttcccaattgtatttggtctggaggctttgaagtcaacaagaataattccttccatatcaacatgagggataccttgggaaaatgcttcttcctacgagtggaaattactctccgaggagctacgtataggatctcatttagtgacacagatcagttacctcctcctttccgaattgacaacttttctaaggtcccggttgtctttactcagcatggcgtagctgaacccaggctccggactgaagtgaagcccatgacttcattggattatgcctgggacgaacccaccttgccaccttttatcactctgactgttaaaggggcagggtcctctgagatcaactgcaacatgaatgatttccaggataatcggcagctttattatgaaaatttcatttacattgctgctacatatacattctctggcttgcaggagggaacaggcaggcctgtggcttccaacaaggccattacctgtgcggagctcgttttggatgtctcacccaagacacaaagagtcattttaaaaaagaaggaaccaggaaagcgttctcagctgtggaggatgacaggaacaggaatgctggcccatgagggctcctcagttcctcacaatcccaataagccctcagccgcccgctccaccgaggggtctgccatcttagatattgctggtctcgctgcagtgactgacaacagatacgagccactgatgctgagaaagcctgaccgcaggcgaagcacaactcagacgtggagtttccgagaaggaaaactgacctgtgggttacatgggttggtcgtccaggccaaaggaggactttctggtttgtttgatggagctgaagttgttcttggtcctgacacttccatggagcttttggggccagttccacctgaacaacaatttattaatcaaaaaatgagacctggttctggaatgttatccatcagagtcatcccagatggaccaactagagcactccagataacagatttctgccaccggaaaagcagccgttcatatgaagtggatgaacttcctgtcaccgaacaagagctgcagaaattaaagaatccagatacagagcaggaattggaagtgcttgtgaggttagaaggtggaattgggttgtccttaattaataaagtcccagaagaactggtctttgcaagtcttacaggaatcaatgtgcactatacacagctggcaaccagtcacatgcttgaactcagcatacaggatgtacaggtggacaatcagctcattggtaccacgcagcccttcatgctctatgtgactcccctgagcaatgagaatgaggtcatcgagaccggcccagctgtgcaagtcaacgcagtgaagttccccagtaagagtgcactgaccaacatctacaagcatctgatgatcacagctcagagattcacagtgcaaattgaggagaaactgctcctcaagctgctaagtttctttggctacgatcaagcagaatcagaggtggaaaaatatgatgaaaacctccatgaaaagacagctgagcaaggtggaacaccaattcgatactactttgaaaatctcaaaatcagcattcctcagatcaagctaagtgtgttcacctccaacaagctcccattggatcttaaggccctaaaaagcaccttggggtttcctttgatacggtttgaagacgctgtgattaatctagatccattcactcgggtacatccctatgagaccaaggagttcatcatcaatgatatcctcaaacatttccaggaggaactcctcagccaggcagctcgaatcctgggatcagtggattttcttggcaatcctatggggcttttgaatgatgtttctgaaggggttactggactgataaaatatggaaatgtcgggggcctcatcagaaatgttacacacggagtatcaaactctgctgccaagtttgctggaacattatcagatggcttagggaagacgatggacaatcggcatcagtcagagcgggagtacatcaggtaccatgcagccacaagtggtgaacaccttgtagccggcatccatggcctggctcatggtatcattggtggactgaccagtgttataacttcgacagtggaaggtgtgaaaacagaagggggtgtcagcggtttcatatctggccttggaaaagggcttgttggcactgtaaccaagccagtggcaggcgccctggattttgcatcagaaacagcccaggcggtgagagacacagccacactcagcggccccaggactcaagcacagagggttcggaaaccgcgttgctgcacggggccccaggggctgcttccccgatattctgagagccaggcggaaggacaggagcagctcttcaaactcacagacaacatacaggacgaattcttcatcgctgtggagaacattgacagctactgcgtgctcatctcctccaaagctgtttacttcctgaaaagtggagactacgtggatcgagaagccattttcctagaagtcaaatacgatgacctctaccactgccttgtctccaaagaccatgggaaggtgtatgtgcaggtgaccaagaaagccgtgagcacgagcagtggagtgtccatccccggcccctcccaccagaagcccatggtccatgtgaaatctgaggtccttgctgtcaagttgtcacaagaaataaactacgcaaagagcctctactatgaacagcagcttatgttaagactcagcgaaaaccgagagcagctggagctggactcctgaagccccgctgctgagatgggcgctcccgacacagcgcagacccaccaggaggaaagaggcccagctctcagctgacgatggaggcagaaccggagtcgggtttggggaagttgtcaaggaatgagggaaagtaaatcctcatgaggaaaagtacaaatggaaatcgtattaatttgtgaggcagggagttattttagattatgggaaataatttttaaaggtattggttaaataacgtttaaaaacatgtactgagatgaatctaatttttagattgccctgtattttgttaacatgtatatatgtacaacagtgtgtttgtaaatatataggaacgtttctgaacagggtctgtgctatgtgtaaaggtttgttaactgtaaagtaatataaagttatattggatcttctattgcactaattctagatgtctaattcaggatactgtctatagaaaggcattcttaaaagttaaagaatgttacgtcttagttttggagactaaagtattcccagtaaagtgggttgaggtgagggctgtggtcctgaaagggacgcctttgacatcgtggctgtccagttgggctgtgagctgtggcacccaggactggcgctggcccttcagaaggatctaggagaggggcttgggagcccacttttaatttctcacccccattttacaaagagtgcttagattcttacaaattatgatgtaagttatccatttggctttttcctaactagtcttaccaaacttagggggaaacctgtgctccattaccacatgggtgcaagtcagcattgtaagttttctcaggttattattattagagaggttggaaacattggtaaactctgttgattgagaaggaaaaaaaaagtcccattgaactgttgcaacaaatcagaaatccacataaaagtgctctcctgcctgggcagcaacaaccaagaacaaagccccgggactgttttctttttaataaagccacaggcaggcatcgtagctccacagcccgaggggacacaggatggaaaccccaggatgagaagggagcagggagagttccagaaagggggatgaaataggagtattaaaaagctgcgttggtaagtttttcatggaaccaagatttgacaaaggcatctcttatccttggttttaaattcctgctgggagcaaggcctggtatgagcgccctgggtcttgtttttggtgtttcgcttttctgtaaggattaagcagatagggagaagggaaaaggggcctcactttagaatgaatgagtcaccttgtgatttttaaatttttattttaataaagctaatcaatttctacaaccttgtcacatgtagctgagtctgggatgactcagtggatcagtggatgcgtggaaggttttggtgtttataactcatgacccaaatccttccaagacacaaatgaagctaatcttcttcccctccctttcctctcccacttcccctctgtgtctgtgtctgtgtgtgtgtgtgtgtgtgtgtgtgtgcgcgcgcgcgcgtgcatgcagagaggaaggaagggagctttagcacaagtagctacatagtgttcaaggatcagctttcttgaactccgaggcttggttgcctttgctgaactccaagttagtggattgcagaatggaaacttggcttttgcggcactgggtgagttttagtttgtgtgtgtcttgctggggggtggtgatgattgtctcagcactcacgcactgcacaagatggcagcaggatacagcactgcacaagatggcagctcctctgcagcttcctcctcagcctccctccttgcacccccacaggtttggcttgtggtttttgtcatcagtaacctactgcctgagatcatgatctcttaaaagatgagactctcggaagggttgattgtatgcgtcagtgagccttctatcaccttctggaacaaagtcacttgaaatctcttgatgagattaaggagtttagtgttactaagaaaatctgctttgggccgcagcagtgctgggtgttctcagacctgactgaggaagttagctgcgggctgccctgtgggctggtgcttcaggaggaatccagagaagtgttcagatgccccccttgggctcctttctaattttaatcagctctttaaatagctgcccatctcctgtgattgcacaaccaagcactttgacatttgcaccttaggagaggcagatgttaaaatggaatccaaagaccacctagggcggggctgggtgggagatgggagggccaactgcgagctgctccacttctcagctctcccctgccctgcagccctgggccagacaaggccagaaggtttcaggggcatttgacatcccctcctggttctcaccaggaaaacatccaaagctttggaggaaacaggccctgcccctggctccttaaatgccccgtctctttgtaaactgatattcagccagcaatgcctaagactttgttaagatcatttctactgcttttctttctgcttcaaacacacagttcgtctctgaggaaagtaaaataaatggaataagagtaaattgggtaaggagatatccaaagctacccagtcccttgacccagcacagttggccgacccgtgtcactccctggctgtcgctgcttctctgtgctcactgaagggtgagccaggccagtgcttccccagcccctgggcctggtcactacacagtggaaaacagacaagcggccccttccccaaatcccaagagtgtcttgctgcttggtgggtgctcatcgcaatgttctgaaggctccagggccactttgtttgtaagtatgatctgggcctcaaaataccatagtagctgcttgataaaattctaaaaatatctggttctctattatgtaaacactattacagtcaccagtgtgtgaagactcttgagtctggttctcatatcagagtcatcatttttcttcctgtggaataaaatgccttgtggacttcccaaaaaaaaaaaaaaa

SEQ ID NO: 4016 - DNA, 809 bp, Homo Sapiens
  NM_015379
cccgccccgcgtctgcctcagaggggcccgagccacccggtccgccgcgtccccgccgccgccgccgcgtcccccgccggggccgaccgagccgagccgggccggagcggcgggcgcggccgggccgccatggaccacaagccgctgctgcaggagcggccgcccgcctacaacctggaggccggccagggcgactacgcgtgcggcccgcacggctacggcgccatccccgccgcgcccccgccgccgccctacccctacctcgtcacagggatacccacccaccatcccagggtctacaacatccacagccggaccgtcacccgctatcctgccaactctatcgtggtcgtaggaggctgtcctgtctgcagggttggggtgctggaggactgcttcaccttcctgggcatcttcctggccatcatcctcttcccctttgggttcatttgctgttttgccttgaggaagcgacgatgccccaactgtggagccaccttcgcttaaagggaacaccaggcccggctttcctacacccagctctctttttctaatgtaaatgttgtgtacaataattttatttgattaagcttcaggactgttttgtaaagcgaggtgggaccgatgtggcacacgccagctgcggtttcccggagcgtggagaggcagtgctgctgctcccgcccgaggctcatgacaactcaataaagcactgcttttattttttgcagtcttcaatttgagaaaggtgagaaataatgttttcaataaatgagattcataccattgttaaaaaaaaaaaaaaaaaa

SEQ ID NO: 4017 - DNA, 1773 bp, Homo Sapiens
  NM_015380
aatgagcgaaggcatcgcgagccagggggcgcggagaaggcggggaatcatggccgcccccagtgttccgcgtccgggggtttgtgggagttgccttgacctgcagctccgccaccgcggacccgccttctgccctcagcagcagacgctctgtcccgcccgggcagctctgcgaggcagcggctggagagggaaccatggggactgtgcacgcccggagtttggagcctcttccatcaagtggacctgattttggaggattaggagaagaagctgaatttgttgaagttgagcctgaagctaaacaggaaattcttgaaaacaaagatgtggttgttcaacatgttcattttgatggacttggaaggactaaagatgatatcatcatttgtgaaattggagatgttttcaaggccaaaaacctaattgaggtaatgcggaaatctcatgaagcccgtgaaaaattgctccgtcttggaatttttagacaagtggatgttttgattgacacatgtcaaggtgatgacgcacttccaaatgggttagacgttacctttgaagtaactgaattgaggagattaacgggcagttataacaccatggttggaaacaatgaaggcagtatggtacttggcctcaagcttcctaatcttcttggtcgtgcagaaaaggtgacctttcagttttcctatggaacaaaagaaacttcgtatggcctgtccttcttcaaaccacggcccggaaacttcgaaagaaatttctctgtaaacttatataaagttactggacagttcccttggagctcactgcgggagacggacagaggaatgtcagctgagtacagttttcccatatggaagaccagccacactgtcaagtgggaaggcgtatggcgagaactgggctgcctctcaaggacggcgtcatttgctgttcgaaaagaaagcggacattcactgaaatcatctctttcgcacgccatggtcatcgattctcggaattcttccatcttaccaaggagaggtgctttgctgaaagttaaccaggaactggcaggctacactggcggggatgtgagcttcatcaaagaagattttgaacttcagttgaacaagcaactcatatttgattcagttttttcagcgtctttctggggcggaatgttggtacccattggtgataagccgtcaagcattgctgataggttttaccttgggggacccacaagcatccgcggattcagcatgcacagcatcgggccacagagcgaaggagactacctaggtggagaagcgtactgggccggcggcctgcacctctacaccccattacctttccggccaggccagggtggctttggagaacttttccgaacacacttctttctcaacgcaggaaacctctgcaacctcaactatggggagggccccaaagctcatattcgtaagctggctgagtgcatccgctggtcgtacggggccgggattgtcctcaggcttggcaacatcgctcggttggaacttaattactgcgtccccatgggagtacagacaggcgacaggatatgtgatggcgtccagtttggagctgggataaggttcctgtagccgacacccctacaggagaagctctgggactggggcagcagcaaggcgcccatgccacacaccgtctctcgaggaaacgcggttcagcgattctttgactgcggaccctgtgggaaaccccgtcaataaatgttaaagacacactccgaaaaaaaaaaaaaaaaaa

SEQ ID NO: 4018 - DNA, 3689 bp, Homo Sapiens
  NM_015383
aagatctcataaaatctatgctgaggaatgagcgacagttcaaggaggagaagcttgcagagcagctcaagcaagctgaggagctcaggcaatataaagtcctggttcacgctcaggaacgagagctgacccagttaagggagaagttgcgggaagggagagatgcctcccgctcattgaatgagcatctccaggccctcctcactccggatgagccggacaagtcccaggggcaggacctccaagaacagctggctgaggggtgtagactggcacagcaccttgtccaaaagctcagcccagaaaatgacaacgatgacgatgaagatgttcaagttgaggtggctgagaaagtgcagaaatcgtctgcccccagggagatgcagaaggctgaagaaaaggaagtccctgaggactcactggaggaatgtgccatcacttgttcaaatagccatggcccttatgactccaaccagccacataggaaaaccaaaatcacatttgaggaagacaaagtcgactcaactctcattggctcatcctctcatgttgaatgggaggatgctgtacacattattccagaaaatgaaagtgatgatgaggaagaggaagaaaaaggaccagtgtctcccaggaatctgcaggagtctgaagaggaggaagtcccccaggagtcctgggatgaaggttattcgactctctcaattcctcctgaaatgttggcctcgtacaagtcttacagcagcacatttcactcattagaggaacagcaagtctgcatggctgttgacataggcagacatcggtgggatcaagtgaaaaaggaggaccacgaggcaacaggtcccaggctcagcagagagctgctggatgagaaagggcctgaagtcttgcaggactcactggatagatgttattcaactccttcaggttgtcttgaactgactgactcatgccagccctacagaagtgccttttacgtattggagcaacagcgtgttggcttggctgttaacatggatgaaattgaaaagtaccaagaagtggaagaagaccaagacccatcatgccccaggctcagcagggagctgctggatgagaaagagcctgaagtcttgcaggactcactgggtagatgttattcgactccttcaggttatcttgaactgcctgacttaggccagccctacagcagtgctgtttactcattggaggaacagtaccttggcttggctcttgacgtggacagaattaaaaaggaccaagaagaggaagaagaccaaggcccaccatgccccaggctcagcagggagctgctggaggtagtagagcctgaagtcttgcaggactcactggatagatgttattcaactccttccagttgtcttgaacagcctgactcctgccagccctatggaagttccttttatgcattggaggaaaagcatgttggcttttctcttgacgtgggagaaattgaaaagaaggggaaggggaagaaaagaaggggaagaagatcaaagaaggaaagaagaaggggaagaaaagaaggggaagaagatcaaaacccaccatgccccaggctcagcagggagctgctggatgagaaagggcctgaagtcttgcaggactcactggatagatgttattcaactccttcaggttgtcttgaactgactgactcatgccagccctacagaagtgccttttacatattggagcaacagcgtgttggcttggctgttgacatggatgaaattgaaaagtaccaagaagtggaagaagaccaagacccatcatgccccaggctcagcggggagctgttggatgagaaagagcctgaagtcttgcaggagtcactggatagatgctattcaactccttcaggttgtcttgaactgactgactcatgccagccctacagaagtgccttttacatattggagcaacagcgtgttggcttggctgttgacatggatgaaattgaaaagtaccaagaagtggaagaagaccaagacccatcatgccccaggctcagcagggagctgctggatgagaaagagcctgaagtcttgcaggactcactgggtagatgttattcgactccttcaggttatcttgaactgcctgacttaggccagccctacagcagtgctgtttactcattggaggaacagtaccttggcttggctcttgacgtggacagaattaaaaaggaccaagaagaggaagaagaccaaggcccaccatgccccaggctcagcagggagctgctggaggtagtagagcctgaagtcttgcaggactcactggatagatgttattcaactccttccagttgtcttgaacagcctgactcctgccagccctatggaagttccttttatgcattggaggaaaaacatgttggcttttctcttgacgtgggagaaattgaaaagaaggggaaggggaagaaaagaaggggaagaagatcaaagaaggaaagaagaaggggaagaaaagaaggggaagaagatcaaaacccaccatgccccaggctcaacagcatgctgatggaagtggaagagcctgaagtcttgcaggactcactggatatatgttattcgactccgtcaatgtactttgaactacctgactcattccagcactacagaagtgtgttttactcatttgaggaagagcatatcagcttcgccctttacgtggacaataggttttttactttgacggtgacaagtctccacctggtgttccagatgggagtcatattcccacaataagcagcccttactaagccgagaggtgtcattcctgcaggcaggacctataggcacgtgaagatttgaatgaaagtacagttccatttggaagcccagacataggatgggtcagtgggcatggctctattcctattctcaaaccatgccagtggcaacctgtgctcagtctgaagacaatggacccacgttaggtgtgacacgttcacataactgtgcagcacatgccgggagtgatcagtcagacattttaatttgaaccacgtatctctgggtagctacaaaattcctcagggatgtcattttgcaggcatgtctctgagcttctatacctgctcaaggtcattgtcatctttgtgtttagctcatccaaaggtgttaccctggtttcaatgaacctaacctcattctttgtgtcttcagtgttggcttgttttagctgatccatctgtaacacaggagggatccttggctgaggattgtatttcagaaccaccaactgctcttgacaattgttaacccgctaggctcctttggttagagaagccacagtccttcagcctccaattggtgtcagtacttaggaagaccacagctagatggacaaacagcattgggaggccttagccctgctcctctcaattccatcctgtagagaacaggagtcaggagccgctggcaggagacagcatgtcacccaggactctgccggtgcagaatatgagcaatgccatgttcttgcagaaaacgcttaacctgagtttcataggaggtaatcaccagacaactgcagaatgtagaacactgagcaggacaactgacctgtctccttcacatagtccatatcaccacaaatcacacaacaaaaaggagaagagatattttcggttgaaaaaaagtaaaaagata

SEQ ID NO: 4019 - DNA, 1219 bp, Homo Sapiens
  NM_015391
agacacgtgatgcgggggagggggggggggcgtggcaggagcaagcgtctgccgcggtggccgggtgccgatttgacaagatcaaagctgcaggaaaatggacagtgaggttcagagagatggaaggatcttggatttgattgatgatgcttggcgagaagacaagctgccttatgaggatgtcgcaataccactgaatgagcttcctgaacctgaacaagacaatggtggcaccacagaatctgtcaaagaacaagaaatgaagtggacagacttagccttacagtacctccatgagaatgttccccccattggaaactgacgcttggctcctttcttgtggatggattttctcaaagtacacagataaagcatggtttgtttcagtctccaaattcaaacctttgagtaataaatcagcactcaaaaatgtacacccatttagtttgtggtagcaaagtgcaatgcgaaattgaatgagaaactgagatttctcagtaatggtgaatatttcgctctttaaacctaaaactcttcattgagtagcttatatttgaacatgattggttaaacatttgcctctacctctgattttgctttgctgtcaaagtttaacaccttccaactacttatgtgtgtcctgtaacacaggtgattgaacgtatgagagggaaaggcaaagaaaaaggaagccagacactaggagaattattaacttctcatacttccccacattgagaagcattcggagtgtatttagcctgtagatgttgtgatatgcaaatatcccattccctggttactggcattcctaagattcttcatggtattttcaaactttggataaatttacagattagaaagatatctgacagttaatctctgttctccttacaaattccttttgtgctgctggaaaggatctttggctaggtggatgactagttttattcaaagccttttctcaaagccctttcagttacaaccaccccactatggaatcagtatttagttatacatttgtataagaacctgtattttgaaaaacacattcatgtatatttattcctggaattatttgcctgttaaacagtgtctttcatgttctctccccagattgtaaactctgtaagaagctgcttgtatctgtatcccttgttgaaactctgaaaacactgaataactaaaatctcttctcatcctttttaaaaaaaaaaaa

SEQ ID NO: 4020 - DNA, 1548 bp, Homo Sapiens
  NM_015392
gcgcaggcgcagtctccgcgtgcgcgcctcgccggcgcctccatcccggatccttgctgcagcgtcagcgccgccgcccgtgcctttcctcttcctcctcctcctccttggcatccgcctcttcttcctcctgcgtcctcccccgctgcctccgctgctcccgacgcggagcccggagcccgcgccgagcccctggcctcgcggtgccatgctgccccggcggcggcgctgaaggatggcgacgccgctgcctccgccctccccgcggcacctgcggctgctgcggctgctgctctccggcctcgtcctcggcgccgccctgcgtggagccgccgccggccacccggatgtagccgcctgtcccgggagcctggactgtgccctgaagaggcgggcaaggtgtcctcctggtgcacatgcctgtgggccctgccttcagcccttccaggaggaccagcaagggctctgtgtgcccaggatgcgccggcctccaggcgggggccggccccagcccagactggaagatgagattgacttcctggcccaggagcttgcccggaaggagtctggacactcaactccgcccctacccaaggaccgacagcggctcccggagcctgccaccctgggcttctcggcacgggggcaggggctggagctgggcctcccctccactccaggaacccccacgcccacgccccacacctccctgggctcccctgtgtcatccgacccggtgcacatgtcgcccctggagccccggggagggcaaggcgacggcctcgcccttgtgctgatcctggcgttctgtgtggccggtgcagccgccctctccgtagcctccctctgctggtgcaggctgcagcgtgagatccgcctgactcagaaggccgactacgccactgcgaaggcccctggctcacctgcagctccccggatctcgcctggggaccagcggctggcacagagcgcggagatgtaccactaccagcaccaacggcaacagatgctgtgcctggagcggcataaagagccacccaaggagctggacacggcctcctcggatgaggagaatgaggacggagacttcacggtgtacgagtgcccgggcctggccccgaccggggaaatggaggtgcgcaaccctctgttcgaccacgccgcactgtccgcgcccctgccggcccccagctcaccgcctgcactgccatgacctggaggcagacagacgcccacctgctccccgacctcgaggcccccggggaggggcagggcctggagcttcccactaaaaacatgttttgatgctgtgtgcttttggctgggcctcgggctccaggccctgggaccccttgccagggagacccccgaacctttgtgccaggacacctcctggtcccctgcacctctcctgttcggtttagacccccaaactggagggggcatggagaaccgtagagcgcaggaacgggtgggtaattctagagacaaaagccaattaaagtccatttcagacctgcggcttctgaaaaaaaaaaaaaaaaaaaa

SEQ ID NO: 4021 - DNA, 5069 bp, Homo Sapiens
  NM_015393
gaggcggaggcggccccgggctcgggcggctgggatggagcagaagagcgcggagcaccggagggcacgcagctgacggagctgcgctgcgttcgcctcgtttgcctcgcgccctccactggagctgttcgcgcctcccggctcccaccgcagcccacccggcagaggagtcgctaccagcgcccagtgcgctctgtcagtccgcaaactccttgccgcccgccccgggctgggcaccaaataccaggctaccatggtctacaagactctcttcgctctttgcatcttaactgcaggatggagggtacagagtctgcctacatcagctcctttgtctgtttctcttccgacaaacattgtaccaccgaccaccatctggactagctctccacaaaacactgatgcagacactgcctccccatccaacggcactcacaacaactcggtgctcccagttacagcatcagccccaacatctctgcttcctaagaacatttccatagagtccagagaagaggagatcaccagcccaggttcgaattgggaaggcacaaacacagacccctcaccttctgggttctcgtcaacaagcggtggagtccacttaacaaccacgttggaggaacacagctcgggcactcctgaagcaggcgtggcagctacactgtcgcagtccgctgctgagcctcccacactcatctcccctcaagctccagcctcatcaccctcatccctatcaacctcaccacctgaggtcttttctgcctccgttactaccaaccatagctccactgtgaccagcacccaacccactggagctccaactgcaccagagtccccgacagaggagtccagctctgaccacacacccacttcacatgccacagctgagccagtaccccaggagaaaacacccccaacaactgtgtcaggcaaagtgatgtgtgagctcatagacatggagaccaccaccacctttcccagggtgatcatgcaggaagtagaacatgcattaagttcaggcagcatcgccgccattaccgtgacagtcattgccgtggtgctgctggtgtttggagttgcagcctacctaaaaatcaggcattcctcctatggaagacttttggacgaccatgactacgggtcctggggaaactacaacaaccctctgtacgatgactcctaacaatggaatatggcctgggatgaggattaactgttctttatttataagtgcttatccagtagaattaataagtacctgatgcgcattgaacgacaatcttaagccctgttttgttggtatggttgtttttgttttcctccctctcctctggctgctacaacttcccctttctggtacaagaagaaccattctttaaaggtgagtggaggctgatttgcagctgaagtgggccagccttgcaccagccaggccagaccaccatggtgaaggcttctttccccactgcaggacccactttgagaaggaccgaggaggaggatttgggttgttttgttaggggttactttcaggggaacatttcatttgtgttatttcttaaacttctatttaggaaattacattaagtattaatgaggggaaaggaaatgagctctacgaggatttcaccctgcatgggagagagcagggttttctcagattcctttttaatctctatttatctggttgtttctgacaggatgctgcctgcttggctctacaagctggaaagcagcttcttagctgcctaattaatgaaagatgaaaataggaagtgccctggagggggccagcaggtcacggggcagaatctctcaggttgctgtgggatctcagtgtgcccctacctgttctcccctccaggccacctgtctctgtaaaggatgtctgctctgttcaaaaggcagctgggatcccagcccacaagtgatcagcagagttgcatttccaaagaaaaaggctatgagatgagctgagttatagagagaaagggagaggcatgtacggtgtggggaagtggaagagaagctggcgggggagaaggaggctaacctgcactgagtacttcattaggacaagtgagaatcagctattgataatggccagagatatccacagcttggaggagcccagagaccgtttgctttatacccacacagcaactggtccactgctttactgtctgttggataatggctgtaaaatgtttaaaaacaaaacaaaacaaaaaagaggcactagtctatctgcaattactcaacgaggcattttcataggaaacagactatgattaatccatttattcttcccacacacttaccttactaagtctttgctttaataaatgagcaaccctgggtatagtcttaaaattctgcacaataaattttgagaaagaattgttcctctttgtaggtatctgtgtattgcaatcattctcaaccaggaggtgattttgccccctgactccaccccagggacattcaaaaatgtctggtgacagttttcattgtcatgacttgggggtgctactagaagccaggaatgctgccaaacattctaccatgcacagcacaacctacaacagcaaagaatcatccaccccaaaatatcagtagtgccgagattgagaaaccctgatttatcacaatgcccactgtgacagaacaagacactcacagattagtgatacgttttatttttaacaaaatgaaatgatgtgttaagtttttatttccaaagtgtttagtttattggctgatgggttgttcttggtatgcatggtgacctttttatttctgtgtgcttcctagagagctttatttcatggcgacaactctgtcttcttgtaacagctgatattagcaagcagcatcttatgtcctgatttcatatagtagaaaacaaacattgggtccgacttcaaaatgtgttgtattgtcctacagtgtcataaagaacctgaaaatgaacttttgtttctaaagttggaccttgctgccatgactgtttagtttacagaaacttgaccccggctcatcctgtctctggctgtggcccggcaaagcactgaaaacccctctggtctcagagacagtaggggcagtgccactttctacaacctgccaacccacacactggagtaattctgaaaaaaattattcctaaactctctaagtgtggacggagaatgagcaagccccagaagtattttacaaccagagtgggtaatgaggagggggcttactggaatcgtcatatctctgaatattgaaaacaacaactaaaaaagtggaccttctcagaaaaaaagggcagcaaatgaccaagggcgccccttctggccgtgcttggcttgagtaactgtctctctttccccacccccatcacagggctttcagtttggcaaaggaaaagcagataaaaacagaacattccatatgtttctttctccatcggccaaaaacattttgacacaatgtttgtgaaacacctttggagaggtgcacttctgaatgctgcctctgccgtaaatcctggggcaagggatcagcctcttcccaggaaccatcgccttctataaaccgtgaactcaagcaggcattttttttttcttaccgaaaggctgctattgtgcaagggcacataatgggtctgttgctcttattggcttccaaatgtgcatggcaaagagagagatgtgggcctagagcagatatattcagcaaggtgacagcttcccataacaattctaacacttcttatcttatgtgagaataaaatatttaagggttgaaccttattttgccaaatgtatcttttctgcttttgaattgggcagaagattttagcaactatattctacaaatgttacttataacacacacacacacatctgaaatatatgccgaaaattgacgtctttgacctcagggagagcacctgtccaggtctgcctaaaggaaatggctccagtgggtctaaacaaccacatcctatccatggataggtctagtcataacactttagagagaatgtcagagcaggagggaggcaagccgcctcttctcggccatcgactgcagatgatgaaagagcgggattcaactttgttttcttttcctgtggccccagtgaaacctcctgccctccctgcacgtctgtgtcttcatttctaaaatgggggtgatgctttcatattgacctcaccccatactacctcacagatgtgttgtgaggattaataaaattatgtctatggtattttcagtttctggagaaaaatacttatagacagtttaactattacatagatatataagtgatctcagtttcttgtttgctgtgatactaatgtgttgttttaacttattccataaaatgacagttgtgtcctagccacatcagacagctatctaagctctggactacccctttgtgcagctgaatcactgcagggttgaccatgcctggtgccacagccatggtttccatttctagatgaaaggatggcctaggacataggtctcaaagactcttggatcagaatcaggagattagggaaaacaggatggatacctgagcactaacagcagtagacgtagacctctgtcctttaccatctgaggtcttctggattctttgtggggttaattttgatttgatgtcatctgtttgcccttcatcttgcttgcaagtgtgcatggttcaatccctcacatccaggaaatgaattttgcaattgggccagatgctaatttgcacgttgattcaccttctttgcctttaagccttttttttcttttttttttttttggcaaatgaatgtaccatttcaactttgattttaatagtgctagttgatattggtaataatgctaaccaagagatcaatgccagatttttctcttggggtaagttagctgaagtcatttaaagatggaaaggtgggaaaattctttgatatttgatgtcattgtatccacatttgttgtaagacatattgcataccaattataattatatcaattaaagttgataaaagcttccaaaaaaaaaaaaaaaa

SEQ ID NO: 4022 - DNA, 4417 bp, Homo Sapiens
  NM_015394
gactcacctctgacgccgctcttcgcgctccgctggtgaatggagtcgcgttctctgttttgctgttgctgctgcctttgtgacgggatcgctttctcccatcgaaccttctagttgcttattgcagctttgtctcctcagcactctgctgtcactcaaggaagtatcatcaagaacaaggagggcatggatgctaagtcactaactgcctggtcccggacactggtgaccttcaaggatgtatttgtggacttcaccagggaggagtggaagctgctggacactgctcagcagatcgtgtacagaaatgtgatgctggagaactataagaacctggtttccttgggttatcagcttactaagccagatgtgatcctccggttggagaagggagaagagccctggctggtggagagagaaattcaccaagagacccatcctgattcagagactgcatttgaaatcaaatcatcagtttccagcaggagcatttttaaagataagcaatcctgtgacattaaaatggaaggaatggcaaggaatgatctctggtatttgtcattagaagaagtctggaaatgtagagaccagttagacaagtatcaggaaaacccagagagacatttgaggcaagtggcattcacccaaaagaaagtacttactcaggagagagtctctgaaagtggtaaatatgggggaaactgtcttcttcctgctcagctagtactgagagagtatttccataaacgtgactcacatactaaaagtttaaaacatgatttagttcttaatggtcatcaggacagttgtgcaagtaacagtaatgaatgtggtcaaactttctgtcaaaacattcaccttattcagtttgcaagaactcacacaggtgataaatcctacaaatgccctgataatgacaactctcttactcatggttcatctcttggtatatcaaagggcatacatagagagaaaccctatgaatgtaaggaatgtggaaaattcttcagctggcgctctaatcttactaggcatcagcttattcatactggagaaaaaccctatgagtgtaaagaatgtggaaagtctttcagccggagttctcacctcattggacatcaaaagacccatactggtgaggaaccctatgaatgtaaagaatgtggaaaatccttcagctggttctctcaccttgttactcatcagagaactcatacaggagacaaactgtacacatgtaatcagtgtgggaaatcttttgttcatagctctaggcttattagacaccagaggacacatactggagagaaaccctatgaatgtcctgaatgtgggaaatctttcagacagagcacacatctcattctgcatcagagaacccatgtgagagtgaggccctatgaatgcaatgaatgtggaaagtcttacagccagagatctcaccttgttgtgcatcatagaattcacactggactaaaaccttttgagtgtaaggattgtggaaaatgttttagtcgaagctctcacctttattcacatcaaagaacccacactggagagaaaccatatgagtgtcatgattgtggaaaatctttcagccagagttctgcccttattgtgcatcagaggatacacactggagagaaaccatatgaatgctgtcagtgtgggaaagccttcatccggaagaatgacctcattaagcaccagagaattcatgttggagaagagacctataaatgtaatcaatgtggcattatcttcagccagaactctccatttatagttcatcaaatagctcacactggagagcagttcttaacatgcaatcaatgtgggacagcgcttgttaatacctctaaccttattggataccagacaaatcatattagagaaaatgcttactaataaatatgggaatttttcacaaagagcaatgactttattttgcattggagaactcctggagataagctgtacaaattgaatctatgtggaaatgctttcagtcttgttactatcctattgcacattagagaattggtcctggaagggaaagaaaccacagattttatttcagtacacaaatccatcagattttcttcttttcatgaattcctacagaagtaattggcctgagagcattcttgaccaagtcttaaatgctagaatctgagaaggaattattaaataggtgagttgttgagcgagaaccccttcatttgaaaagaaatgagtatgctactatagggagagttgttgctgagaattaagaaatgatacagttaatgcaacaaaagatggaaaataatatttcagtcaatatgtcattgttttcttgactatgtctctcttctgggacatttagtagtgtttggtatgttttatgtgtctggtagaaaccatattttggttaacagcaagaaaaatgcttataatgtagtacaattaaaaacaacacatctccactaccagtgctaacccatttttaagtacatttgcatgtgggcaagaattgaaagtatacagataattgaacagaattgatttgttagataaggagattttgactgagttttatagtctgtttaatgttgctgtaataattattttaagaaacttttaaatattgtaagaggatatctagtttctctattctaccatcaaagaagcttttgagtaccacctgttaatgagctttcctattctaaattgttttgggtcacagagttccactttttccactcttattagcactgcaaaagctcctgagaatttaaaaacacagtaattctctggatgttaggacctaggggaacattgggcatttgaacatatcagggagggtccccattttagtgggaacaagtatttaaacaatatttagagcaagtgtcctcatgtgataaacagagcacagtccaaagataccctctttctcaaggtagtcttttatctttataaagaaagattagtgtttaagagcgtagacttgagctagactacccaggttgaaaccccactagctgggtgatcttgaacatgctgcttagcttctctgtgccaaacttactgatatcctcatctgtaaattagcgataataatagtacttacctggtaggattatggtgagtattaaatgagtaaatggaaacagcttagaatagtgcctgacatatattatgttctctgtagttactggctgtgattattaataatattgccgcaccctaatatctgttatttaattgaaatctgcttgtgtgcttataagaatttactgagttctcacttcccttacagtcatacatggtttttcccttttgcctaaatcagaactcaacagcctgggaaaatcactgacaaatagtggatataggtttcatttctgaggatcaataaacagcttgtaatgttgtatacacatttattctgtttgtacaaaggttttccattctatggagaggatcccagtcttcagattctctggtaagttaataacccacaaaagattcaggaagaggatctattttaattttctctttcattctataaatcagtctgttgtatatagggactgaccatgattctccattttctggcataaatattagctgctcaatgattgattgttgaatgatagatgaagtattgctgaagccaaccagagatcttgatctctctctgaggaaaaaacctagaaatgatggttagaatcaggagacttgagaactacgaggaacatggcagcctctagctcatacttgtcgttgtacaattgagatcaagtgaattggccccggtctcacattttcagtgaagtcagactcagaactaggtcctgggtttcatgtttcctgctgctcttctcactgtgtacacaccatgcccacatacaacatacctatcagaaatggttttcattaagggagtagaatagtcacttaactggggctcttaacattgctaataacctgtggctcaatttcctcaactgtataatgaggttactactagtatctacctcaaagcgttgtcatgtggattgagatgatatgtatgaatcacataaaagagtgcctggcacatagtaggtgccattaataatattactattgttaacaccttaagggtctaacttgtaatgaagacagaaatatgtatgaggatgatcactgaaatatttatgacagtgcataatttgcaaaataaaaaatgtacactagcataatatttgtggcatatccgtgtaatggaagattatgcaggcattaaaatatgtacacaaaaagtttggtaaaggaaaaatgctgtcatgtgttacaaaagcatgataaataattgttaatatggaataagctcaaatatgtcaaaataaatgtaaaaaatgagtgttgcccaaaaaaaaaaaaaaaa

SEQ ID NO: 4023 - DNA, 3688 bp, Homo Sapiens
  NM_015397
tttccgtggcgacgctatccgaagtgcggctgcgcaagggtgacggcgcgcgagcaagggggagggggtgttttggttctagccgctcgccgtccttgcaggctctgccgtcggaaagccgctcattctcgcttccccttccctttcccggctcaagtccttcctctctctttcctttctttccgcctatcttttttctgctgccgctccgggtccgggccattttccgggccgggcgcactaaggtgcgcggccccggggcccagtatatgacccgccgtcctgctatccttcgcttcccccgccccatgtggctgcggggccgcggcggcgctgcccactatggcccggaaagtagttagcaggaagcggaaagcgcccgcctcgccgggagctgggagcgacgctcagggcccgcagtttggctgggatcactcgcttcacaaaaggaaaagacttcctcctgtgaagagatccttagtatactacttgaagaaccgggaagtcaggctacagaatgaaaccagctactctcgagtgttgcatggttatgcagcacagcaacttcccagtctcctgaaggagagagagtttcaccttgggacccttaataaagtgtttgcatctcagtggttgaatcataggcaagtggtgtgtggcacaaaatgcaacacgctatttgtcgtagatgtccagacaagccagatcaccaagatccccattctgaaagaccgggagcctggaggtgtgacccagcagggctgtggtatccatgccatcgagctgaatccttctagaacactgctagccactggaggagacaaccccaacagtcttgccatctatcgactacctacgctggatcctgtgtgtgtaggagatgatggacacaaggactggatcttttccatcgcatggatcagcgacactatggcagtgtctggctcacgtgatggttctatgggactctgggaggtgacagatgatgttttgaccaaaagtgatgcgagacacaatgtgtcacgggtccctgtgtatgcacacatcactcacaaggccttaaaggacatccccaaagaagacacaaaccctgacaactgcaaggttcgggctctggccttcaacaacaagaacaaggaactgggagcagtgtctctggatggctactttcatctctggaaggctgaaaatacactatctaagctcctctccaccaaactgccatattgccgtgagaatgtgtgtctggcttatggtagtgaatggtcagtttatgcagtgggctcccaagctcatgtctccttcttggatccacggcagccatcatacaacgtcaagtctgtctgttccagggagcgaggcagtggaatccggtcagtgagtttctacgagcacatcatcactgtgggaacagggcagggctccctgctgttctatgacatccgagctcagagatttctggaagagaggctctcagcttgttatgggtccaagcccagactagcaggggagaatctgaaactaaccactggcaaaggctggctgaatcatgatgaaacctggaggaattacttttcagacattgacttcttccccaatgctgtttacacccactgctacgactcgtctggaacgaaactctttgtggcaggaggtcccctcccttcagggctccatggaaactatgctgggctctggagttaatgacaactccccaaatgcagagatttacactaacttccattctcagtttccttgtttcttttgattttttttttcctaattgtgtgaggctcttgtgttttagtgggaacaccaaagtttgcctatagtttaggcacttaataggaagaagctctgtacagaaatctgaaagttgttttgctttttgttttcccctttggtaatcaaaattttactatcttttattatttctggcttttcaaccaaacattgttgctaatccctatttttctttaagtgacacacattctcctgtctctggcttcttcaggctgaaatgacatagctcacccttacttcactcttgagaggtagggctcctttataattacatggttgctctcagactttctgtgaaagtttgggagctgtgtgtgtctgtgtgtgtgtgagagagagatcttgtctgcgtgtgtgtgtgtgatcttgtgtgcctgtaggtactgtgtgtcactgaaattacctggagtgaggattacttgtaattaaaatatttataaaagaaacaactttattcacagagtccagctttgggactagtctgtatcttgttttttaagtctaacaacactgataataggaagtaaaaacagaaaggaaaagaaattaccactgggaaaatctttttagttagattgtaggcttcctggggcctcccatgccaggactgcaaagtgatccagccctacctgtcttcccacctgtgtgtcccccgtgtgggaagttggtgtcacttccccttcccaccctcacatctgcttagccagtagccacacccctaaaacatcagactcaccatccaggtgcagctccagaggctacaaaaggcttcatgggacttgaatccccatcctagcttctctctccttcccctcaagacctgatctggttttaaggggcctggagctgggagtctcaagtctgctaagattcacatccatagcccccatggctttgaggagaatcctctctgccattcttccaatctccccagtgggttttgctattattttctaaattgggttaagtctaagaaggtgggggtgagcagggggtttatctgtgtgtagtgagtgcttcatgtgtggaatattcattttcttactgcagtgggacttggggttgaagccacccctcctactctgttggcttagccctgagatggtgacaggctggcctgcagtcagcatcattgtgcatgtgacagcatcaatgtgattagtaatttgtctgttcctcccttgaactgtctgtttagtctgaggtttttaaacttgcaggcagctgactgtgatgtccacttgttccctgatttttacacatcatgtcaaagataacagctgttcccacccaccagttcctctaagcacatactctgcttttctgtcaacatcccattttggggaaaggaaaagtcatatttattcctgcaccccagttttttaacttgttctcccagttgtccccctcttctctgggtgtaagaagggaaattggaaaaaaaattatatatatattctccttttaatggtggggggctactggagaggagagacagcaagtccaccctaacttgttacacagcacataccacaggttctggaattctcatcttcgaacctagagaaataggtgctataaacagggaattaagcaaaatgctggatgctatagatcttttaattgtcttaattttttttctattattaaactacaggctgtagatttcttagttctcacagaacttctatcattttaaactgacttgtatatttaaaaaaaaaatcttcagtaggatgttttgtactattgctagaccctcttctgtaatgggtaatgcgtttgattgtttgagattttctgtttttaaaaatgtagcacttgactttttgccaaggaaaaaaataaaaattattccagtgcacaataaaaaaaaaaaaaaaaa

SEQ ID NO: 4024 - DNA, 4079 bp, Homo Sapiens
  NM_015404
ctcaacagttcgcaaagtccgggcttgcggccgggcggcgcagaggcgcggaggctccccgggcggctgcatcccggggctgccccggacatgccccgcaccccttgtcggacgcccgcgccgcttcaccggctgccactccccggagtgctctgggactagagcgccctccgccccaacttctgactttggggtcccccagccctagaggaacgggcgcccggctgggggagccccgggcatggtgtgacggggcagtcaggtcagctttgcggcgcccccaaactccagccacccgtcgtctccgtgccctccagaatgtagctgctgaccccgcgccccccggactccagcagcagtctccgccacctccgggctccagcagccaactcttgtgtctctcaggaacccgccgacgtctccgcgtcccccggattccaggttcgcgacccccgccgtcttcgcgcctccgggactctagcagcggtctccgcgaccccctaggatccagccactgtacccgtgctccccaaacccaggctccagccgtcgtctccgcgctcccggggatccagctgtcgcgccagtacccgcgaggacagcggcaccgcccacaccccgcgcgctcagagcccggccgggcctcggcgtggagatgaacgcgccgctggacggcctgtcggtgagctcgtcctccaccggctcgctgggctcggcggccggggcgggcggcggcgggggcgcggggctgcggttactgtctgccaacgtgcgccagctgcaccaagcgctgaccgcgctgctgagcgaggcggagcgggagcagttcacccactgcctgaacgcttaccacgcgcgccgcaacgtcttcgacctggtgcgcaccctgcgcgtgctgctggacagtccggtcaagcggcgcctgctgcccatgcttcgtctggtcatcccgcgctccgaccagctgctcttcgaccaatacacggccgagggcctctacctgcccgccaccaccccctacaggcagcccgcctggggcggccccgacagcgcggggccaggggaggtgcgcctggtgagtttgcggcgtgccaaggcccacgagggcttgggcttcagcatccgtgggggctcggagcacggcgtgggcatctacgtgtctctggtggaaccaggctctctagctgagaaggaaggactgcgggtcggggaccagattctgcgcgtcaacgacaaatccctggcccgggtgacccacgcggaggccgtcaaggctctgaagggctccaagaagctggtgctgtctgtgtactcagcagggcgcatccctgggggctacgtcaccaaccacatctacacctgggtggacccgcagggccgcagcatctccccaccctcgggcctgccccagccccacggtggtgccctgaggcagcaggagggtgaccggaggagcaccctgcacctcctgcaaggaggggatgagaaaaaggtgaacctggtgctgggggacggccggtccctgggcctcacgatccgtgggggagctgagtacggccttggcatttacatcactggcgtggacccaggctctgaagcagaaggcagcgggctcaaggttggggaccagattctagaagtgaatgggcggagctttctcaacatcctacacgacgaggctgtcaggctgcttaagtcatctcggcacctcatcctgacagtgaaggacgtcgggaggctgccccatgcccgcaccactgtggacgagaccaagtggatcgccagttcccggatcagggagaccatggcgaactcggcagggtttcttggcgatctcacaacagaaggaataaacaagccaggattttacaagggcccagccggctcccaggtgaccctgagcagcctggggaaccagacacgagtgctgctggaggagcaggctcggcacctgctgaacgagcaggaacacgccaccatggcctactacctggatgagtaccgtggtggcagcgtctctgtggaggccctcgtcatggccctgttcaagctgctcaacacccacgccaagttctcactcctctctgaggtgagaggcaccatttccccgcaagacctagaacgcttcgaccacctggtgctgaggcgtgagattgagtccatgaaggcgcggcagcccccaggccccggggctggggacacctactccatggtctcctacagtgacacgggttcatccacaggcagccacggcacctccaccaccgtcagctcggccaggaacactctggacctggaggaaactggcgaggctgtccagggcaatatcaacgccctcccagatgtgtccgtggatgatgtcagatccacctcccaggggctgtcaagcttcaagccactgcctcgcccaccacctctggcccaaggcaacgacctcccactaggccagccaaggaagctggggagagaggacctccagccaccttcctccatgccttcctgctcgggcactgtcttctcggctccacagaaccgcagcccgccagcgggcaccgcacccaccccagggacctcctctgcacaggacttgccctcttcccccatctatgcctccgtctcccctgccaaccccagctccaagaggccgctggacgcccatctggccctggtcaaccaacaccccatcggccccttcccacgggtccagtcacccccgcacctgaaaagcccctctgcagaggccacagtggctgggggctgccttctgcccccatcaccctctggccacccagaccagacaggcacaaaccagcactttgtcatggtggaggtccaccgccccgacagcgagccagacgtcaatgaagtgagggcgctgccccagacgcgcacagcctctacgctctcccagctctcggacagcgggcagactctaagcgaggacagtggtgtggatgctggcgaggcagaggccagcgccccaggccgaggaaggcagtcggtgtccaccaagagcaggagtagcaaggagctgcctcggaacgagaggcccacagatggggccaacaaaccgcctggacttctggagcccacgtccactctggtccgtgtgaagaaaagtgcggccaccctgggcatcgccatcgagggtggcgccaacacccgccagcccctgcctaggattgtcactattcagagaggcggctcagctcacaactgtgggcagctcaaggtgggccacgtgattctggaagtgaatgggctgacgcttcggggcaaggagcaccgggaggccgcccgcattatcgccgaggccttcaagactaaggaccgtgactacattgactttctggtcactgagttcaatgtgatgctctagaggccaaggcctgagggcctcccaccactgcccagcccctggtcccagtccctttccaccgttggcttcatcaagctccttgcggggttggggctgcatggccagggtggcaggaagacatcccccctccatcccagcccactggaccagaactgggagaggaagagagcaggacaaggcagacagaaggtcaggtcaggaactggtgctgtactgggtacacagtaggcgcccaggacaagtgggttgcaagacaggaagaaaggaaaaggaagggcagagtgctggtttctccaggttgggttgggggcactgctgtcccccctccagctaggacccagcccatccccagatgcctgagcctttgtccaaagtgaggtcactcgagaattcatggacacggcccccagtcagggggcatcttgcaagacctttagtgccacaaataagcatcgagcacctccccattcacacccccattcctcctggctccttatcccccatggtgtttattatttatttccctccccatgcccctggggaccccaaggccccagcttccctctgcacccccagcctatcccagaggccttgcaggtgaccagcagtgtcattgtatttatatacagagcttatgactttaatttttcaataaagaaatctgaacaaggttaaaaaaaaaaaaaaaaaaaaaaaaaaa

SEQ ID NO: 4025 - DNA, 1118 bp, Homo Sapiens
  NM_015407
ctcggtaactgggttgcaggcccgcggctgcggagtgcgcaggcgcgccgagatggccgcgctcctggccgcctagagccggagcggcccgcggagctgcggaggcagccatggtcggggcgctgtgcggctgctggttccgcctgggcggggcccgcccgctcatcccgttgggcccgactgtggtacagacctccatgagccggtcccaggtagccctgctgggcctgagtctgctgctcatgctcctactgtatgtggggctgccaggcccccctgagcagacttcctgcctctggggagaccccaatgtcacagtcctggctggtctcacccctggcaactcgcccatcttttaccgcgaggtgctcccactcaaccaggcacacagggtggaggtggtgctgcttcatggaaaggcctttaactctcacacgtgggagcagctgggcacactgcagctactgtcacagaggggctaccgggccgtggcccttgaccttccaggttttgggaactcggcaccttcaaaggaggcaagcacagaggcagggcgggcagcgctgctggagcgggcgctgcgggacctggaggtacagaatgccgtgttggtgagcccctcgctgagtggccactatgccctgcccttcctgatgcgaggccaccaccagctacatggatttgtgcccatcgcacccacctccacccagaactacacccaggagcaattctgggctgtgaagactccaacccttatcctgtatggagagctggaccacatcctggctcgagagtcactgcggcagctccgccacctgcccaaccactctgtggtgaagctacgcaatgcaggccatgcctgttacctccacaagccgcaagacttccaccttgtcctgcttgccttccttgaccatctaccttgaactaacccactcccagctcccagcctggcatgagcttggacagtctggaccgccaccctccctgaaccagggagacagcctctgggattggaggccagaggccagggtcagacccagccaggactcctcatttcatctcacagacacaataaaaaagcatatttgtcctgcctgggaagtgaaaaaaaaaaa

SEQ ID NO: 4026 - DNA, 12265 bp, Homo Sapiens
  NM_015409
cactgagcggctgcggcgcggcttccatcctcccgccctcctgacgcggccggagcgcagccctgaggcccagggagaacgacacattggatacagaagggaggtgatcatgcaccatggcactggcccccagaacgtccagcatcagctgcagaggtccagggcctgccctggcagcgagggtgaggagcagccggcccaccccaacccacccccgtcccccgcagctcccttcgctccctcagcaagcccgtcggcaccccagtctcccagttatcaaatacagcagctgatgaataggagccctgcaaccgggcagaacgtgaacatcaccctgcagagcgtgggccctgtcgtcgggggaaaccagcagatcacactggccccactgccgctccccagccccacctctccaggcttccagttcagcgctcagcctcggcggtttgagcatgggtctccatcatacattcaggtcacgtcccccttgtcccagcaggtccagacccagagtcccacgcagcccagtccggggccggggcaggccttgcagaatgtgcgtgcaggtgcccctggccctgggctgggcctctgcagcagcagccctacagggggcttcgtggatgccagcgtgctggtgaggcagatcagcttgagcccctccagtggtggacactttgtgtttcaggatgggtcagggctcacccagatcgcccagggagcccaggttcagctccagcacccgggtacgcccatcacagtccgagagcggagaccctcccagccccacacacagtcagggggcaccatccaccacctgggaccccagagccctgcagccgcgggtggggccggcctgcagcccctggccagcccaagccacatcaccacggctaacttgccaccgcagatcagcagcatcatccagggccagctggttcagcagcagcaggtgctgcaggggccgccgctgccccggcccctgggcttcgagaggacacccggcgtgctgctccccggggctgggggcgcagcggggtttgggatgacgtccccacccccgcccaccagcccttccaggactgccgtgcccccaggcctttccagcctcccactcacgtctgtggggaacacgggaatgaagaaggttcccaagaagttagaggagattcccccagcctctccggagatggcacagatgaggaagcagtgcctggactatcattaccaggagatgcaggctctgaaggaggtcttcaaggagtatttgattgaactgtttttcttgcaacactttcaagggaacatgatggatttcttagctttcaagaagaaacattatgccccattacaagcatatcttaggcagaatgatttggacattgaagaagaggaggaggaggaggaagaggaggaagaaaaatctgaggttatcaatgacgagcaagccctcgcagggagcctggtagcaggggccggaagcacagtagagacggacctgtttaagaggcagcaggcgatgccctccacaggtatggcagagcagtctaagaggcctcgccttgaagtgggtcaccaaggggtagttttccagcacccaggggcggacgcaggcgttcctctccagcaactaatgccgaccgcacaaggaggaatgccccccacgccgcaggccgcgcagctcgctggacagaggcagagtcagcagcagtatgacccctccacggggcctcccgtgcagaacgctgccagcttgcacaccccactgccgcagctgcccgggaggctgcccccagccggtgttcccactgcagccctctcctctgcgctgcagtttgcacagcagccgcaagtggtagaggcccagacacagctccaaatcccggtgaagactcagcagcccaatgttcccatccctgcaccgcccagcagccaactccccatccctccctcgcagcctgcacagctggccctccacgttcccacacctggaaaggtgcaggtgcaggcctctcagctttcctccctgccacagatggtagcatcgacaaggctccctgtggaccctgccccgccctgcccacggcctctgcccacctcttctacctcgtccctcgcgcctgtgagtggctccggcccaggaccctcccctgctcgatcctctccagtaaatagaccttcctcagccaccaataaggcactatctccagtcacttcccggaccccaggggtggtggcatctgcccccaccaaaccacagagtcctgctcagaatgccacctcgtcccaagacagttctcaggatacgctgacagaacaaataactctggagaaccaggtgcatcagcgcattgcggagctgaggaaagcaggtctgtggtcccagaggcgtctgccaaagctgcaggaggccccacgccccaagtcccactgggactatctgctggaggagatgcagtggatggccacagactttgcccaggagaggaggtggaaggtggctgctgcgaagaagctcgttagaactgtggtgcgccatcacgaggagaagcagctccgtgaagaaagggggaagaaggaagagcagagcagactgaggcggatagccgcctccacggcccgggagatagagtgcttttggtcgaatattgaacaggttgtggaaataaaactacgagtagaattagaagaaaaaaggaagaaggccttaaatttacagaaagtttccaggagagggaaagaattgagacctaaaggatttgacgcattacaggaaagttctctggattcaggaatgtctggaagaaaaagaaaagctagcatatctttgactgatgacgaagtggacgatgaagaggaaacaattgaagaggaggaagcaaatgaaggcgttgtggaccaccaaacagaactttctaatttagccaaggaagctgagctgcccctcctggacctgatgaagctgtacgaaggcgccttcctgccgagttctcagtggccccggccgaagcctgatggggaggacacaagcggagaggaagatgcagatgactgtccaggcgacagggagagtcgcaaggacttggttctcatcgactcgcttttcatcatggatcagttcaaagctgccgagaggatgaatatcgggaagccaaacgccaaggacattgcggacgtcactgcggtggctgaagccatcctgccgaagggcagtgctcgggtcacaacctcggtcaagtttaatgctccatctttgttgtatggggctctcagagattatcagaagattggcctggactggctggccaaactttacaggaagaatctcaatggcatattggcagatgaagctgggctgggtaaaacagtgcagatcattgctttttttgcccacctagcttgtaacgaaggtaattggggcccccatcttgttgttgtgagaagttgtaacatactcaagtgggagcttgaattgaaacgttggtgtcccggactcaaaatcctctcatatattggcagccacagagaactcaaagcaaagagacaggagtgggccgaacccaacagcttccacgtctgcatcacgtcctacactcagttcttccggggcctcaccgccttcacacgagtgcgctggaagtgcctggtcattgatgagatgcagcgcgtgaagggcatgaccgagaggcactgggaagcggttttcaccctgcagagccaacaacgtctgcttctgatcgactcgccgctgcacaataccttcctggagctctggaccatggtgcacttcctggtcccagggatctccaggccctacctgagctcccctctgagggcccccagtgaagagagccaggattactaccataaagtggtcataaggttacacagggtgacacagccatttattttgaggagaactaagagagatgtggaaaagcaactaacaaagaaatatgagcatgttttgaagtgtcgcctttctaaccgacaaaaagccttatacgaggacgttatcctgcaacctggcactcaggaggccttgaagagcgggcactttgtcaacgtcctgagcatccttgtgcggctgcagcgcatctgcaaccaccctgggctcgtcgagccccggcacccaggctcttcctacgtggcggggccactggagtatccgtccgcatctctaatcctgaaggcactggagagagatttctggaaggaagcagatctttctatgtttgatctcatcggcttagaaaataaaatcactcgtcacgaggcagagttgctgtctaagaaaaagataccgcggaaactcatggaggaaatctccacttcagcagccccagcagcccgaccagcagcagcaaagctgaaggccagcaggttgtttcagcctgtgcagtatggccagaagcccgagggtcgcaccgtggctttccccagcactcacccgccccggacggcagcccccaccacggcctctgctgctccacagggcccgcttcgaggacggccgcccatcgccacgttctctgccaatccggaggcaaaagcagcagcagccccgtttcagacctctcaggcttccgccagtgctccacgacaccagcccgcctcggcctccagcacagccgctagcccggcccatcctgcgaaactgcgggcccagaccacagcacaggcctccaccccaggccagcccccgccccagccccaggccccctcgcacgcggccgggcagagcgcgctgcctcagaggctggtgctcccctcgcaggcccaggcccgcttgcccagtggagaggtagtgaaaatagctcagctggcatccatcacaggaccacagagccgcgtggctcagccagagacgccggtgacactgcagttccagggcagcaagttcaccctgtcacacagccagctccggcagctcacagcgggccagccgctgcagctgcaaggcagcgtcctccagatcgtgtccgcccccgggcagccctaccttcgagcccctggccctgtggtgatgcagaccgtgtctcaggcgggcgctgtgcacggcgccctgggaagcaagcccccggccggcggtcccagccctgcacccttgaccccacaagttggcgttccgggccgcgtggcggtgaatgccttggctgtaggagaacccggaacggcctccaaaccagcttctcccattggagggccgacccaggaggaaaagaccagactcttgaaagagcgcctggatcagatttatttagtcaacgagcggcgctgttctcaagctccagtctatggcagagacttgctaaggatttgtgccctgcctagccatggaagggtacagtggcgtgggtccctggatggccgtcgtgggaaggaggccgggccagcgcacagttacacttcatcctcagaaagtccaagtgagctgatgttgacgctttgtcggtgtggagagtctctgcaggatgttattgacagggtggcctttgtgattcctccggtggtggcagcacccccgtccctacgggtgccgcggccgccacccctgtacagccacagaatgaggatcttgaggcagggcctgagagagcacgctgcgccgtacttccagcagctgcggcagaccacggctccacgcctgctgcagttccctgagctgaggctggtgcagttcgactcagggaagttggaagctttagctatcttgcttcagaaattgaaatctgaaggacgtcgggtgctgattttatcacagatgattcttatgttggacattttagagatgttcttgaacttccattacctcacctatgtaagaatcgatgaaaatgccagcagtgagcaacggcaggaactgatgaggagtttcaacagagacaggcggattttttgtgccattctctccactcacagccgtaccacaggtataaaccttgtagaggcggacaccgtcgtgttttatgacaatgacctgaatccagtgatggatgccaaagctcaggagtggtgcgataggatcgggagatgcaaagacatccacatatacaggcttgtgagtggcaattccattgaagagaaattgttgaaaaatggaactaaagatctgatccgagaagtggctgctcagggaaatgactactccatggctttcttaactcagcgaaccatccaggagctgtttgaagtttattctcccatggatgatgctggcttcccggtcaaagctgaggagtttgtggtgctttctcaggaaccttctgtcacggaaaccattgcacccaaaattgcaagacctttcatagaggccctcaagagtattgagtatctggaggaggatgcccagaagtccgcacaggagggggtgctgggaccacacactgatgctctgtcatcagactctgagaacatgccgtgtgatgaagaaccatcccaattagaggagctagctgacttcatggagcagcttacaccaattgaaaaatatgctttaaattacctggaattattccatacttctattgagcaagaaaaggagagaaacagtgaggacgcagtgatgactgcagtgagggcatgggagttctggaacctgaagaccctgcaggagagggaggcccggctgcggctggagcaggaggaggcggagctcctgacctacacgcgagaggatgcctacagcatggagtatgtctacgaagatgtcgatgggcagacagaagtcatgccgctctggaccccacccaccccgccgcaggacgacagcgacatctacctcgactcggtcatgtgtctcatgtatgaagccactcccatcccagaggctaagctgccccctgtgtacgtgaggaaggagcggaagcgacacaaaacagacccctcagctgcaggcaggaagaagaagcagcgtcacggggaggcggtcgtccctcctcggtccctgtttgaccgcgcaacaccaggacttctgaaaattcgcagagagggcaaggagcagaagaagaatattctgctgaagcagcaggtgccattcgccaagcccctgccaacttttgccaaacccacagctgagcctggtcaagacaaccccgagtggctcatcagtgaggactgggcgctgctgcaggctgtaaagcagttactggagctgcctttgaacctcacaatcgtgtcacctgctcacacacctaattgggatcttgtcagtgacgttgttaactcctgtagccgaatctaccgctcttccaaacagtgccggaatcgctacgagaatgtcatcattccacgagaggaggggaagagtaaaaacaaccgtcctctccgtacgagccagatctatgcccaggatgagaatgccacacacacccagctgtacacgagccactttgacttaatgaaaatgactgctggcaagaggagtcccccaatcaaacctctgcttggcatgaatccctttcagaagaaccccaagcacgcgtctgtgttggcagaaagtggaatcaactatgacaagccgctgcctcccatccaggtggcatctctccgtgcagagcgaatcgcaaaagagaaaaaggctctggctgatcagcagaaggcacagcagccggccgtggcccagccacccccgccccagccgcagcccccaccacccccgcagcagccaccgccaccgctgccacaaccacaggcagcgggcagccagccgccagcagggccaccagctgtccagccccaaccccagccacagccccagacccagccacagcctgtgcaggccccagcgaaggcgcagcccgcaatcacgacggggggcagtgcagccgtactggcaggaaccattaaaacatcagttactgggacgagcatgcccactggtgccgtgagtggaaatgtgatcgtgaacaccatcgcaggggtcccagctgccaccttccagtccatcaacaagcgcctggcgtcgccagtggctcctggggccttgactacgccgggaggctctgctcccgcccaggtggtgcacacccagcccccgccacgggcagtcggctccccagccacggcgacccctgacctggtgtccatggcaacgactcagggtgttcgagcggtcacttctgtgacagcctcggccgtggtcactaccaacctgaccccagtgcagaccccggcacggtctttggtgccccaagtgtcccaagccacaggagttcagctccctggaaaaaccatcacacctgcacatttccagcttctcaggcagcagcagcagcagcagcaacaacagcagcagcagcagcagcagcagcagcagcagcagcagcagcaacagcagcagcagcaacagacgacgacgacctctcaggtgcaagttccacagatccagggccaggcccagtccccagcacagatcaaagctgtgggcaagctgacgccggaacacctcatcaaaatgcagaagcagaaactgcagatgcccccgcagcccccaccgccacaggcccagtctgcgcccccgcagccaacagcccaagtgcaagtgcagacctcgcagccgccgcagcagcagagcccccagctcacgacggtcacggccccaaggcctggtgccctgctgacgggcaccaccgtggccaacctccaggtggcccggctcacccgggttcccacttctcagctgcaggcgcaagggcagatgcagacccaggcaccccagccagcccaggtggccttggcgaagcctccggtggtgtccgtcccggcagctgtggtctcctcaccgggagtcaccaccctgcccatgaacgtcgcggggatcagcgtggcgatcggtcagccacagaaggcagcaggacagaccgtggtggcccagcccgtgcacatgcagcagctgctgaagctgaagcagcaggccgtccagcagcagaaggccatccagccccaggctgcacagggcccggcagccgtccagcagaagatcaccgcacagcagatcaccacccctggcgcgcagcagaaggttgcctacgccgcgcagccggcccttaagacccagtttcttaccacacccatctcccaggcccagaaactggccggggcccagcaagtgcagacccagatccaggttgcaaaacttcctcaagttgttcaacagcaaacacccgtggccagcatccagcaagttgcctctgcttcccagcaggcttctccacagactgtggcgctcacgcaggcgacggcggccgggcagcaggtgcagatgatccctgcagtgaccgcgactgcccaggtggttcagcagaaactcattcagcagcaggtggtgaccacggcgtcggccccgctccagactccaggcgctcccaacccagcccaggtgcccgccagctccgacagcccaagccagcagcccaagttacagatgagggtccctgctgtcaggctaaagacacctactaagcctccgtgccagtagtcagggcagcagggctgcctctcatctaaagcaaaactaccttcctcacagaaaacgctttattagtgaaccttgggaccatgtcacgcaagagattcagcactgggaaagatataattgaaacaaaatagtgtaatcattttattaaaatgcatcccacactgcaggacaaatggtccttatggagtgccgcgttctctgtactacgtggctcatggaaaaagtgacaacatggcttcctctaaatcatttcacctttcagtccccacccgcacccgtcccctagagccatagtactgtgttctgaaagccatttagaatttctttgtgagcatgtagtgctttgcacgccacagaagccgtctgccgtgtgtgaggagcatacaatggactttctaaagataaggcgtgggcttccacagtgtctgccagagtttagttctttataccttactgaaaaatgcctcgtggtcttcgcagaggggaaggcctgtctaaagtcaatcatccgagatgggttttccattccaaagaaaggcaatatggttccttccttccctcctaaaatatgacttaacttttaagagaaatgttctgacacccacctaaacacacaaggcacgttcctggcctgtgttcaagggaaatgatcagtcattgcattgttattccaaagagcagccaacagtggcctcccccaggccctaccctgcaatgggattcgctttcatttaatggaaacttctgggactgatgcccaactcagtgcactcaagacgcatctccagttttcgggggaagctggtatttgacatagtgtgttaaacagctcctgagaacctttgggacactctgccatggctggcgtgaggcccagaggaccacgcagaggcaatggtagtacagatgtcacagctgagggtacgatgaggcctgggctcagtgagccaggacgaatgtgacagacaccccttgctgccacagtcagccctttgacgaaggtgggctggtgattctggaagtattggctatagcggtgggcccagtcaactcttccttgtggacttacgacagcagattttctctaggataagcttgtgtggttctgccagtgaagcagagaaccacctgtgctgttgtggaaggcgtgccgttgagggggaaaacgaagcccagtatttgctactgtttttcctttttttactatgacaggaaaataaatgcaattttagtggaattgattgacagtgtctccttactttgaagttttcaccaaagcaaaaaggtccatatccaatagtatcctttgtgctgtggcttgattttggcctattttacattatttggtccaggaaattaggttatattaggttttttgtatactaaaaatcagttatggcacaataaagattttctgtttttaaattgtatttcatctgcttcctccccattctctcactttaagtgacattgaggaaggtattctgtcccacaggtttctgtggacagcgatacagcaggagtcagtgaaatcaactggggagctcacttgagctcttgataagaaatgtggagaaaagtaaaaaccaagctttgaagaaacagaagaaattaatcttttagttagttgaacataccaaagcagaggactggaatctgtttgttctaaccaacccgttctccctggcttggcacgtgccgtgagagcgcagcttgccggagggagggccgctgtgtgcgcctcacatctggctcccagtggaaacttttactcctcctcatccgcagatgtgatagaactgaagtatctaggaattctgcctttgtcatttgttttaatttgtgtgccctgttcattttttttgtctttcccaaatcttggtagtctccttatagttgaagataaaatgttgagtgcacttattttagaatatcctagacataactgtctaagtaaaagcgctctattaatctaaaacactacaagagaatttaacaccatctctcaaatgcttttttggagagcttaatgggattctgaatatttgcaatgtggagtttccgccccgatctcacgtcagtgagggtctcctgtctctcaagtgtgtttcctttggctgttccctaatacaaaacacggacatatttttactcgtagcactcaatttagtaacttctagatgctaccgttgacctgagttaaattcatttagtcgtgtacgtaaaaactctccttttagtgtgttattttcttggccttcccttttaaaggttaaagtttctaacctaagaattaagtacgcgttcaggaagctgttgtctaggccttccccttgtgaatctgggttcattccaatacggcaagtaagagttggaaactttgagaacacagactataaaggcagcagcccgaacactgtcagactctaattggcgaccctgggaaacagttgccctgctattctttaaagaaagacgtttattctgatgataaaaacagttagccagactgtttttaaagcacctggcgggaagcagaaggttggatccaagcccttgttcagatttggtgcctgataagacaggggtttctctttttgtgacctttattattattattttgttaactgttgtaaccagttagctgttgtgttttaagatagaaaggaacaagactaaaattgtaaatactttgtaaacatcagcatttgtacttgaatagtaggattttaaagggcattgatagcataccaaacaaaaggcaaaataaagtgacctttttatata

SEQ ID NO: 4027 - DNA, 808 bp, Homo Sapiens
  NM_015415
acagcgggcagggaaagccgcgggaagggtactccaggcgagaggcggacgcgagtcgtcgtggcaggaaaagtgactagctccccttcgttgtcagccagggacgagaacacagccacgctcccacccggctgccaacgatccctcggcggcgatgtcggccgccggtgcccgaggcctgcgggccacctaccaccggctcctcgataaagtggagctgatgctgcccgagaaattgaggccgttgtacaaccatccagcaggtcccagaacagttttcttctgggctccaattatgaaatgggggttggtgtgtgctggattggctgatatggccagacctgcagaaaaacttagcacagctcaatctgctgttttgatggctacagggtttatttggtcaagatactcacttgtaattattccaaaaaattggagtctgtttgctgttaatttctttgtgggggcagcaggagcctctcagctttttcgtatttggagatataaccaagaactaaaagctaaagcacacaaataaaagagttcctgatcacctgaacaatctagatgtggacaaaaccattgggacctagtttattatttggttattgataaagcaaagctaactgtgtgtttagaaggcactgtaactggtagctagttcttgattcaatagaaaaatgcagcaaacttttaataacagtctctctacatgacttaaggaacttatctatggatattagtaacatttttctaccatttgtccgtaataaaccatacttgctcgtaaaaaaaaaaaaaaaaaaaa

SEQ ID NO: 4028 - DNA, 2133 bp, Homo Sapiens
  NM_015416
acggttaactttgacccaaagacaacctcttctctcccgcttctctcgctgtgaagatggcgctctccagggtgtgctgggctcggtcggctgtgtggggctcggcagtcacccctggacattttgtcacccggaggctgcaacttggtcgctctggcctggcttggggggcccctcggtcttcaaagcttcacctttctccaaaggcagatgtgaagaacttgatgtcttatgtggtaaccaagacaaaagcgattaatgggaaataccatcgtttcttgggtcgtcatttcccccgcttctatgtcctgtacacaatcttcatgaaaggattgcagatgttatgggctgatgccaaaaaggctagaagaataaagacaaatatgtggaagcacaatataaagtttcatcaacttccataccgggagatggagcatttgagacagttccgccaagacgtcaccaagtgtcttttcctaggtattatttccattccaccttttgccaactacctggtcttcttgctaatgtacctgtttcccaggcaactactgatcaggcatttctggaccccaaaacaacaaactgatttcttagatatctatcatgctttccggaagcagtcccacccagaaattattagttatttagaaaaggtcatccctctcatttctgatgcaggactccggtggcgtctgacagatctgtgcaccaagatacagcgtggtacccacccagcaatacatgatatcttggctctgagagagtgtttctctaaccatcctctgggcatgaaccaactccaggctttgcacgtgaaagccttgagccgggccatgcttctcacatcttacctgcctcctcccttgttgagacatcgtttgaagactcatacaactgtgattcaccaactggacaaggctttggcaaagctggggattggccagctgactgctcaggaagtaaaatcggcttgttatctccgtggcctgaattctacgcatattggtgaagataggtgtcgaacttggctgggagaatggctgcagatttcctgcagcctgaaagaagctgagctgtctctcttgctgcacaacgtggtcctgctctccaccaactaccttgggacaaggcgctgaatgaaccatggagcggatggcattgtcctgcagtcgtatagtatagcagtgcaggaacaaacagcacttgccagcaaagtctgtgtgtactgttaagtgtgtgggaggcagagagaggagcaggggccatgggcttcacagcatggcacacatgtgggaactgcagacattcctctcacagctagaactgaaacaaaccctcttgctaggggtggtccgtgtgaggtgtcatcctgtccccctcataattactaatagctggaactggcagcagcctctactgggcttttactgtgatgtgttcagttcatgtcctaggaagtcagcttttgccccaggtgggaatccttatttggcttaggactgatccacttccatgttacttacatctgtgggtttttgttgttgctgttagaaaatttgtggctggtgaaaacagcactcctttggctggagcacttgtgtccgtgcatgtacttgggtgtttccctccatcctttctgatatgaccaaaaatcaagttgttttgttttttgtcaccttcactggcatgggctaaccacttctttttcaaaccctctgaacacctttttctgatgggtaacttgcaggaatattctattggaaaagataacaggaagtacaagtgcttcttgaccccttcctcaatgtttctagccttcactctccattgtcttttctgggctgtattacagccctctgtggatcttcaactctgctgcctccactgtgatgcagcagtccaactgtaactgacagtggctgccttctctgggccatggatcacacctgtaaggtactaattactgcccagcctggggagatcaggagaggtctgcatagttagtaagttgggtttagcttttgtgtgtgcatcagtgacttagagttctgtaataacttattgtaaatgcatgaagcactgtttttaaacccaagtaaagactgcttgaaacctgttgatggaaatgaa

SEQ ID NO: 4029 - DNA, 1465 bp, Homo Sapiens
  NM_015421
gtgggatttacttccggcagcaggtggtggggccatggctgcccttctccgagctgtgcgtaggtttcggggaaaagctgtgtgggaaaggcctctccatgggctgtggtgctgcagtgggcaggaggatcctaagaggtgggtgggcagcagttcacccatctcgaaggagaaactaccaaacgcagagactgagaaattctggatgttttaccgttttgatgccatcagaaccttcgggttcctgtcacgactgaagttggcacagactgccctgacagtggtagctttgccaccaggctattacttgtactcccagggcctcctcactctcaacaccgtgtgcctcatgagtgggatatcgggctttgccctgaccatgctgtgctggatgagctatttcttacggagactggttggtatcctgtatctgaatgagtctggcaccatgctgcgggtggcccatctgaacttctggggctggcggcaggacacatactgtcccatggcagatgtgattcccctgacagaaaccaaggaccggcctcaggagatgtttgtgcgtatccagcggtacagtgggaaacagaccttctacgtcaccctgcgctatggacgcatcctggacagagagcgtttcacacaggtgtttggggtacatcagatgctcaagtgaacaactgggacctggacctctgggtaaccctgggtcgcctggattaacaggaaggctgagggtgtgggcaaggctgaagaaaggggactgggtacttggagactttgcctgggcccctgggaacatgtgttttgtggtgaataaattcacaaggcaagagctggtgtacaggtttaggaaaaaggctctaagcaagttcttacagcacttgtttgtgacattcagtcagataatggccagaagtttttgttaagagccagttcttagaagaacctatgccaaggtcacccatagagtccattggtgtgaaagagaaaggcaaagaggtgtggcgggggagcgtaagatttggagtcagaagtctcagttctgtcatttgtcctggagcaggttattgagtctctttgaatcttggttttcacatctgtaaaatggaaagtcctgcttgtttcatgggatgggtgtgggaataaacaataaatgtcaaacgtgtggcagactcaacagcctacagcagatattattaagcatttggtcagaggttttagcagggagaaaggcttcgagcagtcagcagggacttccagagccctgtgctgtgcccctcacatatccagcggcagaagggtctgtcaggatgttaactacacattgacgagcagatgtcgtccaggtaggcacgaaaccccagttgagatttgttcaccacccagaggtctagaggctcttgctttggatggccctgcagtgtaataaagccaaatgcaccggaaaaaaaaaaaaaaaaaa

SEQ ID NO: 4030 - DNA, 2880 bp, Homo Sapiens
  NM_015423
gggggcgggctgggagggctgtcggtgggccagtctgcgtagcgacggcccgtcccctgcgcacggacgccgggaagaagggggtggggccacgtttgcgtccgcgccatcaggcccgagatagcggcgaggtccgctttcagtgtatggttttccctgccaaacggttctgcttggtgccatccatggagggcgtgcgctgggccttttcctgcggcacttggctgccgagccgagccgaatggctgctggcagtgcgatcgattcagcccgaggagaaggagcgcattggccagttcgtctttgcccgggacgctaaggcagccatggctggtcgtctgatgataaggaaattagttgcagagaaattgaatatcccttggaatcatattcgtttgcaaagaactgcaaaaggaaaaccagttcttgcaaaggactcatcgaatccttacccgaatttcaactttaacatctctcatcaaggagactatgcagtgcttgctgctgaacctgagctgcaagttggaattgatataatgaagactagttttccaggtcgtggttcaattccagaattctttcatattatgaaaagaaagtttaccaacaaagaatgggaaacaatcagaagctttaaggatgagtggactcagctggatatgttttataggaattgggcacttaaggaaagcttcataaaagccattggtgttggactaggatttgaattgcagcggcttgaatttgatctatctccattaaacttggatataggccaagtttataaagaaacacgtttattcctggatggagaggaagaaaaagaatgggcatttgaggaaagcaaaatagatgagcaccattttgttgcagttgctcttaggaaacccgatggatctagacatcaggatgttccatctcaggatgattccaaaccaacccagaggcaatttactattctcaactttaatgatttaatgtcatctgccgttcccatgacacctgaagatccttcattttgggactgtttttgcttcacagaagaaattccaatacgaaatggtacaaagtcatgatgattccctgagtaacaaagggaaatgaaaactgtttgtgatcttccgtattcactgaaaaataaatgcttgtttagtatcaaattttatttcacgaaagtttttttaaagaacagaaacttttccaattaaaaaaaaaaagcagacttctggttcaagatagctcactggaatacatgtttacctctttctttcctaaattgcattgaattgataggaaggatggcggaatcttaaagtgatacatgctaactgtagaaaaaaatagaaaatgcacataagcaaaaggaaacatttaaatgctatctttcaaagataactactcttaaaaccttgagtatcttttcagacctttttcttggcaaatgaatccatattgacatatttgatttttttaaaaacatggaaacgtactgttttgtaaattctttttaactgcacatctactgttcataaatatacctctgtaacataactttttgtggttctaatgtactctgttgtatagctaatacaagttaggatgcttttggccagaggtaacagtgtccaaatataattggcctaagtaacctaggaaattgtttgacataacacagggttcaggggtgtcattaaagacacactttttttgccttgacctcagttggtttgttttgccttaggctattccacctctcgatcacaagagctgctgctataacttccagttttacatctttgtaaaattgtatctcaaaggcagaaaaggccatttcgtctctcatttgttttatccatgaggaagatttttaacaaaagcctccagaagatttcccctcagtttccattgacttagatcaggttacagagaaaggcaatgtctgacatttttggtctctgttagaagtagactctgttgaaaagaaagaagctaagctaggtgtgaagaatggaattggaagcccactgccttcccataagaaaggtttaccataatttactcacttttttctgtgttagacattttgattatctgcagtttattactacaagcagtggcagagtgaatgtccttgtacattttgagttacatgcttaattatgtccttgagaaagtttctaaaagtggaatgattggtttgactggttcatagggctttaattatacaatttacccctctaattagtactatatgtatgtgacttccctccccctgccagaatactccttggtcaattgtaggtattctttttggtttaatttttgccaatgtaattaaaaaatggtatgtcatttttaaaatttgtatttctttcattacaaataagattgttatgtcagtattgttattggcttttcgtattcctcttaacgtgaaccgtctgttcattgtttttacctgttttcgttttagcaagtagtacttaatttaaagtgtgaacttaatatataagatgccaggaccatcatattgatgacaaaaatctattatgtggttgtagtgcatgtcttggagttaaactcttaagtatcaagaagtaaaataatttcattgtttctgttactaacattaaaagtgtgcaaattgtataaaattaggtacttcgattagtaaaagaaaaaaatttgaatgttttttttttttattttattaagcatgcccagttatgccaagcatagtaaataaaggtcaagtagcatttataatagaggaagtattgttatccctagcatgagtgtaatggtgatatgaaaaactttgtcttgtcattataataataaaaaaatgaacatttattatgaaaaaaaaaaaaaaaaaaa

SEQ ID NO: 4031 - DNA, 2213 bp, Homo Sapiens
  NM_015426
gggctggtggggtgaacccttcatcctgggtcttttaatttctcaggcggaacgagtggcggcggacagaggcttttggctgcgctgtctgtgggttgtctgggcttggggaactgggcacggagaccgtggcgccggccgccggtcatacagctctgcttccagtcgtcgggcaaaaagctgaggcgcttctcctttaattgcggtgggcggggcgtgccgacgcggcccgcgttgctattggtggccgttgggggcgcggaaactgaacgggccgcaacggccaccgcagctgccttcggcgccgccagccccgccatggctgcgccctgcgcggaggacccctcgctggaaaggcattttaagggccaccgagatgcagttacctgtgtggacttcagtatcaacacaaagcagctggccagtggctccatggactcatgcctcatggtctggcacatgaagccgcagtcacgcgcctaccgcttcactggccacaaggatgccgtcacctgtgtgaacttctctccttcgggacacctgcttgcttccggctcccgagacaagactgtccgcatctgggtacccaatgtcaaaggtgagtccactgtgtttcgtgcacacacagccacagtgaggagtgtccacttctgcagtgatggccagtccttcgtgacagcctctgacgacaagacagtcaaagtgtgggcaactcatcgccagaaattcctgttctccctgagccagcatatcaactgggtccgctgtgccaagttctcccccgacgggcggctcatcgtgtctgccagtgatgacaagactgttaagctgtgggacaagagcagccgggaatgtgtccactcgtattgtgagcatggcggctttgtcacctatgtggacttccaccccagtgggacgtgcattgccgctgccggcatggacaacacagtgaaggtgtgggacgtgcggactcaccggctgctgcagcattatcagttgcacagtgcagcagtgaacgggctctctttccacccgtcgggaaactacctgatcacagcctccagtgactcaaccctgaagatcctggacctgatggagggccggctgctctacacactccacgggcatcagggaccagccaccactgttgccttttcaagaacgggggagtattttgcttctggaggctctgatgaacaagtgatggtttggaagagtaactttgatattgttgatcatggagaagtcacgaaagtgccgaggcccccagccacactggccagctccatggggaatctgccagaagtggacttccctgtccccccaggcagaggcaggagtgtggagtctgtgcagagccagccccaggagcccgtgagtgtgccccagacactgactagcacgctggagcacattgtgggccagctggatgtcctcactcagacagtctccattctggagcagcggttgacactgacagaagacaagctgaagcagtgtctggagaaccagcagctaatcatgcagagagcaacaccatgatcaggggagcaggaatcaggagctcggtggatttgcaggtggcaggccagggatttgtaccatgggacttgggtaaataaaggggactgaactctgtgggaatcacatccatactggagccctggatttttgcagttctgccctccaccttgctatctgcaccaggaggctctccacctggcagccagaggtccccagtgggccgggctcacacacaaatgatgcttcagacccgaatgagaggaccacattttgcttaatgtaaaggagccacttgaaaatgtctgctccttcggggtcctgagattgtggctccccctctggaggaggtggctccacgatgccttgattttcactcatcatttggacatgtgactggcttttcctacctctgccatggtgtagaaattgattgcacattgattggatgagccgggggttttctctaaatctgactaaaggcccaaagtgggcccatctgagtcaggtttgttgagaacaagccctctcaagtgggtggtggcttttcagtggccctgatttctgttccacacgtgttcactggagccaggtgacttcctccttgcgtgagtgagggcacaggaatctcaaaattaaacctgacttcattgcacttgttgcaggagtggcttaaaaaaaaaaaaaaaaaa

SEQ ID NO: 4032 - DNA, 4711 bp, Homo Sapiens
  NM_015428
gggaaatagagtcctggcgctgccgcggaggatcctgggtgcagccgctcagagaagcttctcgcgcacaggaagtcgctgcgaggaggcgcgtgtgcggggagttgaatctcccgctcccttgaggctggggttgcgtctgttgacgcggccgactacaatcccgagggagactcacattgggacttgtcctcctcctcctggacattttgggggctcgtcagcatggacagcgagtcagccatgggtggaagggaggctttctcacagctcccttgtgcttcccacagccctgccagccgggaacacggaggggaaggaggaggagcttaaaagaggctactgaaccccagttggccatggctgaggaatttgtgaccctcaaggatgtcggcatggacttcaccttgggagactgggagcagctcgggctggaacagggggacacgttctgggacacagcgttggacaattgccaggacctcttcctgctggaccccccaagacccaacctgacctcccacccagatggcagtgaagatctggagcctctggcaggaggaagcccagaagcaacaagccctgatgtgactgagaccaagaactctcctctgatggaggatttcttcgaagaaggattctcccaggagattatagagatgttatccaaggatggcttctggaactccaatttcggagaagcctgtatagaggacacctggttagatagtttgctaggcgatccagaaagtcttctgaggtctgatattgccaccaacggggaaagtcccacggaatgcaagagtcatgaattaaagagaggactcagtcctgtgtccaccgtttccacgggagaagattccatggtgcataatgtttctgaaaagaccctcacaccagctaagtctaaggaatataggggtgagtttttctcctactccgaccacagccagcaggattctgttcaggaaggggagaaaccatatcaatgtagtgaatgtgggaaaagcttcagtgggagttaccgtcttacccagcactggatcactcatactagggagaaacccactgtccatcaagagtgtgagcaaggttttgaccggaatgcttccctttctgtgtatccgaaaactcacacgggctacaaattctatgtgtgtaatgaatatgggacaacttttagtcagagtacatacctgtggcatcagaaaactcacactggagaaaaaccatgtaagagtcaagatagtgaccacccacccagtcatgacacacagcctggtgagcatcagaaaactcacacagatagtaagtcctacaactgtaacgaatgcggcaaggcttttacccggatcttccaccttactcggcaccagaagatccacactcggaaacgctatgagtgttccaagtgccaggcgaccttcaacttgagaaaacacctcatccaacatcagaaaactcacgctgcaaaaactacctctgagtgtcaggagtgtgggaagatttttaggcacagttcgctgctcattgaacaccaggctcttcatgctggagaggagccttataagtgtaacgaacgtgggaaatccttcaggcataactctaccctaaagatccatcagagggttcacagtggagagaagccttacaaatgcagtgagtgtgggaaggccttccaccggcacactcaccttaatgaacatcggcgaattcatacaggctacagaccccacaaatgtcaggaatgcgtcaggagtttcagccggccctcacatctgatgcgacatcaggccattcacaccgcagaaaagccctatagctgtgctgaatgcaaggagactttcagcgataacaatcgccttgtgcaacaccagaaaatgcacactgtcaaaaccccatatgaatgtcaggagtgcggagaacgcttcatttgcggctcaaccctgaagtgccacgagagtgttcacgccagagaaaaacaaggattttttgtgagtgggaagatcttggatcagaacccagaacagaaagagaagtgctttaagtgtaacaaatgtgagaaaacctttagctgcagcaaatacctaactcagcacgagaggattcacaccaggggagtgaagccctttgaatgtgaccagtgtgggaaagcctttggccaaagtactcggctcattcaccatcaaagaatccactctagagtgaggctgtataaatggggtgagcaagggaaagccatcagcagtgcctcccttatcaaacttcagtccttccacacaaaggagcacccttttaaatgtaacgaatgcggaaagaccttcagccacagtgcacacctctcaaaacatcagttaattcacgctggagagaatccctttaaatgtagtaagtgtgacagagtcttcacccagagaaactaccttgttcagcatgagcgaactcatgccagaaagaagccgttggtgtgtaacgaatgcgggaaaacgttccgtcagagctcatgcctttctaagcatcagagaattcactcaggtgagaagccctatgtatgtgattactgcgggaaggccttcggcctgagtgctgagcttgtccgccaccagagaattcacactggagaaaagccttatgtttgtcaggaatgcgggaaagccttcacccagagctcatgcctttctattcaccggagagttcacactggggagaagccctacagatgtggtgaatgtgggaaagcctttgcccagaaagcaaatctaacacagcaccagagaattcacacaggggagaagccttactcctgtaatgtgtgtggcaaagcttttgtcctcagtgcccatctcaaccagcacctgagagttcacacccaggagacactttatcagtgtcaacgttgccagaaagcctttcggtgccactcgagcctcagccgccatcagcgtgtacacaacaagcagcaatactgcctgtagccattgggtggcagcagagtcccagaatatgagaccgttactcggatgttgaaagttggaaactatcccattgcaagtttctctccaaataaatgcatctaaagattgattagaaagtttgtgcgcatgtttttcattataacaatgaaaacacaaaagtggagaagctgtacaacgtcaggattcagaggtaggctctggagccagtctaccttgagttaaatcccacctctgccatctactacctaagtgaccttgggaaggtcagaaaaatctctcagggcctcggtgtccttatctgtaaaatgggcatcacctacctcagagggcttttctgaggattaaataaataaatgtgaagcacttagaactgatggccagcacatgagggctcaccaagtgtaagccacaaatacacatcagctatagcacaaatatacttgtgttacaagaaaggaattagtaatctgtgtttactgtagttaatgttcttacaatgtatcgcttttaatttaagttttccttttttacagtttttctccagcactttactcttcttaagtgcctggccttttttgtccctttatctctcctggtttttttcttaagccccagaaagccaaaaagaacatgtaaactcttcacctcaactagctacaaccttccactcctaacctcccaagcttctcacttaaagaggactccctatcccacaaacacatgctccctcttcctatgaccttcctccatttaacagtgttggttatgcaataagacacccaatttttcatgggagttgacaccaaaacacagctggattccatcaggaaagctgcattgatcagggtgttaaccgcatatgaaacaacccatatggaagacatacttaggggtcaaacctgtggtgtgtggaagtgaccactgggatgtcatcattcaccatttatccaggatggccgctcaccaggcaatttgctaggctcgggggcgggtagtatccatacactatgcactactgctctgaagcttctggaatcagaaatgaacccattttcatcgacgattgctgttagttgacaagtgacatcttgaaaatgccacattccctcatgtcacaggaagttctgggatcaccaaggattgttggagagtccagtgagatggaaccacacaaccagttccctaccagtgtcttgtcagctctgggtgtttgttccctgccactaagtggctcagtcacacctttgctgaaacacagtagtcttatgaaaagcactggacacatactttgaatacctttcatattttaggtgctgaaaatggtgagggagtgagtgctctgcacccttgggcttttcaactcttgcacctggagttctgctggttaagtttgttaaacttagttgaaactgggaacctgttggctaaccattggggccttacactgtttttcaaatggttgcaacatttaacttctcgcacatggttcccgtcctctggagctctgtcttgtcggggagatgggcatgttgtataccaaaagagtgtacaaagtgttgcagggctgtgacacaatagggactctatggaaaactggcagccattgggtgtgggggcagtctgtaaatcagtcacctgtgttgctgcaggccaaggtagaaacgccctccgtgtgtgcatatttgttggttctctgattaaagttttgagtctaaaaaaaaaaaaaaaaaaaaaaa

SEQ ID NO: 4033 - DNA, 6818 bp, Homo Sapiens
  NM_015432
tggtcagccacccctggctggctccaggcccagctccccaatattccccactaggcctcagtgtgtcctcatttctatctgtacctttgccatcctgggccatgcaacctgtagctctcggcctcttctgtctcctttcaggctgagtctctgaatctgtctccatttgtgactctggtttccatgggatacatagatgtggagcctcaggagggcaggggtagtgtgatcagtgtcaggcgccccaaagcatttattctgtgccaggccctgtgctggatgctgaaagtacggaagtggataacatacagtctctgtttccatgaagcctacaatgcacattctctgtggagtggagaaaccagggcccagccctgcctctatctcagtatggctgtacctcccctgaatctgcctgctgtgcccagggtgccaggtcagctatagcctgtggcttgaggctcttctttgcctctggcattcacaggggtatgtgtgcccgccagcaggtcccccccggctcttagggctcctgggggacttggctggtgggtgctggtgggcagcagaaggggagggagggagcagaaggcagtgactcagtgggggtggccctgggacagaactggggaggaagccaaggttggatgatgcttcctgaagccaggagggtgggaagagaggtctggctgggagttagggatggagcaggacaactccaaggctcccctctggcagccagacctgctcatgaagaaggctcctcggtagctgcctgaaagtctggactctgggggctgggctgggctgggtggggagattgctgttggtcccactgtgcctgttgtaatccccaggttcatgaaagaggtgcctgccttagagccagggaagccgttgcacccggtgccccctctccccagggaccatgggcctgggcacactgtggggctcagggtcttctcctggtcgcagagctgaccttcccacaatcttcccacaaattctggggagtgtcgggccaggcccacatgccctaaagggacctcaaatcgcacagctacccacttgggtagctttcatcagttcaggattccctgactgcgggtgaaatgagggggcagggcaccaacacagcccgagtgctggcagcgggtgaacgtataacacagggagtcttccccagtcctcacggcaaccccaggagaaaaatgactttccatttttacaggtgaggagggtgaggctcaaagagcagagttcctggagcgcccccagcaggtaagtggagaagccaggcctgggctgggggctctggctccagaaccccacctcagcaccagcctcctgcaccggactttgtggagaagggggtaagggggtgccagggatggcaaaggggtagaggatctggtggactctggcaggcctgggtcagctccacccattggtctcactcccacccggatggcagccccatcccacgtgggatcatgcgacctgtctctgggtgcccgcggcgaggcagcaccccgcttccctacacagaaggccttcccctcccgtcggctcattcagccgcggaagcccctgggagaccccgccccgccccgtcccgcggtgccccccgcgcactcaccctcgctcacccacgcggccttcctggcgggagagcgcttccggcgtcctcgccaggcccggggagtgggcacggtggagctgccgaccgttggtcgctgccccaacccacgcactgcgacgccgcgggtgaggcgcgcggtctgcggggcccgggggtgcggcggggcggggctggcgggctgtccgggcccacggagaggacggcggcgggcgggggttgctgcagggcccgcaccttgtcttccgcgccggcagggctgtgccccgtcgagacctgctcgggctgtggctccgtcctccggcctccagggggcggcgcggcgctgcgcggcgccccggcggcactgccctcccttcccagcggccaggaggcggtgtcccgtgacgccgcgcggccgcgctgtagtggccgtcgaggccgccgtctgttcgaaggctgtccgacttcacggttccccgcggctcggcccgggggcgtgagtgtcgccagcgggcgacgggggggcgcgcggtaggccctgcaacaaggccagggcctgggggggccggcaggagagcgaacccgaggcatcgtggtgccatggcggggccgcccccacgggcatgggcctgcagagcgtggccgtgaggacgctgagggtgggcgcgcacggagcagaggcccacgggcgtccgacgggggacctggacagagggacacccttaacgttattccctcttcccaggcctgaattgcagttcctgtgccctggcactaagactggcacctcctgcggcccatgcccttcgcctgcattgcccactgagtcccactcgactgtcttcagcgcggttcacactgagacccagccctctcccgctggccccgagcaggcccacctttaggagggcgtgatggaaaggcccctggagaatggggatgagtccccagactctcagggccatgccaccgactggagatttgctgtgtgcagtttcagggatgcctgggaagaggaggaacctgcttcccagatgcacgttaaggacccaggtcctccaagaccaccagccggggccacccaggatgaggagctacagggcagccccttgtccaggaaattccagttacccccagctgcagatgagtcgggggatgcccagaggggcacagtagaaagctcctcagtcctgtcagaagggccaggcccctctggagtggagagtctcctatgccccatgtcctcccacctcagcttggcacagggtgagagtgacaccccaggggtagggttggtaggggacccaggtccaagcagggcgatgccatctggcttgagccctggggcattggacagcgaccctgtgggccttggagaccctttatcagaaatatcaaagctgctggaggcagcccccagtggatccggcctccctaagcctgctgactgcctcctggcccaagacctctgttgggagctgctggccagtggtatggccaccttgccagggactcgggatgtccaaggccgggcagtgctgcttctgtgtgcccacagcccagcctggcttcagtctgagtgcagcagccaggaactcatccgcctcctgctgtacctgcgaagcatccccaggcccgaagtacaggcactgggactgacagtgctagttgatgcccgaatttgtgctccaagttcttccctcttctctgggctcagccaactacaagaagcagccccaggggccgtgtaccaggtgctgctagtgggaagcacgctgctgaaggaagtgccttccgggctgcagctggagcagttgccttctcagagcctgctgacccacatcccaacggcggggctgcccacttcgctaggaggaggcctgccttactgccaccaggcctggctggatttccgaaggcggctggaagctctactacagaactgccaggcagcttgtgccctgctccagggggccatcgaaagtgtgaaggctgtgccccagcccatggagcctggggaggtcggtcagctgctacagcagacagaggtcctgatgcagcaggtgctagactcgccatggctggcatggctacaatgccaggggggccgggagctgacatggctgaagcaagaggtcccagaggtgaccctgagcccagactacaggacggcaatggacaaggctgacgagctatatgaccgggtggatggattgctgcaccaactgaccctgcagagcaaccagcgaatacaggccctagagttggtccaaacactggaggcccgggaaagcggactgcaccagattgaagtgtggctgcagcaggtgggctggccagcactggaggaggctggggagccctcgctggacatgctgctccaggcccaaggctcttttcaggagctgtaccaggttgcccaggagcaggtcaggcaaggggagaagtttctgcagccgctgactggctgggaggcggctgaactggacccccctggggcacgctttctggccctgcgagcccagctgactgaattctctagggctttggcccagcggtgccagcggctggcggatgctgagaggctgtttcagctcttcagggaggccttgacgtgggctgaggaggggcagcgagtgttggcagagctggagcaggaacgcccgggggttgtgttgcagcagctgcagctgcactggaccaggcaccctgacttgcctcctgcccacttccgaaagatgtgggctctggccacggggctgggctcagaggccatccgccaggagtgccgctgggcctgggcgcggtgccaggacacctggctggccctggaccaaaagcttgaggcttcactgaagctaccaccggtgggcagcacagctagcctgtgtgtcagccaggtccccgctgcacctgcccaccctcccctgaggaaggcctacagcttcgatcggaatctggggcagagtctcagtgaacctgcctgccactgccaccatgcggccactattgctgcctgccgcagaccagaggctggaggaggtgccctgccccaggcatcccctactgtgcctccaccaggcagctctgaccccaggagcctcaacaggctacagctggtgctggcagagatggtggccacggagcgggagtatgtccgggctctagagtacactatggagaactatttccccgagctggatcgccccgatgtgccccagggcctccgcggtcagcgtgcccacctctttggcaacctggagaagctgcgggacttccactgccacttcttcctgcgtgagctggaggcttgcacccggcacccaccacgagtggcctatgccttcctgcgccatagggtgcagtttgggatgtacgcgctctacagcaagaataagcctcgctccgatgccctgatgtcaagctatgggcacaccttcttcaaggacaagcagcaagcactgggggaccacctggacctggcctcctacctgctaaagcccatccagcgcatgggcaagtacgcactgctgctgcaggagctggcacgggcctgcgggggccccacgcaggagctcagtgcgctgcgggaggcccagagccttgtgcacttccagctgcggcacggaaacgacctgctggccatggacgccatccagggctgtgatgttaacctcaaggaacaggggcagctggtgcgacaggatgagtttgtggtgcgcactgggcgccacaagtccgtgcgccgcatcttcctttttgaggagctgctgctcttcagcaagcctcgccatgggcccacaggggttgacacatttgcctacaagcgctccttcaagatggcagaccttggtctcactgagtgctgtgggaacagcaacctgcgcttcgagatctggttccgccgccgcaaggccagggacacctttgtgctgcaggcctccagcctggctatcaagcaggcctggacagctgacatctcccacctgctttggaggcaggccgtccacaacaaggaggtgcgcatggctgagatggtgtccatgggtgtggggaacaaggccttccgagacattgctcccagcgaggaagccatcaacgaccgcaccgtcaactatgtcctgaagtgccgagaagttcgctctcgggcgtccattgccgtagccccgtttgaccatgacagcctctacctgggggcctcgaactcccttcctggagaccctgcctcttgctctgttctggggtccctcaacctgcacctgtacagagacccagctcttctgggtctccgctgtcccctgtatcccagcttcccagaggaagcagcactggaggctgaggcagagctgggcggccagccctctttgactgctgaggactcagagatctcgtcccaatgcccatcagccagtggctccagtggctctgacagcagctgtgtgtcagggcaggccctgggtaggggcctggaggacttaccctgtgtctgagcccgggactggacgagcagtagatccagcagcctgcagctccaaggaacattgcctctctggatctgctgtgaccagggtgtggctgacacctgggctacctccaacctacatgtgcaacgctgttgactaccctttctgatgtgtgtggccattggactaactggcacggggcctctctagggaagtctggttgtagagcctgaataggctcctggccccatgaccccttctcctgtccccagctcccatcccagttgtgggttaagaataggctagagcagacattgggtgtttccatgctgtaggctggtgggggaccatgtgcctctaggcagtgactagggtgcccccacccctcaggaagaacacaggtgggctcctagcagctgatccccaatgcctggccttaaagccgagctcagttaccatagggacaggtccacctctactgggccctcatgcttgcctttcctggcccccaggcccagcccctttttactggggcagtttcgttattttgacttgatgccttttgaataactttcaatagaattgtctaaaattatcttactggttgttaggcctttggtgtctcagagaaggagtctaggtctttgatgtgtgatttaatcttttatttgtttataataaaaaatagactgatatgtaccctctgatgggcacatgcaaaaaaaaaaaaaaaa

SEQ ID NO: 4034 - DNA, 2717 bp, Homo Sapiens
  NM_015433
ctcagggaggcggggctcgttccacagggacaccacgacggctcgcggcccccagcctctaccccgctccggatccgggatctgagcgccggccgcggtgcccaggcactcccttggcgggccggatggcggaccccggcccagatcccgaatctgagtcggaatcggtgttcccgcgggaggtcgggctctttgcagactcttactcggagaagagccagttctgtttctgtgggcatgtgctgaccatcacgcagaactttgggtcccgcctcggggtggcggcgcgcgtgtgggacgcggccctgagcctgtgcaattatttcgagagtcaaaatgtggatttccgaggcaagaaggtgatcgaactgggtgcggggacaggcatcgtggggatcttggcagcgctgcaggggggggatgttaccatcactgacctgcccctggccctagaacagatccagggcaacgtccaggccaatgtgccagctggaggccaggcccaggtgcgtgccttgtcctgggggattgaccatcatgtcttccctgcaaactatgacctggtgctgggggctgatatcgtgtacctggaacccaccttccctctgctgctggggaccctccaacacctgtgcaggccccatggcaccatctatctggcctccaagatgagaaaggagcatgggacagagagcttctttcagcacctcctgccccagcatttccaactggagctggctcagcgggatgaggatgaaaatgtcaacatctatagggccaggcacagggaaccaagacctgcttgacatcacccttgctgttcttctcaatctcttgctctaatgaaggaactgtgtatctcaaaaaccatatttccagagccacaaacatgaggaccaaaaaggatggatttccctggcctctctcactttcctccttccctctttgttaccccagatactcttgggcaggtgcagtgaggtgcctgcttacaaggaatcccagagttctggcagcactagtgttagaacaccaaggaggttcctggctcctgttctcagagaaggaggatggtaaggtatccaggatttttagggggtaagggagatatatgggatgtgagagcagtgattgtagacagactgtcactgatcacttccattcctgttgctgtttacacagaatggactttaaaaaaattctgtgggatttttttttctttttttctttttttttgagacagggtctcactctgtcatccaggctggagtgcagtggtgtgatcacagctcactgcagcctcaacctctgaaggcccagatgatcttcctgcctcagctccccaagtagctgggactagaggcatgcgccaccacacccggctaatttttgtattttcagtagagacagggtttcgccatgttgcccagggtggtctcaaactcctgggctcaagtgatccacccgccttgcctcccaaagtgctgggattgcaggcatggcccactgtgctagcctaggatttttttttttttttaagaaagaattaagccttaaaaatctattgtgcaagaacccaacttttactcaggagctgagaaggaagaagcctcaaaccacccatttcctgctttttagagatagagtctagtggaaccatggctctaactgggtcaagtcctcctagctctgaagctaaggctgcagagctgtcctttggactgtatttcttcatgctttccagagttagagccttgatcacggaacatcattgtgtgcagaagaatactgtacctagtactaagttcttttcatctttgatttttctttagcttcatcagtccttccttcctaatctctaatcccctgaagcctaacacagttcctaatgtgttttgccttaacctcttttctcttcccacattggtacttctggttggggctctctttacttactgcttaggcacatagtcaccttctctggactccctgcttccatgctttctccttcagtccattccgcaaactcttgtgatcttccaaaattagctctgattagctttcacttcctgtagaagcaagaacaagctcctctgcttggtacttagtctgtgtccatgtgatccaaaattaccttcctattgcatttcctactcctttgctacgtgtattggacctctggccaaattacaaaagatgtactctttgttctctaaaaccacactaaagttttctgacttctttcacactctttatgataatcctctgcctgaaaggctattgccacctgtcaaaatcttcattattctttgcctctttcctgagcctcttgcttgaatgtgatttctttctccctgagacccataaggttcatcttatgggaccttaatttgtcttgcatggacatttgtgattctcattttctcaccattaaattaccttggagggtagggctgtggtttactcctgtctaaacccctgaagcctaacacagttcctggcacacaacaggtgttcaacagatattgtgctcattcaataaatatttactcgctttgtttaatggattccacccctgccttcctaggtgaccttggacaaattctcgaacccattcaccaaccacacaagtttgttgtgagtcataaatggataatgaatataaatgcgcattgaaaataaacataaaatgttacccacaaaaaaaaaaaaaaaaa

SEQ ID NO: 4035 - DNA, 2741 bp, Homo Sapiens
  NM_015442
gtgaggcggaagctgtgtatggcgggaggctgtggcggtcccttggtggggaagctgttgctgttgctagacgacgggaactagctctcgtcacttcctcagcccgccgtctgcccactcctctagccggaacctgggggcccggagccggggtaggcacagagttgtcctcggaggtccaggacagcggccagcccggcggcgggagtcagggccacgccacctgcagggaagaacccgagtcgaagcgggaagatggctgcagacaagcctgcagatcagggagcagagaaacatgaaggcacaggtcagtcctctgggatcactgatcaagagaaggagttatccaccaatgctttccaagctttcacatctggaaattatgatgcctgtctacaacaccttgcctgtctacaagatataaacaaagatgattataaaataattttgaatacagcagtagctgagttttttaaaagtaaccaaacaacaacagataatttgagacaaacacttaaccagctgaagaatcaggtccactcagctgttgaagaaatggatggattagatgatgttgaaaacagcatgttgtactataatcaagcagtcattctttatcatctgcggcagtatacagaagccatatcagttggtgaaaaactttatcagttcatagagccttttgaagaaaaatttgcccaagcagtgtgttttttgcttgtagacctgtatatattaacctaccaagctgagaaagctttgcatcttcttgctgtcctagaaaaaatgatttcacagggtaacaataacaaaaatggaaagaatgagactggtaataacaacaacaaagatggatctaatcataaagctgaaagtggagctctaatagaagctgcaaaatcaaagatacatcagtacaaagtacgagcttatatccaaatgaagtctctgaaagcatgtaaaagggaaatcaagtcagtcatgaatacagctggaaattccgcaccctctctctttcttaaaagcaattttgagtacttaagaggtaattatcgaaaagccgtgaagctattaaatagttcaaacattgctgagcatccaggattcatgaaaacaggtgaatgcttgagatgcatgttctggaataaccttggttgcatccattttgccatgagcaagcacaatttgggaatattctactttaaaaaggctctgcaagagaatgacaatgtctgtgcacagctcagtgcaggtagcactgatccaggcaaaaaattttcaggaagacccatgtgtacgttactaaccaataagagatatgagttgctgtataactgtggaattcagcttcttcacattggaaggcctcttgctgccttcgaatgtctgattgaagctgttcaggtttatcatgcaaatcctcgcctctggctacggctggctgaatgctgcattgctgccaataaggggacttctgaacaagaaactaaaggccttcccagcaaaaaaggaattgtacagtctattgttggtcaaggctatcatcgtaaaatagttttggcatcacagtctatacagaatactgtttataatgatgggcagtcttcggccattcctgtagccagtatggagtttgcagccatatgtctcagaaatgccttgttgctgctacctgaagaacagcaagatccaaagcaggaaaatggggctaaaaatagtaatcaattaggtgggaacacagagagcagcgaaagcagtgaaacttgcagcagtaaaagccatgatggagataaattcattccagctccaccttcttctccattgagaaaacaggaattagaaaacttaaagtgctccatacttgcttgcagtgcctacgtggctctggctttgggtgataacctcatggctttgaatcatgcagataaacttcttcagcagcccaagctgtcaggatctcttaagtttttgggacatttatatgctgcagaagccctcatctctctcgacagaatatctgatgccattactcacttgaacccggagaatgtcactgatgtctccttagggatctcttcaaatgagcaggaccaaggatcagacaaaggtgaaaatgaagcaatggaatcctctggtaagcgggcccctcagtgctaccccagttccgtcaactctgccaggactgtgatgctgttcaaccttggcagcgcttactgcctgaggagcgaatatgacaaagcccgaaagtgtctccaccaggcggcttcaatgatccatcctaaagaggtgccccctgaggccatcttgctggcagtctaccttgaactgcagaatggtaatactcagctggccttacagatcatcaaaaggaatcagctgctccctgcagtgaaaacacactctgaagtgagaaagaagccagtgtttcagcctgtccacccgatccagcccatccaaatgccggctttcaccactgtgcagagaaagtgatacttcacttttggaaaactgttacctgagacccaggggagaatttactggccattttagttgtatcacagcagaatgaataaaagatggtgaaggctgttaattttgagtcaattctacccctgacttttggccaaaagcttacttaaaattaaggatttactaagtcatcatcagctgtttttcttaatttcagccagactattaattttgagccattatgtaatatatgccataggcaattaaaacat

SEQ ID NO: 4036 - DNA, 5059 bp, Homo Sapiens
  NM_015443
cggcgcccaggccggggggctgtttgcaaactgcgcccattttgtggggctgaatccgcccgggctacgctcctccatcacgtgtctgttctctggggaggcagtaaggggccgtggagctggcctcggcctcggcatcgggagaggctggacttcctgtctctctgtgctgaatggctgcgatggcgcccgctctcactgacgcagcagctgaagcacaccatatccggttcaaactggctcccccatcctctaccttgtcccctggcagtgccgaaaataacggcaacgccaacatccttattgctgccaacggaaccaaaagaaaagccattgctgcagaggatcccagcctagatttccgaaataatcctaccaaggaagacttgggaaagctgcaaccactggtggcatcttatctctgctctgatgtaacatctgttccctcaaaggagtctttgaagttgcaaggggtcttcagcaagcagacagtccttaaatctcatcctctcttatctcagtcctatgaactccgagctgagctgttggggagacagccagttttggagttttccttagaaaatcttagaaccatgaatacgagtggtcagacagctctgccacaagcacctgtaaatgggttggctaagaaattgactaaaagttcaacacattctgatcatgacaattccacttccctcaatgggggaaaacgggctctcacttcatctgctcttcatgggggtgaaatgggaggatctgaatctggggacttgaaggggggtatgaccaattgcactcttccacatagaagccttgatgtagaacacacaactttgtatagcaataatagcactgcaaacaaatcctctgtcaattccatggaacagccggcacttcaaggaagcagtagattatcacctggtacagactccagctctaacttggggggtgtcaaattggagggtaaaaagtctcccctgtcttccattcttttcagtgctttagattctgacacaaggataacagctttactgcggcgacaggctgacattgagagccgtgcccgcagattacaaaagcgcttacaggttgtgcaagccaagcaggttgagaggcatatacaacatcagctgggtggatttttggagaagactttgagcaaactgccaaacttggaatccttgagaccacggagccagttgatgctgactcgaaaggctgaagctgccttgagaaaagctgccagtgagaccaccacttcagagggacttagcaactttctgaaaagcaattcaatttcagaagaattggagagatttacagctagtggcatagccaacttgaggtgcagtgaacaggcatttgattcagatgtcactgacagtagttcaggaggggagtctgatattgaagaggaagaactgaccagagctgatcccgagcagcgtcatgtacccctgagacgcaggtcagaatggaaatgggctgcagaccgggcagctattgtcagccgctggaactggcttcaggctcatgtttctgacttggaatatcgaattcgtcagcaaacagacatttacaaacagatacgtgctaataaggggttgatagttcttggggaggtacctcccccagagcatacaacagacttatttcttccacttagttctgaggtgaagacagatcatgggactgataaattgattgagtctgtttctcagccattggaaaaccatggtgcccctattattggtcatatttcagagtcactgtctaccaaatcatgtggagcactcagacctgtcaatggagttattaacactcttcagcctgtcttggcagaccacattccaggtgacagctctgatgctgaggaacaattacataagaagcaacgactgaatctcgtctcttcatcatctgatggcacctgtgtggcagcccggacacgtcctgtactgagctgtaagaagcggaggcttgttcgacccaacagcatcgttcctctttccaagaaggttcaccggaacagcacaatccgccctggctgtgatgtgaatccctcctgcgcactgtgtggttcaggcagcatcaacaccatgcctcccgaaattcactatgaagcccctctgttggaacgtctttcccagttggactcttgtgttcatcctgttctagcatttccagatgatgttcccacaagcctgcatttccagagcatgctgaaatctcagtggcagaacaagccttttgacaaaatcaaacctcccaaaaagttatcgcttaagcacagagcacccatgccgggcagtctgccagattcagctcgtaaggacaggcacaaattggtcagctccttcctaacaacagccaagctgtcccatcaccaaacccggcctgacaggacccacaggcagcacttagacgatgtgggggccgtgcccatggtggagcgagtgacagcgccaaaagcagagcgcttgctcaacccaccaccacccgtgcatgacccaaaccacagcaaaatgagattgcgagaccattcatctgagagaagtgaagtgttgaagcatcacacagacatgagcagttcgagctacttggcagccacccaccatcctccacacagtcccttggtgcgacagctctccacctcctcagattcccctgcacccgccagctctagctcacaggttacagccagcacatcgcagcagccagtaaggaggagaaggggagagagctcatttgatattaacaacattgtcatcccaatgtctgttgctgcaacaactcgcgtagagaaactgcaatacaaggaaatccttacgcccagctggcgggaggttgatcttcagtctctgaaggggagtcctgatgaggagaatgaagagattgaggacctatccgacgcagccttcgccgccctgcatgccaaatgtgaggagatggagagggcacggtggctgtggaccacgagtgtgccaccccagcggcggggcagcaggtcctacaggtcatcagacggccggacaaccccccagctgggcagtgccaacccctccaccccccagcctgcctcccctgatgtcagcagtagccactctttgtcagaatactcccatggtcagtcccctaggagccccattagcccggaactgcactcagcacccctcacccctgtggctcgggacactccgcgacacttagccagtgaggatacccgttgttccacaccagagctggggctggatgaacagtctgtccagccctgggagcggcggaccttccccctggcgcacagtccccaggcggagtgtgaggaccagctggatgcacaggagcgagcagcccgctgcactcgacgcacctcaggcagcaagactggccgggagacagaggcagcgcccacctcgcctcccattgtccccctcaagagtcggcatctggtggcagcagccacagctcagcgcccgactcacagatgagcgggagacagccatctaaacagactcactaactattggcattaaagcttcagaaatctctgcgtttgatattcaaacatcatatgccggaaattttcacagtttttagtgaacttaaggaatttagatcctactttggtatttttttttcttgttttaatttttgttttgtttttgtttccatgttttcttgtcacacacctgagcacttcctcccgttggcaaacagaagttcaggatgagaccctgctggcctggtcctggcacatcctctgcactgttgaatcactggacttactgatcttagatgaccaccccctccctcacacctgtgggcagggcagaacagcctggcgggctacagtttagcatggccttcttgagctagggtggaatggggcagggtgctctggactcttaccccctcccctcccatctgtggcttggctctgctgtggccctcctggctgggtccccttggtttttcgtgctggaacatccccaccagagcctctctgccataactgccagctgctctccccgagtgctcagctggcagaacacctttcctttctcacccagaacttaagagactgattttttgtttcatctgcatttggtcttctctgttttgactctttcactgcagtaacctggctgtggctgctcaggttcccctcctcatgccccttggtacccttccctgtctgctctcccatgccatgtacacacccacaacccgtccttccacttggaatatttttaccacctatcctgatctttgaaggtagggttaggactacttaacctctattcccactcccctgcaaactgggggttgtgggaagtgagcagccatctccctgtgtgattttttttttttttccctctgattcactttgccatgtttccttcacatccagatccctgtcggtgttagttccactcttggtctttcacgctccccttgcctgtggaacattgtctggtcctagctgtggttcccattgttcccccttcacccttctctgttaaccttgtgcctgtctcctgtatgatcacatcaccaaaaagggggaggggggagaagactctttttttttggccattttgtaatcgtataaaaatagtagacaactgcttaatggttggggttttttcacaattttcaacattagtgatttttttttctgtttgcaagttaaagggtttgtcattgtttctttaaaaaaaaatacaataatgcaccatatccctatgcataaagtgcttcttctatttataaggttgaaaattctgaataacccttttagcattgaaaaaaaaaacaaaaacaaaaaatggaaaaaaaaaaccttgtattttgtaaatattttcttttcctgctttggagctgtgtaatggcagcgaaacatgtagctgtctttgttctatagaaatgcttttcttcagagaagctgatctttgttaatgtcttgattctgttcgcaaagcacagactagtgcttaaaaaaaaaaaagaaggaaaaattgaaaaaaataaaaaaaaaagttacagaaaaaaaaaa

SEQ ID NO: 4037 - DNA, 1876 bp, Homo Sapiens
  NM_015444
ggggaatcctgctctgggatagcacccggccccgcagagcagcgcggcagcccaagggccccggcgccgggggcggcggggaaccccaaacgcaaccgggtctggagggatccccgcgccgagccagccgccgtcaccgcctccgcgccgcccctgcgggcttggcaggcgcccggcgcgcccgcactgcgcccggccgccggctcccgcggtcccaccgtgagctcgccggcccgtcgcccgctcgccatgcaaccgccgccggcctcgcgcgcgtaggcgcccgccgcaggccatgctgcccctgctcgccgcgctcctggccgccgcctgcccgctgccgcccgtccgcggcggggccgcggacgcgcccggcctcctcggggtgccctccaatgcttcagtcaacgcgtcctccgcggacgagcccatcgccccgcggctgctggcctcggcggcccccgggccccccgagcgcccgggcccggaggaggcggcggcggcggcggcgccgtgcaacatcagcgtgcagcggcagatgctgagctcgctgctcgtgcgctggggccgcccgcggggcttccagtgcgacctactgctcttctccaccaacgcgcacggccgcgctttcttcgccgccgccttccaccgcgtcgggccgccgctgctcatcgagcacctggggctggcggcgggcggcgcgcagcaggacctgcgcctctgcgtgggctgcggctgggtgcgcggtcgccgcaccggccgcctccggcccgccgccgcccccagcgccgccgccgccaccgccggggcgcccaccgcgctgccagcctaccccgcggccgagccgcccgggccgctgtggctgcagggcgagccgctgcatttctgctgcctagacttcagcctggaggagctgcagggcgagccgggctggcggctgaaccgtaagcccattgagtccacgctggtggcctgcttcatgaccctggtcatcgtggtgtggagcgtggccgccctcatctggccggtgcccatcatcgccggcttcctgcccaacggcatggaacagcgccggaccaccgccagcaccaccgcagccacccccgccgcagtgcccgcagggaccaccgcagccgccgccgccgccgccgctgccgccgccgccgcggccgtcacttcgggggtggcgaccaagtgacccgctccgctcctccctgtgtccgtcctgtgtccgcgcgcgcgggtgcctttcccgccggagactcggccggtgtgcttcgtgctgtagttatcgttagttcctcttcccgagatggggccgccgagagaccccagcgcctttgaaaagcaaggtttgtgctgcgcttccagttccgaaaagcagatgtttaagcccttggactgagggtgggatcgcagctccgaagacggagaggagggaaatggggccctttcccctctattgcatccccctgcccgactccttccccgcacccacgtgccctagattcatggcagaaaatgaccaaatcctgtgtatttgttttatatatttaataactgttttaaatgaaagttttagtaaaaaaaatacaaaacaaaaagattaaattgctattgctgtagtaagagaagctctttgtatctgaacatagttgtatttgaaatttgtggttttttaatttatttaaaattggggggagggcatgggaaggatttaacaccgatatattgttaccgctgaaaatgaactttatgaaccttttccaagttgatctatccagtgacgtggcctggtgggcgtttcttcttgtacttatgtggttttttggcttttaatacagacattttcctccagaaaaaaaaaaaaaaaaaa

SEQ ID NO: 4038 - DNA, 7650 bp, Homo Sapiens
  NM_015447
atggtggacgcgagcggccgcgccgccgccgagggctggaggaagatggaggccccgccggacggcgccgccgacctcgtgcccctggaccgctacgacgcggcgcgcgccaagatcgccgccaacctgcagtggatctgcgccaaggcctacggccgagataacatccctgaggacctcagagaccctttctacgttgaccagtatgagcaggagcacattaagccgcctgttatcaagcttctcctgtccagcgagctgtactgccgtgtctgcagcctcatcctgaaaggggaccaggtggccgccttacagggacaccagtctgtcatccaggccctgtcccggaaagggatctatgtgatggagagtgatgacacccccgtgacagagtccgacctcagtcgcgcacccataaaaatgagtgcccacatggcaatggtggatgccctgatgatggcctacactgtggagatgatcagcatcgagaaggtggtggccagtgtcaagcgcttctcaacgttcagtgcctcgaaagaacttccgtacgacctcgaggatgccatggtgttctggatcaacaaggtaaatcttaaaatgagagagataacagagaaagaagttaaattaaaacaacagttattggaaagtccagctcatcaaaaggtccgctatcgacgagagcacctttctgctaggcagtcaccctacttcccgttgttggaggatttgatgagagacggcagtgatggtgctgctctcttagctgtgattcactattattgcccagagcagatgaaactggatgatatatgcttaaaggaggtaacgtcgatggccgacagtctgtataatattcggcttctgagagaattctccaatgaatatcttaataaatgtttttatctcaccttggaagatatgctgtatgcgccattagtgttgaagccgaatgttatggtttttattgcggagcttttttggtggttcgagaatgtcaagccagattttgttcagcccagggatgttcaggagctgaaagacgcgaaaacagtgttacaccagaagagcagccggcctcctgtaccgatctccaacgcgaccaaacgcagtttcctaggcagccctgctgcagggaccctggctgagctgcagccccccgtgcagctgccggcggaaggctgtcacaggcactacctgcacccggaagaacctgaatacctcgggaaaggaactgctgccttcagcccatcccatcctttattgccactgagacagaaacagcagaaatccatacagggagaggacatccctgatcagcgacatcgatcgaattctttgacccgagttgatggtcagcctcgaggagcagcaatagcctggccagaaaaaaaaaccaggcctgcgtcccagccaacaccttttgctctacatcacgctgcgagttgtgaagtggatcccagctctggcgacagcatcagcttggcccgctccatcagcaaagacagtttggcatccaacattgttaatctgaccccacagaaccagccacaccccacggccacgaagagccacgggaagagcctcctgagcaatgtcagtattgaggatgaggaagaggagcttgtggctattgttagagcagacgtggttccccagcaggctgacccggagttccccagggcctcaccccgggccttaggccttacagcaaatgcccggtctccccaaggacagctggacacctcggaaagtaagcctgacagttttttcttggagcctttgatgccagcagttcttaagccagcgaaagagaagcaggtgatcaccaaggaggatgaacggggggaagggagaccgaggagcatcgtgtctaggaggcccagcgagggcccccagcctttggtacgaaggaaaatgactggcagtcgcgacttgaataggacttttaccccgattccatgctcagaattccccatgggcatcgaccccaccgagacaggaccactgtcagtggaaaccgcaggagaggtctgtggtgggcctctggcccttggcggattcgatccgttcccccagggaccatccacggatggcttcttccttcatgtaggcagggccgatgaagacaccgagggaaggttatatgttagttgttcaaaaagccccaactcccacgattcagagccgtggactctcctcaggcaggattctgactcggatgtggtggacatagaggaagccgagcacgatttcatgggtgaggcccatcctgtggttttcagcagatacattggggaggaagagtcggccaaactgcaggaggacatgaaggtgaaggaacatgaagacaaagatgacgccagcggccgctcgagcccctgcctgagcacagcctctcagatgagcagtgtctccatggcgagtgggagcgtgaagatgaccagctttgcggagaggaagctccagagactcaacagctgtgagaccaagtccagcaccagcagctcccagaagaccacgccagatgcgtctgagagctgcccagcccctctgacgacgtggaggcagaagagggagcagagtccgagccagcatggcaaggatcccgccagcctcctggcatctgagctggtacagctgcacatgcagctggaggagaagcgcagggccatcgaggcccagaagaagaagatggaggcgctgtcggcaaggcagcgcctgaagctcggcaaggctgcattcctgcatgtggtgaagaagggcaaggccgaggctgccccacccctcaggccggagcactttgcaaaggagtactctcagcacaacggggaggactgtggggacgctgtttccaaaaccgaagactttctcgtgaaggaggagcagagagaggagctccttcacgagccacaggatgtggacaaagagagcctggcctttgctcagcaacataaagcaaaagaccctgtggctctgcacgagctggagagaaataaggtgatctccgctgccctcctggaggacactgttggggaggttgtcgacgtgaatgaatgtgacctttccatcgagaagcttaacgaaaccatcagtacgctgcagcaggccatcctgaaaatctctcagcagcaagagcagcttctgatgaagtcccccacagtcccagtgccaggctctaagaataactcgcaggaccacaaagtgaaggcaccagtccacttcgtggagccactctctcccacgggcgtggctggccaccgcaaagccccccggctgggtcaaggccggaattcccgttccggaaggccggcggagctgaaggtcccaaaagacaggccacagggctcctcccgaagtaaaaccccaacgcccagtgtagagacgctcccgcacttgagacccttccctgccagcagccaccctcggacgcccacggaccctggcctggacagtgccctggagcccagtggtgacccacatgggaagtgtctcttcgacagttacaggctccatgatgaaagcaatcagcggacacttactctgtcctcttccaaagatgccaacattctttcggagcagatgagcctcaaagaagttctggatgcgagtgtgaaggaggtggggtccagctcctcagatgtctcgggaaaagagagcgtccccgtggaggagcctctgaggagcagggccagcctcattgaagtggacctctccgacctgaaggcccccgacgaggatggggagctggtaagcctcgatggctcggcggaccttgtcagcgaaggcgaccagaagccgggggtcggcttcttcttcaaggatgaacagaaagcggaagatgagctcgccaagaagcgggcggccttcctcctgaagcagcagcgcaaggccgaggaggcccgcgtgcgcaagcagcagctggaagcggaggtggagctcaagcgtgacgaagcccggcgcaaagctgaggaagaccgggtgcggaaggaggaggagaaggcgcggcgcgagctcatcaagcaggagtacctgcggaggaagcagcagcagatcctagaggagcaggggctcggcaagcccaagtcaaagccgaagaagccgcggccgaagtcggtgcaccgggaagagtcgtgcagcgactccggcaccaagtgctcctccacccctgataacttgagccggactcagtcaggctccagcctgtccttggcctctgcggcgacgacagaacccgagagcgttcattccgggggcacaccctctcagcgagtggaatcgatggaagccctgcccatactgagccgtaacccaagcaggagcacagaccgagactgggagaccgcgtcggcggcatcttccctggcctcagtggccgagtacacaggtcccaagctctttaaggagcccagtagtaaatcaaacaagccgattattcacaatgccatatcccattgctgcctggctggaaaagtgaacgaaccccacaagaattccatattggaggagctggagaagtgtgatgccaatcactacatcatactgtttcgtgatgctggctgccagttcagggcgctttactgctactatcctgatactgaggaaatctacaaactcactggcacggggccaaagaacatcaccaagaaaatgatcgacaaactgtataaatacagctcagaccgaaaacagtttaacttgatcccagccaaaaccatgtctgtcagtgtggacgcactcacaatccacaaccacctgtggcagcccaagcggcctgcagtgccaaagaaggcccagactcgtaaatgaccccggtgcagctggcgtccaaagggtgacccagactcgtaaatgatgcccttgtggctggcatccagagggtgccacggggtccttatttattgttttcatctatttgggtacgaagtgtgcaaagtcacagaccttttgcaaagaggtttctagacagcagaagaaaacccctctctcagcgctcatctcacgcagaggatgccaggcagggtgaggatgggggagtagatgccgcttttgcagtggctcgcactgctgtggccactgctgaccactgaggctcccagcggagggtgttcacagccaggtcccgggccacggagctcccttacttgaagttctccttcagcatagattagacgtgatccactttgctttcttgcttctcacctcgcccccttgcacattgcctgacaccctcatattggccagctgtaatctcgtgactatgggactgaggctcaatcttggcttggggtgtttgaatgtctatagcaaaggaattcataatgggaaatctttttcatttgagaaattgtatgatatttattggttgtgtctactgccaacatttatatccaattctaagatttctgaaaaaaaattcttatcccttgctgctcagaaaaagtttacggaaaacaccagttcactaaaagcaccgaaatctgcaaagcctgtcttccgctagaacaacgtctacaaatgtgaagatgatgacttctggcacgcggtcatgagggtggggaatggcactaggagctgatgtttgcctcatttaaagtaggcaagccgagccaactgcagccatcattcattaagttttgggtagtgctctaatggtttgttcactttaataaagacagattttggtaaagtagaatatttttcattctgagcatgtttgtcccaaaaggtgatgcacttaagctgacagtcccttcagtggttttgttaggtcacggcttgtcctgtctggattctgcatctggaagcgctgcatgctctcagaggagcgtgccgtttcccctgtagatggatacttttgttttgttgcctatttaaaaacaattaagtggttatttgcagttatttcagaactccaagtaagtggatggctttgggttctttctgccttggtcccaatggtgttgatgcttctgtggagcgcggacattcccaggagcaggtgcgtgccagccatggctgccagacactgctgcaactgaccagctgccggaagattctggagccactaacattagttttgcacatattttcttgggagtgttacttgaatctatctcaaactgcagaaaaaatcaaaagatcaataattgggagaaaaagagacaaatttaactgttacataattttagatagacaaaaaacatgagtgagtcgtgtacataaggagggaacatggtacagaaggctagaaggaattataggtcttattcccctttcctcagtcctttgaagagaagtacagtctcttgcgattttgtatatatcgtgttcgacacagccgctctctgtcctgtaaatagggaactaaaggctgtatgatttctcaagtgctgagttacacagtcctgagtgagctttctgttaccatactttcacacgtgggctttatttctcactgtatgtttgatatgatattactgtatttattttaagaaagcactaagatgtaataaagtgatgaactaatttgctttacattgaatcgtatgtgtgaggttgctgtggctcatttcgctgaccaggcgacaccaactccttgctttataggagtttcacattgttctttaccatggccctatcgaagtcagtggaattggattctttttaatgaagagctagaaaatatctggcatagagctggaaaattgcattcccatgggacgtctgaatcaattctggattttctccatggaatgagtcagtgtgtggaacatcctgaaacttgtccttaagcgtgtagttttcactgttcgttgcgagtaagcactaatgtggcatggacattcctgatgtcccaagtccccaggccagtgttcgcctaatgattgacagaagcgtccctgcgttcttcatgcttggacacagcaacccttttaattagtcttgaaaagtttcagacacaggattaattttcgtggtggtgcttttgggcctttctggcttgggtggtggtaaagtcatgattttgcagttgataacactgacttataactctgtttatcaatgtctcctatattcaaagcccctgcagtggtatttgtgtctcgttgcaaatttctttcagcggaaagcttgcacaactttcgttgtgtctcagaattctaaccttgttatttaagacaagctgctctacccatttaggatataactttgtaaagaaagtgtaaaccaaatgattcaatgtatgatgaagtttatgtgtaaatccttggtaatgctagaattctgggagcccagaagggttgaaagagaaatgaaacttgcgtgagtcccattattttacgcatgtatgtgcagatacgttctacccacacgtgtgcgtgcacatggctgtgtgcgtgcaccaaagatggactgctttccatgtgtccttttgactttctgcacgtgtcactgcggtgcagtctcttagcagacttcaggcccaaactgtattcttcactcaggcaaaattgaaaagtggaataattctaaattacttctaggttatacttttacctccctgaaattgtagttgtcacttggagggcaaaatatttattgaaataaaattttctgttaaaaattcaaaaaaaaaaaaaaaaaaaa

SEQ ID NO: 4039 - DNA, 3980 bp, Homo Sapiens
  NM_015453
ctgacttccgtttccgggggcggcttccggcggcgtgacctgaccgcaagaggccaatggagtgtgggagctgaaagggtcttcgctggcggccggtaactggcggcggttgggaacggccgagtgtggctcttctggtgtttcagcttggggagagaggggtggccttcctcttgcagttgaggccggcgccgagccggacttcaggcggatctcgtggcggagcccatcttgctccctctcccaggcctttacccgctccctaggattcccgggccctgtaggtgggagttgggagacgacagtactgcttttaaagagacagtgttagggatcttggaagcacagccaacatgtgtgacattgaagaagccactaaccaactcctagatgtgaaccttcatgagaaccagaagtctgtacaagtgacagaaagtgacctcggaagtgaatctgagcttctagtcactattggagccactgtacctactggctttgagcaaacagctgcagatgaagtcagagagaaacttgggtcatcatgcaaaatcagcagagaccgtggcaagatatattttgtcatttcagtggaaagtctggcacaggttcattgtctgagatcagttgataacttatttgtggtggttcaggagtttcaagattaccagttcaaacaaacaaaggaagaagttctaaaggattttgaagacttggctggaaaactcccatggtcaaaccccttaaaagtgtggaaaattaatgccagttttaaaaagaaaaaagcaaagcgcaaaaagataaatcagaattcaagtaaagagaagattaataatggacaagaagtcaaaatcgatcagagaaatgttaaaaaagagttcactagccatgctttagattctcatatcttagattattatgaaaatccagccatcaaagaggatgtatcaacattaataggtgatgatttggcatcttgcaaagatgagactgatgaaagctcaaaagaagaaactgagcctcaagtgctgaagtttagagtcacatgcaacagggcaggagagaaacattgctttacctcaaatgaggctgcaagagattttgggggtgctgttcaagattattttaagtggaaggccgacatgaccaactttgatgtggaggttcttttgaacatccatgataatgaagtcattgtgggcattgcattgactgaagagagtctccaccgaagaaatataacacattttggacctacaactcttagatcaactcttgcctatgggatgctcaggctctgtgatcctctaccttatgatataatagtcgatccaatgtgtggaactggggcaataccaatagagggggccactgaatggtctgactgtttccatattgctggtgataataatccactggctgtgaatagagcagcaaataacattgcatctttattgaccaagagccaaattaaagaaggcaaaccctcctggggcttgcccatagatgctgttcagtgggatatctgcaatctgccattgagaactggctctgtggatattattgtaacagatttgccatttggaaaaaggatgggatccaagaagagaaactggaacctttatccagcttgcctacgggagatgagccgtgtctgcacacctaccacaggccgagctgtactacttactcaagacacaaaatgctttaccaaggcgttatctggaatgcgacacgtatggcgaaaggtggatacagtctgggtgaacgttggtggtcttcgtgctgcagtttacgttctgatacgtacacctcaagcttttgttcatccttcagaacaagacggagaaagaggaactctttggcaatgcaaagaatgaagatgactaatagtacttgtacttcccaccactggaaatgttagcataaaagaacttggagaggaaaaaagtattaacaaaactgcagtctgcactctttaaacctgtttaaggctcttcatcctggttagcaaaaggtgtgaatgtaatgtgatggaatttaaaagttttatgagaccaggcacagtggctcacgactgtaattccagcagtttaggaagccgaagtgtgcagatcacctgaggtccggagaccagcctggccaacatggtgaaaccctgtctctactagaaatacaaaaattagccaggtgtggtggcgggcgcctgtaatcccaactactcaggaggctgaggctagagaatcacttgaacccagcaggcggaggttgcggtgagtcgagatcacgccattgcactccagcctgtgcgacaagagcgaaactctgtctcaaaaagattttataagaaagcagagcttttccttgaagctcttttgaagtggtagcttaattagtattttgttgaaaatactttaaagatgcctagtgaaaagcctactaaagtgctgtgagattggggtttagaacattttattttcaggctttatggcctattttccattgtgtcaagtgcaaaactaccctggcccaaaggaagggcagagaacataattacatcttaggccacatttcattctttgcagctttgctaatccagttgctcaagttctttacctcaacctgaaggaatgaagcattattacattttgtgaatggtgttcagcctataagacgaagtctcacaagacctataggaaagtttaccatctgccttaaatattaaaatatccatctgttattcacattaatacacagaatgaaaatagaggtctaggaattatcaaaggtactgcaaaaatactgtatagaacttatttgtaaatagcacatacattgatagatggggtgtgggaccaacaaaccaaattaaaagaaattgtttttctttcagtacactaaggtgtgtgttttcaaaaccaaacacaaacctgtcaagagtatttgttggctagtttcttaaaaggccaagagaaaaaaaatgatatatctttggaaaacttttaatttgggagttatgtgagttgttactttctcctggatcacgattcacatttaattgcttttccagttgcaacaagtccttcttgagagttttgtggaaaatggtgcttccctggaacaaagagtagttgaggtttttttgtggaactcatcatagtattgtttattttggagcctctggctgcaatcagtatagattttcagtatcctattagtattataatagtactcctcttaatactttctgatgtctccattgagaataaaaggacacaatacttttgaaagaagagttcacattagcagcacagccagcaatcctcatctggtttctctgatctcctaccccacacttcataatgaatgggaaataagatgtttatgaaggttttatatcctagactggcctttttaccactatcagaattcacagctgctttgtttatgggccgaacacaaaacttttcacctgatgggagaaaccatttaaacctcaaattaagcaacccacagaaccaggaagttcaaggaccatgtctgttttcaccacgatgtctttccccacccccccaccccccactccaccccccactaagggcagggtattgtatctgccagactgggtatttgttgaacaagcgagtattttcgcctattagcttagtttttaaggaaatcattttttacttgattcatcatagctttaattctattacatactacaataaaaatttgacaagactgatacaaatatgtagtgggcaatagtttgccgtcttcttccctagtatggtgtttttcaatctggtgactagaataggcagtgggctataagcaggattcataaggcctggagctgagttatatgtgacactgccacctattcattgtgtgaccttggttttaaccttcaaagtgggtctcctggactaaaagaatgtgaaaagatggggaaataaatctgtaatctgaacatggaa

SEQ ID NO: 4040 - DNA, 6178 bp, Homo Sapiens
  NM_015455
caatgaaaacgaggggggcgcggaggaggaggcggcggcgtcggtggcggcggcgacggcggcgcggaggcgaaggcagcggcgggcgcagcgaggagggcgaggccgggggccgagagggcgggagggcgtagtggcggcccgtcggggcggctgaggcgggcagccgaagcagtggctctcggagggggaacaaagagcagcgactaaggcggcagaggagcggcggcggtggcggcgctgcagcagcgggcgggactggtatggtggttccacagggcagaccccgctgcactcacagggaggaggaggcggcagcggcggaggaaggcggcgcaccccgagaggcatgcccaaagaaaaatacgagccccctgaccctcggaggatgtatacaattatgtcttctgaggaagcagcaaatggaaagaaatcccactgggcagagcttgaaataagtggaaaagtaagaagcttaagcgcatctttgtggtcactaactcacctgacagctttgcatttgagtgacaattccctgtcccgaattccttcagacattgccaagcttcacaatctggtgtatttggacctgtcatctaataaaattcgtagcttacccgcagaactcggaaacatggtatcactcagggagctccatttaaataacaacctgttacgagttctaccttttgagctgggaaaactgtttcagttgcagactttaggcctgaaaggaaatccccttacccaggatatattgaacctttatcaggaaccagatggaacaagacggctgctgaactatttgcttgataatttgtcaggtactgcaaaaagaattacaacagaacaaccacctccaaggtcttggattatgttacaagaaccagataggacaaggccaactgccttgttttctgtcatgtgctataatgttctttgtgataaatatgcgacccggcagttatacggctactgtccatcatgggcgctaaactgggactacaggaaaaaggccattattcaagaaatcttgagctgcaatgctgatatcgtaagtcttcaggaggttgaaacggaacagtattacagtttttttctggtagagctgaaagaacgtggctataatggattcttcagtcctaagtctagagctaggacaatgtcagaacaagaaaggaaacatgttgatggctgtgcaatattcttcaagacagaaaaatttactttggttcagaaacacactgttgaatttaatcagctagccatggcaaattctgaggggtctgaagctatgctgaacagagtcatgacaaaagataacattggggttgcagtactgctagaacttcggaaggaatcgattgaaatgccgtctggaaagccacatcttggaacagaaaaacaacttattcttgtggctaacgcccacatgcattgggaccctgaatactctgatgtgaagttggtacaaactatgatgttcctctcagaagtgaagaacattattgataaagcctctcgcaacctcaaatccagtgttttgggagaatttggaactattccacttgtgttatgtgcagatcttaattctttgccagactctggtgttgtagaatatttgagcacaggtggagtagaaacaaatcacaaagactttaaggagttgaggtataatgaaagtctcacaaacttcagctgtcatgggaagaatggaaccaccaatggaaggatcactcatggtttcaagttacagagtgcctatgagagtggcctgatgccttacacgaattacacatttgatttcaagggtataatagactacattttctattctaaacctcagctgaacaccttaggcatcctgggccctctggaccaccactggctggttgagaataacatcagtggctgcccgcaccccctcatcccctctgaccacttctcactttttgcacaactggagctcttactgcctttcctgccccaagtcaacggcatccaccttcctggcaggaggtagtcaagcaccttcagaggacagccttgattcacttgtaaacttgtgaaaatctgaacataggggagtgaggtatggccactgaggatttttgcttgcttaagaatgatttggactttcaatctgattatttgataaggatatagtatgaaagccaggtgctagcaacagacaaattctgagcccaatatgctttatactgctagacagggattggtgtgtttgcacctgtctttcatttgtcataagagattttcctatttcttctacccaatagaatattttcatgcctggaaataggaaaatgtgtgaacagcgtattctcttcacacagaaatctgtagcactgcttttttgaggccagtagcaacatccagagatcattcttccatactttactccctcctttttcagacttgtttgtaaagtacagaatctgaatttagcctttatgattgtatatgatccacagaagacctgatttatgaaattttgtactaaaatcatttggaaatgattgtattgtaaactgaggctaaatttttttttaaacctgtttcatgtgttataaaggccagcttgtaaaagaagctgcaacagactttctctgctcatgatttgcactcttagggttttgttagcccttttgtactactttctttttaaattgagaacatggttctttacatataaatctgcttcaaccttaggatgttttcagaccagaggcaacttattcatgaatttttatgaaaactatctactaggacagataagctgaacagtgatgatctgtagacatttatggactgaatgtaatggttgatatatgtacattctgatatttttaaatctttaactttttaaagttaaaaacctacagctgcttaggtccagcttcttaactctttttgagacacttcctgtcctatctccactgtgcctgcctaaatttgttctcaccaagcactgcctgtgcatgcagagaaaatctgtgcatcctcttttatatttttaaaatactgtttaacatttgtgagaattttatgaaaatgcttttgtatgagctgtggctttttcccattgtgaagcattgaatatcacattttggaacatgttatagggtgagtccctggatctttgctcaccagatccaagcactgcttctcggtgtcattgcagtgtgctgcttgtcacccagaatactactatcatgtgaattctttttgtcgtcagtgtcttttccttagtctttttgttgttgttgttgttgttgttttaatcattccttttttaagaagaagtaattttccatttatgaagcagtatgaattagatgtattttcaaaacaggtccctaagacaattcttcagatcatttttaaaatgactaagtcattttagtatgtcaagcaagataaaaattacatcataccgtctattttgcccatagtgccatttagagatgaaaaccagctttaactttgcaaagtgaacatgtacatggtctgctctcatttattcattcttctctcaaaagtcaaatgaatgcagagggagcttggtcaaactgcttttgtttcaactgcaggcaggggagcaaaaggacgccatgtgagcattaggaaaaaaaatactcactcttactaacaatttttatacagaaaatgagtcattttggaaatgattcttatgttttttttttttctccttttagaaaattctccaaaaggttttgatgttgaatcttggtcttggacctgttttttcctttgagggttttttgttttttgttttttctaggatttcattgtgatgttttggttttgttttttgctttttgtttaagttgtgctgacaccaaacacatccagtttataatcagtacattggaaagctggtattgatgtagaaccagtgcataactttttatggggttttgttattggtttttttttgtaaagtgtgaataaaaggtatgtttactcatttttcctgaacactgtgttggtaatgtgcatcatgacaatttccagtgaaggtgagctggagctggttggactaatgagactgaggaagcagcttttcctacgatctgcattatgtaatcacaggtccagagagctttatggaagcgggagaggaggagcacttactcatgttgtatttgttaatggaggatgtcatcttttcatagatgctggaactagagtgcacttgttagatgctaaaggtttgagctttacacaaaatgtcttcatctgtatttgttattgtctacaatatatttgaatttggggcagcatattaagatgtaatggcctgttatgtcttgaaaatacttgttttgcctcttccaggcatactgcattctgtggatcagtttgaacagcttctccaccttatttggacagtgataaattgaaccaagagtgtagatttacaagtgtaaccttcaaaagaggaagaactatttggggtctgtaggtaatgaacagtcacaccaaaatagactatgatgcttttgttaagaaaggtttcatgttttagatattttccgtgtcctaaataattttcaataatctataatccctaaaatgcaataaaaactagtatgttttcacggtgtatattttttttcaaaaattctgtaacaaatatatttaatgtgttgccataatgtcatttcagtatttttgctggataaatccattttagaaatgtcttacaaaaagtttagggcatgttttctgttttaaagaccagaagtttgaaggcacccaaatccttgtcgccaatctcctgaagtacagctttaccatattagtggtcattatttatgctttgagagtttcaatattgttcgtcaagttaacttatggcataatttaagctaaagttgtagaaatgaattgttgagtgcaactttcatagtcccaaagataggcagagaacatctccagaaatgtgtgtgtgtgtgtgtgtgtgtgtgtgtgtgtttaatatgatttagtgacaaccaggaaaacttacttgggattattagcactttcaaacttagggacattattaaattggatggaatgcacttctaaatgtttaaattaaaatttcaaagctctttcgagattcaggttctcaataataatattcaagttttagagtttcactttgtactatttaaatttatggaactagtttccatactgacttgtaaggttttggggtcatatataaggactaaagccaagctaggcaaaacaatgacagcaccgttttttcagtgaagctctcagaatgtccagtacagatgttgcagataattccaagaactccttcagcaggtgttcttcaccattcgtaaacagtattttaagatgttcactttgctcttctttttggttacatacattttaataactggtatgttgaagtagtgtctaaaagtatctagtctttattcacagtacattatattgtgtgatgcactggactaactcttgtttaccattcatgtaacaaaacccagcacattatctgcactataagctcaaagaatgtcacatccgcccagacagctctttgatgagggtgatgggaactgaataaaccatacggactggcagtaacaagggcttttactgttctgttcagtggaaccttcttggtcaaattgtaattagctagcattatatttatatacagggtcttttttctttaccgatgtattttcctactcatagccaaccaataaattcagtatctgtttcaaatattttagaagtgtagtttgtatagctgtagtactgaggtttgaggaaaaataaatgttgatcagcagaccacgtatttaaaattctgaatcttctgggacagggttgtaactcagccttccaaagggaagagtgcagggggacggggccatgatatggggaaatggtgtaaactaatgtatttctttattggctgttattctgtataacactcatatctttgccaaagttcaattttatatttaggcaactgatggtccttttgcatttaggattttcgttgttgttaccttatacctcatgatataaggaatgggctcatgtgtcttccgtcttttggaaggaggttgacatattttaaataaatgcttttaaatacagtaaa

SEQ ID NO: 4041 - DNA, 2622 bp, Homo Sapiens
  NM_015456
ggtgcggggcggaagtgggcggctgcgggacgcgcgcggagtcgcgcggcgggcgggacctggccgagctggagggcgccggggagcggggctcgggcggtccccgaggcccggcggagcgggcttctggggtgtctgcggcggcgccgggggaacgggctggggatggggcgcctagccgggcggtggccggggcctcggccatgttcgcggggctgcaggacctgggcgtggccaacggcgaggacctgaaggagaccctgaccaactgcacggagccgctcaaggccatcgagcagttccagacagagaatggtgtgctgctgccatctcttcagtcagccctccccttcttggacctgcacgggacgccgcggctggagttccaccagtcggtattcgatgagctgcgggacaagctgctggagcgagtgtcagccatcgcttcggaggggaaggctgaggaaaggtacaagaagctggaagaccttctggagaagagcttttctctggtgaagatgccgtccctgcagcccgtggtgatgtgcgtcatgaagcacctgcccaaggttccggagaaaaaactgaagctggttatggctgacaaggagctgtatcgagcctgcgccgtggaggtgaagcggcagatctggcaagacaaccaggccctcttcggggacgaggtttccccactcctgaagcagtacatcctggagaaggagagcgctctcttcagtacagagctctctgtcctgcacaactttttcagtccttcccccaagaccaggcgccagggcgaggtggtgcagcggctgacgcggatggtggggaagaacgtgaagctgtacgacatggtgctgcagtttctgcgcacgctcttcctgcgcacgcggaatgtgcactactgcacgctgcgggctgagctgctcatgtccctgcacgacctggacgtgggtgaaatctgcaccgtggacccgtgccacaagttcacctggtgcctggacgcctgcatccgagagcggttcgtggacagcaagagggcgcgggagctgcaggggtttctcgatggcgtcaagaagggccaggagcaggtgctgggggacctgtccatgatcctgtgtgaccccttcgccatcaacacgctggcactgagcacagtcaggcacctgcaggagctggtcggccaggagacactgcccagggacagccccgacctcctgctgctgctccggctgctggcgctgggccagggagcctgggacatgatcgacagccaggtcttcaaggagcccaagatggaggtagagctcatcaccaggttcctcccgatgctcatgtccttcctggtggatgactacactttcaatgtggatcagaaacttccggctgaggagaaagccccagtctcatatccaaacacacttcccgaaagcttcactaagtttctgcaggagcagcgcatggcctgcgaggtggggctgtactacgtcctgcacatcaccaagcagaggaacaagaacgcgctcctccgcctgctgcccgggctggtggagacctttggcgacttggcctttggcgacatcttcctccacctgctcacgggcaaccttgcgctgctggccgacgaatttgcccttgaggacttctgcagcagcctcttcgatggcttcttcctcaccgcctctccaaggaaggagaacgtgcaccggcacgcgctgcggctcctcattcacctgcaccccagggtggccccgtctaagctggaggcgttgcagaaggccctggagcctacaggccagagcggagaggcagtgaaggagctttactcccagctcggcgagaagctggaacagctggatcaccggaagcccagcccggcacaggctgcggagacgccggccctggagctgcccctccccagcgtgcccgcccctgccccgctctgagggccctccagacctgctcgggtgctggggccatgccgagtcgcggccctgctcagccggaagaggctcccggacctggatgtacagggcagtctctcttcccggggctatggctgggcctgtcctgccgtcatggccccctgcttcctgctccttggagctggctcccggaccttgcccaccatccatgcagtggctcccagggcagagcctctccttgtactttggcagccatagaaagcgtgctcattttctgttttcctgtgttaggaaaaaaccacctgttttccaaggggagagggcggggcctgagggtgggggcggggcctcttcattggcccagcttggcgaaagcgaggcacactgcttactgccttggggttgtggagatggacccgtgacctcgtggaggccgtgtgggggcagcagcctggcctgtgccatggtgggtgtcctggggcctgtgcggagggagccacctcaccctgcagcccagtttgcaggtgtggccttgtttctccttgcccagcagtgctgccttcagcggccgtgacggggccagctggacacacggtgagattttctcgtatgtaaataaaaggcattttggtaaacgtggaaaaaaaaaaaaaaaaaaaaaaaaaaaaaaaaaaaaaaaaaaaaaaaaaaaaaaaaa

SEQ ID NO: 4042 - DNA, 2256 bp, Homo Sapiens
  NM_015459
cacgcggcaggcggtggcgggattctgccgcgtgcgctttcccgccccgcctcgcctagcctcgtcctgcgctcgccacgcctcgggctgtccgttgggccacgcagaccgcgctgcgctcgctccgtcgcggctccgcgtgccccaccttctggctagttttttctagagcccaggctccgcccgtttcccgcttccagggcccggttcgttcccgcccgcacccgtccctctcctctgcacccctgctgcttctgctttgaaggcggaggctccatgttgtcccctcagcgagtggcagcagctgcctcaagaggagcagatgatgccatggagagcagcaagcctggtccagtgcaggttgttttggttcagaaagatcaacattcctttgagctagatgagaaagccttggccagcatcctcttgcaggaccacatccgagatcttgatgtggtggtggtttcagtggctggtgccttccgaaagggcaagtccttcattctggattttatgctacgatacttatattctcagaaggaaagtggccattcaaattggttgggtgacccagaagaaccgttaacaggattttcctggagagggggatctgatccagaaaccactgggattcaaatctggagtgaagttttcactgtggagaagccaggtgggaagaaggttgcagttgttctgatggatacccagggggcatttgacagccagtcaactgtgaaagactgtgctaccatctttgctctaagcactatgactagttctgttcagatttataatttatctcagaacattcaagaagatgatcttcaacagctgcagctcttcacagaatacggtcgtctggcaatggatgaaattttccaaaagcctttccagacactgatgtttttggttagagattggagtttcccttatgaatatagctatggactccaaggaggaatggcatttttggataagcgtttacaggtgaaggaacatcaacatgaagaaattcagaatgttcgaaatcacattcactcatgtttctccgatgtcacctgctttctcttaccacatccaggactccaggtggccacaagccctgactttgatgggaaattaaaagatattgctggtgaattcaaagagcagttacaggcactgataccgtatgtattaaacccatctaagttaatggaaaaggagatcaatggctcaaaggtcacctgtcggggactactggagtattttaaggcatatattaaaatttatcaaggagaagatctgcctcaccccaagtccatgcttcaggccactgctgaagccaacaacttagcagctgcagcctctgccaaggacatttattataacaacatggaagaggtttgtgggggagagaaaccttatttgtctccagacattctagaggagaagcactgtgaattcaaacaacttgctctggaccattttaagaagaccaagaagatgggtgggaaggatttcagctttcgttaccagcaggagctggaggaggaaatcaaggaattatatgagaacttctgcaagcacaatggtagcaagaacgtcttcagcaccttccgaacccctgcagtgctgttcacgggcattgtagctttgtacatagcctcaggcctcactggcttcataggtcttgaggttgtagcccagttgttcaactgtatggttggactactgttaatagcactcctcacctggggctacatcaggtattctggtcaatatcgtgagctgggcggagctattgattttggtgccgcatatgtgttggagcaggcttcttctcatatcggtaattccactcaggccactgtgagggatgcagttgttggaagaccatccatggataaaaaagctcaatagcatcttaacgtgaagatcaaacaagaacacaacaagcccctactgatttctgggtttctgccacggccacaggttcatatccagaggaatggcagatctgagacgatccaggaagagctaaaacatggccctgtaataaatgagcagacctctcctgtggtttcaaattattaaacacacttccatttctcttggaagcatttcttttccttgctgttatagatgcaagcctgtgtctattttcatattactctgctttgtgcactttatggaggaggaagctagaggaaaaatggaaatgcagcttttaagttctttatgtgccacttagtgccttttaagattgattccatg

SEQ ID NO: 4043 - DNA, 2454 bp, Homo Sapiens
  NM_015462
aaaatggcagcgctggaggaagaattcacgttgtcttcggtagtcctgagcgccgggcctgaaggactcctaggcgtggagcagagcgacaaaacagaccagtttctagtgacagacagcggcaggacagtcatcctctataaggtttctgatcagaaacccttggggagctggtcagtgaaacaaggtcaaattataacatgtccagctgtgtgcaactttcaaactggagagtatgttgttgtacacgataataaggttttaagaatatggaataatgaagatgtaaacctggataaagtatttaaagctacattgtcagcagaagtatataggatactttcagtgcaagggacagaacccttggtgctcttcaaggaaggtgctgttcgtggtttagaggccttgcttgcagacccccagcagaaaattgaaactgttatctctgatgaagaagtgattaaatggacaaagtttttcgtagtattcagacatcctgttttaatttttattactgaaaaacatggaaattactttgcttacgtgcaaatgtttaactcacgtatcttaaccaaatatacactcttacttggacaagacgaaaactctgttataaagagttttactgcatctgtagatcggaaattcatctctttgatgtcattaagctctgatggttgtatatatgaaaccttgataccaatacgtccagctgacccagaaaaaaatcagagcttagttaaatcactgctgctcaaggctgttgtatctggtaacgctcgaaatggagttgcactcactgccctggatcaggatcacgtcgcagtcctaggaagtccactagcagcttctaaggaatgcctctctgtatggaacataaaatttcaaacactacagacttcaaaagagttaccacaagggaccagtggtcaactctggtattatggagaacatttgtttatgctacatggaaaatctctaactgtgattccatacaagtgtgaagtgtcatcattagcaggtgctcttggaaaactcaagcatagtcaagatccaggaactcatgtcgtgtcccattttgtaaactgggagacacctcaaggatgtggacttgggttccagaactcagagcagtcaagaagaattttaaggagacgaaaaattgaagtgagtttacagccagaggttccaccatccaaacaacttttgtcaaccataatgaaagattcagaaaaacacattgaagtagaagtacggaaatttttggctctgaagcagacacctgactttcatactgtcattggggacacagtaacaggacttctggaaaggtgtaaagcagaaccatcattttatccccggaactgtctgatgcagcttatccaaacgcatgtgctttcttacagtttgtgccccgacttaatggagattgccttaaaaaagaaagatgtacagttgttacaactctgtctacagcagttccctgacattcctgaatcagtcacctgtgcttgcttaaaaattttcttgagcattggtgatgacagtcttcaagaaacagatgttaatatggagtcagtttttgactatagtataaattctgtacatgatgagaaaatggaagagcaaactgaaattcttcaaaatggcttcaatcctgaagaagataaatgcaataactgtgatcaagagttaaataaaaagccccaggacgaaacaaaggagagcacttcatgccctgtggtacaaaaaagagcagctctacttaatgcaattcttcattcagcatatagcgagacatttcttctgcctcatttgaaagacatcccagcacagcatatcacgctgtttcttaagtatttgtatttcctgtacctgaagtgtagcgaaaatgctactatgactcttcctggaatacacccacctaccttgaaccagattatggattggatatgtctacttctggatgcgaattttactgttgttgtaatgatgccagaagcaaagaggctactgataaatctttacaagcttgtaaaatctcagatatctgtttattctgagctcaacaagattgaagtaagttttcgggagctacagaaattaaatcaagaaaagaataatagaggattatattcaattgaagtgctggagctcttctgatattatcaattctccttcatagacattttataaagctcttttatgtgaactcttgcttcatccaggcaagaacggtgttttgtttgcgaccatctcagtgtcaagagaaacgtgtcagtgagtacctggaccatcacttaactgatgctccggggtaggactgcaggtttcacatgaacctgttctaggctgtggacattggtgtggagaggttctgcaattttttaaaaatatgtaactgggttgattttaagtaaaattatttgtgtattgataaaagtctaatttctt

SEQ ID NO: 4044 - DNA, 5404 bp, Homo Sapiens
  NM_015465
accccgccccgctccctacctaaggcgtgaggctacgagcggtcggctgtggcagcttctcttgtctctgacggcttgtagttatggggcaggagccgcggacgctgccgccctcccccaactggtactgcgcccgctgcagcgatgccgtgcccgggggcctctttggcttcgccgcgcggacctccgtcttccttgtccgcgtgggcccgggcgcaggcgagagtccagggacacccccgtttcgagtcataggagagttggtgggacacaccgaaagggtctctggcttcacattttctcatcaccctggtcagtacaacctctgtgccaccagctccgacgatgggactgtgaaaatatgggatgtagagacaaaaacagttgtgacagaacatgcactccatcagcatacgatatcaacattacattggtctcctcgagtaaaggacttaatagtatctggggatgaaaaaggagtagttttctgttactggtttaacagaaatgacagccagcacctctttatagaacccaggacaattttctgtcttacttgttcacctcatcatgaagatttagtagccattggctacaaggatggcatagtggtgataattgacatcagtaagaaaggagaagttattcataggcttcgaggccatgatgatgaaatccactccatagcctggtgtcccctgcctggtgaagattgtttatctataaaccaagaggaaacttcagaagaagctgaaattaccaacgggaatgctgtagcacaagctccagtaacaaaaggttgctacttagccactggaagcaaagatcaaaccattcgaatctggagctgttctagaggccgaggggtgatgattttgaaattgccctttctgaagagaagaggagggggtatagacccaactgttaaagagcgcctttggttgacactccattggcccagcaatcaaccaacacagctggtatctagctgttttggaggtgaactgttgcaatgggatctcactcaatcttggagacggaaatacaccctcttcagtgcctcatcagaagggcaaaatcattcaagaattgtgtttaatttatgtcctttacaaacagaggatgacaaacagctattactttctacatcaatggatagagatgtaaaatgttgggacatagccaccttggagtgcagctggacccttccttcccttggtgggtttgcatacagcctggctttctcttctgtggacataggctctttggccataggtgttggggatggcatgatccgtgtatggaatacactctccataaagaacaactatgatgtgaaaaatttttggcaaggcgtgaagtccaaggttacagcgctgtgctggcacccaaccaaggaaggttgcttagcttttggaactgatgatggaaaagtgggattgtatgacacctactccaacaagcctccacagatttctagcacatatcataagaagactgtatatactttagcctgggggccaccagtaccccccatgtcacttggaggagaaggagacagaccttcccttgctttatacagctgtggaggagaagggattgtcttacagcataatccctggaagcttagtggagaagcctttgacatcaacaaactcatcagggacaccaattcaatcaaatacaaattgcctgtacacacagagataagttggaaagcagatggcaaaatcatggctcttggcaatgaagatggatcaatagaaatatttcagattcccaacctgaaactgatctgtactatccaacagcatcacaagcttgtgaataccattagctggcatcatgagcatggcagccagccagaattgagctatctgatggcctctggctccaacaatgcagtcatttacgtgcacaacctgaagactgtcatagagagcagccctgagtctccagtgaccattacagagccctaccggaccctctcagggcatacggccaagattaccagtgtggcgtggagcccacatcatgatggaaggctggtatctgcttcctatgatggtacagcccaggtgtgggatgctctccgggaagagcccctgtgcaatttccgaggacatcgaggtcgactgctttgtgtggcatggtctcctttggatccagactgcatctattcaggggcagatgacttttgtgtgcacaagtggctcacttccatgcaagatcattcccggcctcctcaaggcaaaaaaagtattgaattggagaaaaaacggctctctcaacctaaggcaaagcccaaaaagaagaaaaagcccaccttgagaactcctgtaaagctggaatcgattgatggaaatgaagaagaaagcatgaaggagaactcaggacctgttgagaatggtgtgtcagaccaagaaggggaggagcaagcacgggagccggaattaccctgtggccttgctccagcggtttctagagaaccagttatctgcactccagtttcctcaggctttgaaaagtcaaaagtcaccattaataacaaagtcattttactgaaaaaggagccaccaaaagagaagccagaaaccttaatcaagaagagaaaagctcgttccttgcttcccctgagtacaagcctggaccacagatccaaagaggagcttcatcaggactgtttggtactagcaactgcaaagcactccagagagctgaatgaagatgtgtctgctgatgttgaggaaagatttcatctggggcttttcacagacagggctaccctgtatagaatgattgatattgaaggaaaaggtcacttagaaaatggccaccctgagttatttcaccagcttatgctttggaaaggagatctcaaaggtgttctccagactgcagcagaaagaggggagctgacagacaaccttgtggctatggcaccagcagctggctaccatgtgtggctatgggctgtggaagcttttgccaaacagctgtgttttcaggatcagtatgtcaaggctgcttctcacctactttccatccacaaagtgtatgaagcggtggagctgctcaagtcaaaccatttttacagggaagctattgcgattgccaaggcccggctgcgcccggaggacccagtcctgaaggacttgtacctcagctggggaaccgtcctagaaagagatggccactatgctgtagctgccaaatgctatttaggggccacttgtgcttatgatgcagccaaagttttggccaaaaagggggatgcggcatcacttagaacggctgcagagttggctgccatcgtaggagaggatgagttgtctgcttccctggctctcagatgtgcccaagagctgcttctggccaacaactgggtgggagcccaggaagccctgcagctgcatgaaagtctacagggtcagagattggtgttttgccttctggagctactgtccaggcatctggaggaaaagcagctttcagagggcaaaagctcctcctcttaccacacttggaacacgggcaccgaagggcctttcgtggagagggtgactgcagtgtggaagagcatcttcagccttgacacccctgagcagtatcaggaagcctttcagaagctgcagaacatcaagtacccatctgctacaaataacacacctgccaaacagctcctgcttcacatttgccatgacttgaccctggcagtgctgagccaacagatggcctcctgggacgaggctgtgcaggcgctccttcgggcggtggtccggagctatgactcagggagcttcaccatcatgcaggaagtgtactcagcctttctccctgatggctgtgaccacctaagagacaagttgggggaccatcaatcccctgccacaccagctttcaaaagtttggaggccttttttctttatgggcgtctgtatgaattctggtggtctctctccagaccttgcccaaattccagtgtctgggtaagggctggtcacagaacactctctgttgagccaagccagcagttagacactgccagcactgaagaaacggaccctgaaacttctcagccagagccaaacaggccttcagaactagacttgagactcacagaagaaggtgagcgaatgctgagtacttttaaggagctcttttcagaaaagcatgccagtctccaaaactcacagagaactgttgctgaagtccaagagaccttggcagaaatgatccgacaacaccaaaagagtcaactctgtaaatccacagcaaatggtcctgataagaatgaaccggaagtagaagcagagcagcccctctgcagttctcagagccagtgtaaagaagaaaaaaatgagccactttctctgcctgagttaaccaaaaggcttaccgaggcaaatcagagaatggcaaaatttcctgagagcattaaggcctggcccttcccagatgtgctggagtgctgcctcgtcctgcttctcatcaggtcccactttcctggctgtctggcccaggaaatgcagcagcaggcccaagagctccttcagaaatacggcaacacgaaaacttacagaagacactgccagaccttctgtatgtgaattttcacacaccttgaagaaactgccaaattgaaaatgtttgacatctttcacctctgcagttatgcctcaccagacattcactctggtccctagatgtttttgcagtaatccaaaagaatacaaacaaggattaagtttgaatcaaccctgcctacccatagacaacggtggatctgactttagactcaattgtggtctcctactggagggaagatcatgaaaagcccacagtagttattcagaactaacacctgcagagtgttggtcatctctacagccttaggcaggtttcacccaaagaggagaaacttctgtcgtcacccaaagtgttacatgcttaaaacacaagctacctttgtaaatacttcatctgatcagaagtgtgtcatgcttgtttgagatggagttgctgcattttaggactattgatacctttttttaattgtttttataatatttaatttgaaagaggagacccttctctctctactctttcatagactgaagtttgaatatgaaataggccttaaccatcatgttgactctcctgtcagaattttaggttggaaatttggttttattctttcatgtaattgcttatttgaacagatcacttactaaagctttagaagaagtgattcaaatgtgtgttttcccttcagttttataacaaatggattgatggcagtcaaatagctcaggaataaattactgtttcaatggttcttaaactttcttggatcataggatccttttgagaatcagattaaagccaaagatactctttggag

SEQ ID NO: 4045 - DNA, 2745 bp, Homo Sapiens
  NM_015475
gcgcatgcgcgagtgtacgcgttgccggcgaagaggggagcctgacgactcggaaatttgaataccacagtagcatggagtgtgacctcatggagactgacatcttggagtcgttggaagatctaggttacaagggcccattgttggaagatggagcgctctctcaggcagtctctgctggagccagttcccccgagtttaccaaactctgtgcttggctggtgtctgaattaagagtgctctgtaaactagaggaaaacgtgcaagcaactaacagtccgagtgaagctgaagaattccagcttgaggtgagtgggctactaggggagatgaactgcccgtatctttcactgacatctggggatgtgaccaagcgccttctcattcagaagaactgcctcctcttgctcacatacctcatctcagaactagaagctgccagaatgctctgtgtgaatgctcctccaaaaaaagctcaagaaggaggcggtagtgaggtctttcaagagttgaaaggcatatgtattgctctaggaatgtccaaacctccagccaatataactatgttccaattcttcagcgggattgaaaaaaaattaaaggaaacattagcaaaagttccacctaatcatgtgggaaagcctttactgaagaagccaatgggaccagcccactgggaaaagatagaagcaattaaccaagccatagccaatgaatatgaagtccggagaaagctgctaataaaacgtttggatgtcactgtacaatcctttggctggtctgacagagctaagagccagacagaaaaattagccaaggtttaccagccgaaacgttcagtcttatcccctaaaactactatttctgttgcccatcttttggctgcaaggcaggacttgtcaaagattttaaggacaagcagcggctctataagagaaaagactgcctgtgccatcaataaggtgttgatgggcagggtgcctgacagaggtggtagacccaatgaaatcgaacctccacccccagagatgccaccgtggcagaagaggcaagatggcccccagcagcaaacaggaggccgaggaggagggagaggtggctatgaacattcctcatacggaggacgaggaggtcatgaacaaggaggcgggagaggtggacgtggtggctatgaccatggtggccgagggggaggaagaggaaataagcatcaaggaggctggacagatggagggagtggtggaggaggtggctaccaagatggtggttatcgagattcaggtttccagccaggtggctatcatggtggccacagcagtggtggctatcaaggcggaggttatggtggcttccaaacatcttcttcatatacaggaagtggataccagggtggtggctaccagcaggacaatagataccaagatggcgggcaccatggtgatcgtggtggtggtcgtggtgggcgaggtggtcgtggaggccgaggtggtcgtgcaggccagggaggaggctggggaggaagagggagccagaattatcaccaagggggtcaatttgaacagcatttccagcatggaggttatcagtataatcattctggatttggacagggaagacattacactagttgaggctaccgaaccttacattttgctagagctcaagtaatagaaacttagtttcagaatcctgaattcagcacctattttgaattaatgtgagaccacaggtggcaggcagattcctgcttggcataagcatttgtaggtcttcattcaattctgttagatttttttattggacttacataatgccgtttatttgagaaacacataacatctctcctttctatgaaaaattttttaaaaggtggttaaaattgcctttaattgcccagtagactaattccacagtcagaacatgcaaacttttttgaagaaattacttgaataagtagttttcatgttttcaatatgcagttttgaaaatgaggattcacctagacttttttagatttactactaggaaaccttcctcatatgaataaccatttatatgtgttttgcttaaagtattccaatgcctattttccaagcacagttctgccccccggttgacttttatgccacgtgtgcttcatgatggaacttttaggtcagttcctattaaatgagctcttctgcagatagcacattcagtagccttattttgttgatggaatactgtatcatatgctcaactctgaaaaccttgaacacggccaaaatccataaagattataaaagcaaactaagttgtgaagctatagtacatgtaggcatttagttaagtatagcaattcaaactgacctgcatccatccaaaacaaattcctccttcaaccttatttttacttgaaatttgctagaagaaatagcaaaccgaaatttgttttatgcatgagttaataccactggctcagcaaatacaagttagtttgctttaagcaggtaactttttttgtaatggaagaaatgcactacaaagttaagacagatttttgctaagtgcaggaggccctttattattgctgcagaaaacaaaagcctggctgagttgatgttttacattctcccttactgaaatctacatgacatgatgcttcttgctgggtttttgtacatgtaaacattgtcaagctgtgaaagaaaatggctggaggtgtgctttgtgtgaaaggtgagcaataaagtatctgttaagttc

SEQ ID NO: 4046 - DNA, 6697 bp, Homo Sapiens
  NM_015477
ccagtctgggcaccggagcctgtgaccgcttcgttagtggagaggtagctggcagtccgcttcggcgggcctgtgccccgcgccgttctcggggcctccctgctgagctcgcggctcacgctgagagggacacgcagtgacgagcggccgaagcagctttgcggtgagagcacgctgggccgggggccgggcgggagcctggtggcgggtaacgccggactcgagggttttgtagtgcatccctgagcatgagcacagaatgaagcggcgtttggatgaccaggagtcaccggtgtatgcagcccagcagcgtcggatccctggcagcacagaggcttttcctcaccagcaccgggtgcttgcccctgcccctcctgtgtatgaagcagtgtctgagaccatgcagtcagctacgggaattcagtactctgtaacacccagctaccaggtttcagccatgccacagagctccggcagtcatgggcccgctatagcagcagttcatagcagccatcatcacccaacagcggtgcagccccacggaggccaggtggtccagagtcatgctcatccagccccaccagttgcaccagtgcagggacagcagcaatttcagaggctgaaggtggaggatgcgctatcttatcttgaccaggtgaagctgcagtttggtagtcagcctcaggtctacaatgatttccttgacatcatgaaggaatttaaatctcagagcatcgacaccccaggagtgattagtcgtgtgtcccagctattcaaaggccaccccgatctgataatgggattcaacaccttcttgccccctggctacaaaattgaggtgcaaaccaatgacatggtgaatgtgacaactcctggccaggttcatcagattcccacccatggcatccagccacagcctcaaccaccaccccaacatccttcccagccttcagcccagtcagccccagctcctgcccagccagctcctcagcccccacctgccaaagtcagcaagccctcccaactgcaagcacatactccggccagtcagcagactcccccacttccaccgtatgcatccccacgttctccgccggtccagcctcacacaccagtgacaatctcgttgggaacggccccatccttgcagaacaatcaacctgtggagtttaatcatgccatcaactatgttaataagatcaagaacagatttcagggccaaccagacatctacaaagcattcctggagattttgcacacatatcagaaagagcagagaaatgccaaggaagctggaggaaactacactccagcattgacagagcaggaggtgtatgcccaggttgctcgtctctttaaaaaccaggaagatttgttgtcagagtttggacaattcctaccagatgccaacagctccgtgcttttaagcaaaacaactgctgagaaggttgattctgtgagaaatgatcatggaggcactgtcaagaagccccaactgaacaacaagccgcagaggcccagccagaatggctgccagatccgcagacatcctacaggaaccacccctccagttaagaagaaacccaaactgctcaatctgaaggattcttctatggcagatgccagcaaacatggtggtggaacagaatcgttattttttgataaggtccgaaaggctcttcggagtgcagaagcctacgaaaatttcctacgctgtcttgttatttttaaccaggaggtgatctctcgtgctgagcttgtgcaactagtctctcctttcctggggaaattccctgagttgtttaattggtttaaaaactttctgggctataaggagtctgtacatctggaaacttatccaaaggagcgagccacagagggcattgctatggagatagattatgcttcttgtaaacgattgggctccagctatcgagccttaccaaagagttaccagcagcccaagtgtacaggacggactcctctctgtaaagaggttttaaatgatacctgggtttccttcccttcgtggtctgaggactctacctttgtgagttccaagaagactcaatatgaagaacatatttatcgttgtgaagatgaacgctttgagcttgatgtagttttagagaccaatctggcaacaatccgggttctggaagcaatacagaagaagctttcccgcttgtctgctgaagaacaagccaaatttcgcttggacaacacccttgggggcacatcagaagtcatccatagaaaagcactccagaggatatatgctgataaagcagctgacatcattgatggtctgagaaagaatccctccattgctgttccaattgtccttaaaaggttgaagatgaaagaggaagaatggcgagaagctcagagaggctttaacaaagtatggcgagaacaaaatgagaaatactacttgaagtctctggaccaccaggggatcaactttaaacagaatgacaccaaggtcctgaggtctaagagcttactcaatgagattgagagtatctatgatgagaggcaagagcaggctacggaggagaatgctggtgtacctgttggcccacacctctcacttgcgtatgaagacaaacaaatactggaagatgctgctgctctgattatccaccatgtgaagaggcagacaggcattcagaaggaggacaaatataagataaaacaaatcatgcatcattttattccagatttgctctttgcccaaagaggtgatctctcagatgtggaggaagaggaagaagaagagatggatgtagatgaagccacaggggcagttaagaagcacaatggtgttgggggcagtccccctaagtccaagttactgtttagtaacacagcagctcaaaaattaagaggaatggatgaagtatacaacctcttctatgtcaacaacaactggtatatttttatgcgactgcaccagattctctgcctgaggctgctacggatttgttcccaagccgaacggcaaattgaagaagaaaaccgagagagagaatgggaacgggaagtgctgggcataaagcgagacaagagtgacagccctgccattcagctacgtctcaaagaacctatggatgttgatgtagaagattattacccagctttcctggacatggtgcggagcctgctggatggcaacatagactcatcacagtatgaagattcactgagagagatgttcaccattcatgcctacattgcctttaccatggacaaactgatccagagcattgtcagacagctgcagcatatcgtgagtgatgagatctgtgtgcaggtgactgacctttacctggcagaaaataataatggggccaccggaggccagctgaacacacagaactcaaggagcctcctggagtcaacgtatcagcggaaagctgagcagctaatgtcagatgagaattgctttaagcttatgtttattcagagccaaggccaggtccagctgactattgagcttctggacacagaagaggagaattcggatgaccctgtggaagcagagcgctggtcagactacgtggagcgatacatgaattcagatactacctcgcctgagcttcgtgaacatctagcacagaaaccagtatttctccccaggaatctacggcggatccggaagtgtcaacgtggtcgagagcagcaggaaaaggaagggaaggaaggaaacagcaagaagaccatggagaatgtggatagtctggataagctggagtgtagattcaagctgaattcctacaagatggtgtatgtgatcaaatcagaggactatatgtatcggaggaccgccctgctccgggctcatcagtcccatgagcgtgtaagcaagcgtctacatcagagattccaggcctgggtagataaatggaccaaggagcatgtgccccgtgaaatggcagcagagaccagcaagtggctcatgggtgaggggctggagggcctggtgccctgtaccaccacctgtgatacagagaccctgcattttgtgagcattaacaagtatcgtgtcaaatacggcacagtattcaaagccccttaactgcaaagccagagcagataacttggggtgtgtgtggggatgtgtgtgtgggcctatgcactcacacactgaagaaacaaggaagatgcctttcaagcctcactgggcctctctgggacatggccacctgacctgtgtgtggctggtgcagcctggcaccaagtgggctacctgttaggaacatgaataccttacaaagctgaagctggaacttttcccaaagggttttgggtatagcctgccctggaggggaaggaagtccatgcaagcaaagacatgcagtttgcttgcacacaccagcagagctaagactggagtctcctgtggcctaactttcaatgagggaaccggatgctgttcacactttgactggatggagatgcatttacaaaacagactggagaaggacttaatactcagatggattggaactatcatggtcactgctcctctcccctccccacaaaaggaaaaaaaagctggatttgattttttttttctggtcactcgagcacatctaagatcacccattaggttttatctgggacctgcagtttggctttgggattgatcatcttgtggattttattcctgacgattcccttgctgcctacccttttctctcctctggttctcaacctcaacgagttcaaatcagttgtcctttttagctcccgtggaactgttttgtatctgcctctttactagtctaccttagtgccatccaccagctttactctctgacacacacacgcacacacacacacaattttaacttgtttttttgtacataatgtacatactgtcaattttttattaaaagaaatatgctttgatgtgctagcataactgctctagcttcttgtgtaccatagtactgtggcttcagatttagtacctatgaacagatgtacaagacatttattacactttttaccaaagggagttaccattgtagtacttttgtgtaaaacttgtcttcccctttgcccccaacttttttttttttttttttgtaaataaataaagcttggttcttacttaaggaataaactctcaacccacgtcccttgtcctcaccagaaaatactgtgaagcagggattttgacttcagttccttatccagggtagaaacaggattttgcttaaaatacttgttacttgtcccaaatcaaaatattccaaaatcttagaatacttaagtcttttagtacgtgtttttttcccttgttcaaataatctgaaaatattttatatttgggtaagttgtcaagctatgtagtttgtatttctatatattttttcttattcacattggtgatggatgggggtgagcaacttaaataccaaaccagtgtttgaaaaaaaagtgtgcataaggcatgtggtataccttataaatggagttgggagggagagaatttgaaatgggatacctatttttttaattacataaatttaaactagcagacatttaaacatgaatgattaggatttttctatgtggttaacctggactttctgaacaaagaccaactgagcccctcccagtactctggtggatttttcttcagcaaccattacgcaagtcttagttgtaaccagcaatgttctgtgtgttttatgtttgctttttagttaaaaatcaccaccaccaccaaaaagaaaaacaaaattttttggctcctggattttcaaaacacatggtagacctctctgattttaggcttttattgtttaaagacagtgtctcgctttatgacccacactggagtgcagtgccacgatcatagctcactgcaggcttgacctcccaggctcaagcagtcctcccacctcggcctcctgagtagctgcatgccaccacgcccagctaattttttaactttttgtagagacagggtcttgctatgctgcccaggttggtctcaaactcctggcctcaagctgtcctcccacctcggcctcgcaaagtgctgagattacaggtgtgagccaccctggcctgattttaggctttttttgtactggggagaagagactgtgagccaaagtgtagggtgccaaaaagagctttgtgggatgagattttagggcaaagctggggcagtgtctgacttggcggtggtcatgtgtactgatttaggggaaagatcttgaggttttctcaaataattcacctatccccgtgttccctcaagaaaggtcatgttgacctggaaccataggggaaattggtggggtgtgatcagggtcagccccagctgttgctgcccctgcagtgttttgtccagagcacttgcctgcaggtcaggataggatttcaaggccagttcaggagaaagtcccaacccaccagtgcaaccaacaaaagagtaagttttacctacagcctgggttttcacaagtagcatttttattcctcctgctgtctgacatctgagctccaagctctaaacccaacctgtattatatgcagcagcaggttatctttgttttaaatcacatttgttattctgtacttagtcacctttccgtgtgatctgcatttgaaatgttgtaaacttggtcagtatttccattaaaatatcagggctaaaaaaaaaaaaaaaaaa

SEQ ID NO: 4047 - DNA, 1650 bp, Homo Sapiens
  NM_015480
atggcgcggaccctgcggccgtccccgctgtgtcctggaggcggcaaagcacaactttcctccgcttctctcctcggagccgggctcctgctgcagcccccgacgccacctccgctgctgctgctgctcttcccgctgctgctcttctccaggctctgtggtgccttagctggaccaattattgtggagccacatgtcacagcagtatggggaaagaatgtttcattaaagtgtttaattgaagtaaatgaaaccataacacagatttcatgggagaagatacatggcaaaagttcacagactgttgcagttcaccatccccaatatggattctctgttcaaggagaatatcagggaagagtcttgtttaaaaattactcacttaatgatgcaacaattactctgcataacataggattctctgattctggaaaatacatctgcaaagctgttacattcccgcttggaaatgcccagtcctctacaactgtaactgtgttagttgaacccactgtgagcctgataaaagggccagattctttaattgatggaggaaatgaaacagtagcagccatttgcatcgcagccactggaaaacccgttgcacatattgactgggaaggtgatcttggtgaaatggaatccactacaacttcttttccaaatgaaacggcaacgattatcagccagtacaagctatttccaaccagatttgctagaggaaggcgaattacttgtgttgtaaaacatccagccttggaaaaggacatccgatactctttcatattagacatacagtatgctcctgaagtttcggtaacaggatatgatggaaattggtttgtaggaagaaaaggtgttaatctcaaatgtaatgctgatgcaaatccaccacccttcaaatctgtgtggagcaggttggatggacaatggcctgatggtttattggcttcagacaatactcttcattttgtccatccattgactttcaattattctggtgtttatatctgtaaagtgaccaattcccttggtcaaagaagtgaccaaaaagtcatctacatttcagatcctcctactactaccacccttcagcctacaattcagtggcatccctcaactgctgacatcgaggatctagcaacagaacctaaaaaattgcccttcccattgtcaactttggcaacaattaaggatgacacaattgccacgatcattgctagtgtagtgggtggggctctcttcatagtacttgtaagtgttttggctggaatattctgctataggagaagacggacgtttcgtggagactactttgccaagaactacattccaccatcagatatgcaaaaagaatcacaaatagatgttcttcaacaagatgagcttgattcttacccagacagtgtaaaaaaagaaaacaaaaatccagtgaacaatctaatacgtaaagactatttagaagagcctgaaaaaactcagtggaacaatgtagaaaatctcaataggtttgaaagaccaatggattattatgaagatctaaaaatgggaatgaagtttgtcagtgatgaacattatgatgaaaacgaagatgacttagtttcacatgtagatggttccgtaatttccaggagggagtggtatgtttag

SEQ ID NO: 4048 - DNA, 2421 bp, Homo Sapiens
  NM_015481
gtgtacactatgtgcactgagggtgacacttctgagtgtgggggccctggctagggagtgggactggcaggcttgggtggggttcccaagctttaatcttcctaccccacagaatgttttctctgcccttcaggcagcctgagccgggcagggcccctgcctctgctacggcagcccccgatcatgcagcccccactggacctcaagcagatcctgcccttcccactcgagccagcccctacccttggcctcttcagcaactacagcaccatggaccctgtgcagaaggctgtgctctcccacacttttgggggacccttgctcaagaccaagcggcccgtcatttcctgtaatatctgtcaaatccgcttcaattctcagagccaggctgaggcgcactacaaaggtaatcgccacgcccgacgagtcaaaggcattgaggctgccaagaccagaggcagggagcctggcgtccgagaacctggagacccagctcccccaggcagcaccccaacaaatggggatggtgtagcaccccgtccagtttccatggagaatggactggggccagccccaggatccccagagaaacagcctggctccccatcccctcccagcattccggagactggtcagggtgtaaccaagggtgaaggggggactccagccccggcttccttgcctgggggtagcaaggaagaggaggagaaagccaagcggctgctctactgtgctctgtgcaaggtggctgtgaactccctgtcccagcttgaggcacataacaaaggtactaagcacaagacaattctggaggcccgaagtgggctcgggcccatcaaagcttaccctcggctggggcctcccaccccgggggaaccagaggctcctgcccaggaccgaactttccactgtgagatctgcaatgtcaaggtcaactcggaggtccaactgaaacagcacatctccagccggcggcaccgagacggcgtggccgggaagcccaacccactactgagccgtcacaagaagtctaggggcgccggggagctggcgggcacgctgactttctccaaggagctgcccaagtccctggcgggcggcctgctccccagccccctggcggtggctgcagtgatggcagcggcagcaggctcgccgctgtccctgcgcccggctccagccgcacctcttctccagggaccgccgatcactcaccctctgcttcacccggcccccggacccatccgaactgcgcacggacccatcctcttctccccgtactgacctcaaccctgaacccctcccattcaactccccacctccagccgggacccaggcgtccgggctcccagcccgcccctcctcccggcactccctaaatgatctctccttccccccccccaccccgagatacggggttccaggaaaggggaggggtagcgggggaggggggcttcagaagggggggaacaccccagatctcagggaaccccgccccctgcctttccctctcccctagaaaagggggggccgtctcacccccgagcccccttggagacaccccccctcccaaaagccatgtccatccagcccttccccccaaacctagcacaaaacggggttcacaagccatggtcggggtccgggggggacagaaatggattttcttggcaataagcggactctgggactccggctccctaccccaaactgaagcgcttccgtgaacacccccgtcctccgtagggggaggggagcaggcgggatcctgggtccctcataagcactttggttttaccgcctgcaacctcactgtgcccgccccgcaccatgccctagccccaggtctagccgggcccattgcagggggcagcacttgggggcatctccggcacttgggtgggaccaaggagatgccaccatagacctttccctcgccttcttcctccctagtccgggttccattcttttcaccagcacccatcgcccaaggggtaccgaggggggcaaggggtgtccagtccaagcccacccccgcctcgccttccgcaaaactgtgagcaaaaagcaatagaagcctcgcccccgcccttccccttcgcaggattcgccgagtctgtagcctccccgatccaagttcctagacctcatggctgtcccctcccaccagtcacctccactgcacaactcgggcgggggtgtgacacctctcccccacccccgactccgtggtttccgtatcgtcaacccttcagccgccgacccgggaggggtctggcctacactggtcttccccttcccatcaactctttctgcttgacaatgtagcaacccaggccccccacccacggtcctcccctttttcctctccctgacaataaagtctgaatttgttctgccctccaaaaaaaaaaaaaaaaa

SEQ ID NO: 4049 - DNA, 1250 bp, Homo Sapiens
  NM_015485
agtgctgctcctggccggtggaggcggcggctgcggcagcggaaggggaagcgctgaggcggtggggcccacagccatggcggagcctgtgcaggaggagctctcggtcctggccgcgattttctgcaggccccacgagtgggaggtgctgagccgctcagagacagatgggaccgtgttcagaattcacacaaaagctgaaggatttatggatgcggatatacctctggaattggtgttccatttgccagtcaattatccttcatgtctacctggtatctcgattaactctgaacagttgaccagggcccagtgtgtgactgtgaaagagaatttacttgagcaagcagagagccttttgtcggagcctatggttcatgagctggttctctggattcagcagaatctcaggcatatcctcagccaaccagaaactggcagtggcagtgaaaagtgtactttttcaacaagcacgaccatggatgatggattgtggataactcttttgcatttagatcacatgagagcaaagactaaatatgtcaaaattgtggagaagtgggcttcagatttaaggctgacaggaagactgatgttcatgggtaaaataatactgattttactacagggagacagaaacaacctcaaggagtacttgattcttcagaaaacctccaaagtagatgtggactcaagtggaaagaaatgcaaagagaaaatgattagtgtactgtttgaaacaaaagtacagacagaacacaaaaggtttctggcatttgaagtcaaagagtattcagcgttggatgaattacaaaaggaatttgaaactgcaggacttaagaagcttttctccgaatttgtacttgctctggtaaaatgaaatggaagacaggaatcttttagtaaaatagcagtgttttttgttgtttttgcattggatttggggagtggttaattgaaatagtcaattttaaagtttctctgaagcaaaatgataggcatcattctaacttcaggaacaaaagccagttctgttttatgaaatattaaacatgaagaaaacttgtatattctaatgtttgccaggaaaggctaggttcagtagatgagacattatttaaaagataaatttaaaaagatggtaaatgaacacttgtttttatagacaatatttgtttgaaactatgtaattttctggctaattttcttgtaattaaatgattttttaaaaaagaaaaaaaaaaaaaaaa

SEQ ID NO: 4050 - DNA, 4631 bp, Homo Sapiens
  NM_015490
gccagaggagcggctccggccgccgcgcctgacccttgtccggggtcttccgcacagtgggctgagggccatgtcagttttctgccacctacaggatagaccatgaagctgaaggaacttgagcggccagctgtccaggcatggagcccagccagccaataccctttgtatctggccacaggaacatctgcccaacagctagattcctccttcagcacaaatggcacattggaaatatttgaggttgatttcagggacccttctctggacttgaaacacagaggagtcctttctgccttgagcaggtttcacaagctggtctgggggagctttggcagtgggcttctggaaagctccggggttattgttggcggcggggacaatggcatgcttattctatacaatgtgacccacatcctgtcttcggggaaggagcctgtgattgctcagaaacagaagcacacgggggctgtcagagccctcgacttgaatcctttccagggcaacctcctggcttcaggggccagcgattctgaaatcttcatttgggatctgaataacttgaatgtgccaatgaccctgggatccaagtcacagcagcctccagaggacatcaaggcactgtcttggaaccggcaagcccaacacattctgtcttctgctcaccccagtggcaaggcagttgtgtgggatctcaggaagaatgaacctatcatcaaagtcagtgatcacagcaacaggatgcactgctcaggcctggcctggcatcctgacatagccacccagttagtgctgtgctcagaggatgatcgacttcccgtgattcagctgtgggacttgcgctttgcctcctcgcccttgaaggtgctggagagccacagcagggggatcttgtcagtgtcatggagccaggctgatgctgagctgctgctcactagtgctaaggacagccagatcttgtgccggaacctggggagcagtgaggtggtatataagctaccaacacagagcagctggtgctttgatgtgcagtggtgccctcgggacccttcagtgttctctgctgcctccttcaacggctggatcagtttgtactctgtgatgggtaggagctgggaagtccagcatatgagacaggctgacaagatctcctcttccttcagcaaaggccagcctctcccaccactgcaggtgccagagcaagtggcacaagcaccactgatacctcccctgaaaaaaccccccaaatggattagaagaccaacaggtgtttcatttgcttttggagggaagctggttacttttggcctccccagcacccctgcccatctggtgccacagccttgcccccgcctagtcttcatcagtcaagtcaccacagaatctgaattcctgatgcgatcagctgagctgcaggaggccttgggatcaggaaatctactgaattactgtcagaacaagagccagcaagctttactgcaaagtgaaaagatgctgtggcagttcctgaaggtgaccttagagcaagactccagaatgaaattcctaaagcttttaggatacagtaaagatgagcttcagaagaaggtggccacatggttgaagagtgacgtggggctaggtgagagtcctcagcccaagggaaatgacctcaacagtgacagacaacaggccttctgcagccaggcctccaaacacaccacaaaggaagcctctgcttcctcagccttctttgatgagctggtccctcagaacatgactccttgggagatccccatcacaaaagatattgatggactcctaagccaggctctcctgcttggggaactgggtccggccgtggagctgtgtctgaaggaggagcgctttgctgatgccattatcctggcccaggctgggggtacagatctgctgaagcaaacacaggagcgctacttggccaagaagaaaaccaaaatctcctcgcttctagcctgtgttgtgcaaaagaattggaaggatgtggtgtgtacctgtagcctgaagaactggagagaggcactggctttgctactgacatactcaggcacagagaaatttcccgagctctgtgacatgctgggaactcgcatggaacaggagggcagcagggcactaacctccgaagccagactctgttatgtgtgctcagggagtgtggagcggctggtggagtgctgggcaaaatgccaccaggctttgtcccccatggctctgcaggacctgatggagaaggtgatggttcttaacaggagcttggagcaactgcggggtcctcatggggtgagcccaggccctgccacaacctacagggtcactcagtatgccaacctcctggcagcccagggcagcctggccactgccatgagctttctacccagggactgtgctcagccaccagttcagcagctaagagatcggctttttcatgctcaaggttctgctgtcttgggccaacagtctccccctttccccttcccccggattgttgtgggagctaccctccactctaaagagacatcatcttacagattgggatcccagccttctcaccaggtcccaactccatctccaaggccaagggttttcacccctcagtcatcaccagcgatgcccttggcaccttcccatcctagcccttatcagggtcccaggacacagaatataagtgactacagggcacctgggccccaggccatccagcctttgcctttgagccctggggtaaggcctgcttcatctcagccacagctattaggagggcaaagggtgcaagttcctaacccggtgggattccctgggacatggcctcttcctggttcccctctacccatggcatgcccaggcatcatgcgacctggctctacctccctgcctgagactcctagactgttccctctgcttcctctgagaccactaggtcccggccgcatggtctcccacaccccagcccctcctgcaagcttccctgtgccataccttccaggggacccaggtgccccatgctctagtgtcctcccaaccactggcatcttgactcctcacccaggacctcaagattcctggaaagaagccccagcccccaggggaaacctccagaggaacaagctgccagagacatttatgcccccagcaccaattactgctccagttatgagcctcacccctgagctacaagggattcttccctcacagccccctgtctccagtgtgagtcatgctcccccaggagttccaggagaactcagcctgcagcttcagcacctgccacctgagaagatggaaaggaaggagctgcccccagagcatcagtccttgaagagcagctttgaggcgcttctccaacgctgctccctgtctgcaactgacttaaagacaaaaaggaagctggaagaggcagcccagcgtctggagtatctatatgagaagctctgtgaggggacactctcacctcatgtcgtggctgggctccatgaggttgcccgatgtgtggatgcaggaagctttgagcagggccttgcagtgcatgcccaggtggcgggctgtagcagcttcagcgaggtgtccagcttcatgcctatcctgaaggctgtcctcatcatcgctcataagctgctggtctaaaccaggcagcctctcttgctaggaggccacttctgctgttacataactcctccctgcagaagaggggacttctgcaacagattctgtttctttttcccgactcttttccttgctgccaggtatgtgatgctgtaggcttggctccaaaccagctgagtgcctgctttttactcctttatgtctggccttctaggatctgtccaagacactctcaggcctggaggcagggcatagaatcagttcttcactctccctaatactacactctgtaaggacctggggcaggatatcttctcccccagggatcttctatttaagtggcttctgagagggtgaacaggattgttacttttaagcctacctctgctgtgacccatcatgtgggtcttttgtttctcccttctgtggtttatgagcctgcccttaccttttccctgcctctgacttggtatttccaggtccgtatttctctgtagcccagggtctggggtagagctgactgctgttcaccctttgaacaactcatggacgtgagggatgggtgctgagcagaaccaagagaggaaactttggcgctgttaaaatggaatttctcatctgccggcattattaagggtgggctaggttggatggaaggtgaaagggatgaactgccttttgctggaagctgtcttaggctgtgagacaggagcaggggaaccacagcctatggggaactgcccttgactccacctatgttggagccttagcccaaggccattccttctgtgatgataaagcccagttctggaattggagccatattaaggaatgattctcttccagcgctgctcctcaagggttgggggtccttctccctcgcagccaccacatgtctcagggctaccttctccgattggatttgcatttgtggcactgtctttgatgcagtgatgtacttaatggtgcaataaagctgcttcgatttggtaaaaaaaaaaaaaaaaaaa

SEQ ID NO: 4051 - DNA, 4443 bp, Homo Sapiens
  NM_015492
gcagacggcgcccagcggcggcgcgaacggcagctaggagggttgctccgggcttggtgctcactgcgacttcccgcgcagggcccggtcggactaggacccgcggcctgagagacgctggaggatgcggacgcggaggccgcctggggtagcggcggcgggagtcctggcgctctgcaggtcagaagttgagtagcaggggcctaggagggctcgaagccttcacagcgatggcagagaagcgacccctgagaaccctggggcctgtgatgtatggcaagctgccccgcttagagacagactccgggctcgagcacagcctgccccactctgttggtaaccaggatccctgcacctacaaggggtcctacttctcctgccccatggcgggtactcctaaggccgagtctgagcagttggcgtcctggaccccatacccacccttgtactctaccggtatggcaggacccccacttcaggcagacaacctgctgaccaactgcctgttctaccgctcgccagcagaaggccctgagaagatgcaggactccagccctgttgagctcctgcccttcagtccccaggctcactcctacccaggcccaccactggcagcacccaaacctgtctaccgcaaccctctgtgctatgggctctcaacttgtctgggggaaggagcagtgaagaggccactggatgttgactggactctggcgactgggcccctgttgccctcagctgacccaccctgctctctggccccagctcctagcaagggccagactctggatggcaccttcttgcggggggtgccagctgaggggtccagtaaagactcctcagggagcttctccccatgccagcccttcctggagaaatatcagaccatccacagcacgggcttcctggcctccaggtacacaggtccttaccctaggaactccaagcaagcaatgtctgaggggccctcaagtccttggacccagctggcccagcccctggggccaccctgtcaggacaccgggcccacccactacccaccaccccaccacccaccaccccaccctccacaggccctgccttgccctccagcctgtcgccacccagagaagcagggcagctacagcccagcactcccactgcagcctctggggggccacaaggggaccgggtaccaggctggtgggctgggcagcccctacctgaggcagcaggcagcccaggcaccttacattcccccactggggctggacgcttacccctacccctctgcccctctcccagcaccctctccaggcctcaagctggagccgcctctcactccacggtgcccattggactttgccccccagacactgagttttccttatgcccgggatgacctctctctctatggagcatcccctgggcttggagggacaccaccttcccagaacaatgtgagggctgtgccacagcctggtgccttccagagggcatgccagcctttgccagcgagccagccctgctcagagcctgtgaggcctgcacaggaagccgaagagaagacctggctgcccagctgcaggaaagagaagctccagccccggctcagtgagcactctgggccgcccatcgtcatccgagacagtccagttccctgtacccccccagcactgcccccctgtgcccgggagtgccagtctcttccacagaaggaggacgcaaggccacccagctctccaccaatgcctgtcattgacaatgtcttcagcctggccccctaccgtgactatctggatgtgccggcacccgaggccacaactgagcctgactctgccacagctgagcctgactcagccccagccaccagtgaaggtcaggacaaaggctgcagggggaccctgcctgcccaggagggcccctcagggagtaaacccctaaggggctcacttaaggaggaggtagccctggatttgagtgtgaggaagcccacagcagaggcctcccctgtcaaggcttcccgttctgtggagcatgccaagcctactgcagccatggatgtgccagatgtgggcaacatggtgtcagatctgccaggcctgaaaaagatagacacagaagcaccaggcttgcctggggtgccagtgaccacagatgccatgccaaggaccaacttccacagctctgtggccttcatgttccgaaagttcaagatcctccgtccggcacctttgcctgcagccgtggtcccgtccacgcccacctcagctcctgctcccacacagcctgcacccacccccacatctgggcccattggactgcggattctcgctcaacagcccttgtctgtgacctgcttcagcctggcactgcccagccctccagccgtagctgtggcctcccctgcccctgctccagctccatcccctgctccggctcgagctcaggctccagcttcagcccgggatccagctccagctccagctccagttgcaggccctgctccagcatctacttcagccccaggggactccctggagcagcattttacaggactacatgcgtccctgtgtgatgctatttctggctccgtcgcccactctcctccagagaagcttcgcgagtggctagagacggctgggccctggggccaggctgcgtggcaggactgccagggtgtgcaggggctgctggccaagctgctgtctcagctgcagcgcttcgatcgcacccaccggtgccccttcccccatgtggtgcgagctggcgccatcttcgtgcccattcacctggtgaaggagcggctcttccctcggctgccacccgcttctgtggaccatgtgctgcaggagcatcgtgtggagctgcggcccaccacgctgtcggaggagcgggcactgcgggagctcgccctgccaggctgcacctcacgcatgctgaagttactggcgctgcgccagctgccggacatttaccccgaccttctcggcctgcagtggcgcgactgtgtacgccgccagctgggtgactttgacactgaggctggagctgtgtcctcctcagagcccactgtggccagagatgagccagagagcctagccctggctcagaagtcaccggcccccaaggtcaggaagccaggcaggaagccaccaacccctggcccggagaaagcagaggcagctgctggggaagagtcctgtggtgcctcccctacccctgctaccagtgccagcccacctggccccacactgaaggcccgcttccgcagtctgctggagaccgcctggctcaatggcctggctctgcccacctggggccacaagtcctcaagaccagaccagccctcaccctgcccacagctgctggacagccagagccatcacctgtagcactggttgccagtgctgtgtgtatagcagtcactctccacccttcccttctgcctgcccagctgccccggggccacgagtggatgctggggctgtggctgctcccctggaggggttccatctctgaccctgtggcccattcagggtgggctgaagagcccctgagcttttaacgtgagggtctttattggataggactactccctatttcttgcctagagaacacacatgggctttggagcccgacagacctgggcttgaatcccggctcgtgttcttgctgcaggacctgggcaagaaacttcacctctgctgagccctcattccccatgtgtaaaatgggacaacgcaacctacctcacagggttgttgtggggatgctgcctgatacataccctgtcaccatttggtctctgcttcctctctgggacagggcctagaattggaggcagagaaccttcctatagaaagtcttcgtgtgtcctaggacttggctatcgtagagtggtaccttaggcagtggatgtgactcacactttcaggagtcaccccccagcatttggggttgggttggccctactccagcctggagctccctgagggagcctgcactccctgctcccaatccccgctactggtgcagggatgcagcctggagctggcgtccttgttctgggcctgctgctgccgccaccccaggaggccccaggcctgtcctgaattgacatcagtgcttccctgaactgcctcccccacccctggcattatcccaggaaacttatgttttctagaagctaagcagctgctgggactcagggactggtgcaggtaggctgagtggcagctcagtcctagaaggtctctgaagatctggactgaggaccctgctactccccaagccagagcccatcagccaggcctgctgtgagccacctgcctgtggagtgctgagctcaaccaaaggctggcaagctctgggcctcatttaagggattctgatgagccgatgggccctggaggcagcccattaaagcatctggctcgtttttggaaaaaaaaaaaaaaaaaa

SEQ ID NO: 4052 - DNA, 4966 bp, Homo Sapiens
  NM_015493
gtaagcctcagccggtgctgcaggcagtctgactcgcagtccctcaagtgacttccaaggagcatctgtagaaaagaagatggcccaggtcctgcacgtgcctgctcccttcccagggacccctggcccagcctccccacctgccttccctgccaaggaccccgatccaccctactccgtggagaccccctatggctaccgcctggacctggacttcctcaagtacgtggatgacatcgagaagggccacacgctgcgacgcgtggcagtgcagcgccgcccccgcctgagctcgctgccccgtggccctggctcctggtggacgtccactgagtcgctgtgctccaatgccagtggggacagccgccactcagcctattcctactgcggccgtggcttctaccctcagtatggtgctctggagacccgcggtggcttcaatccgcgggtggagcgcacgctgctggatgcccgtcgccgtctcgaggaccaggcggccacacccaccggcctgggctccctgacccccagtgcggccggctcgacagcctccctggtgggcgtggggttgccacccccgacaccacggagttcaggactgtccacaccggtgcctcccagtgccgggcacctggcccacgtgcgggagcagatggcgggtgccctgcggaagctgcggcagctggaggagcaggtgaagctgatccctgtgctccaggtgaagctctcggtgctccaggaggaaaagcggcagctcacagtacaacttaagagccagaagttcctgggccaccccacagcgggccggggtcgcagcgagctctgcctggacctccccgatcccccagaggacccagtggcactggagacccggagtgtgggcacctgggttcgagaacgggacttgggcatgcctgatggggaggctgccctcgccgccaaggtcgctgtgctggagacccagctcaagaaggcgctgcaggagctgcaggcagctcaggcccggcaggctgacccccagccccaggcctggccaccgccggacagcccggtccgcgtggatacagtccgggtggtagaagggccacgggaggtggaggtggtggccagcacagccgctggcgcccccgcacagcgggcccagagcctggagccttacggcacagggctgagggccctggcaatgcctggtaggcctgagagcccacctgtgttccgcagccaggaggtggtggagacaatgtgcccagtgcccgctgcagctaccagcaacgtccatatggtgaagaagattagcatcacagagcgaagctgcgatggagcagcaggcctcccagaagttcctgccgaatcgtcttcgtcacccccggggtccgaggtagcctcccttacacagcctgagaagagcacaggccgagtgcccacccaggagcccacccacagggagcccaccaggcaagcagcctcccaagagtccgaggaggccgggggcaccgcacctccgctgtcctcccctccaggcgggcccccggcaggcgtgcgatctatcatgaaacggaaagaggaggttgcagaccccacggcccaccggaggagcctccagttcgtgggggtcaacggcgggtatgagtcgtcatccgaggactccagcacagcagagaacatctcagacaacgacagcacagagaacgaggccccagagccgagggagagggttccgagtgtggccgaagccccccagctcaggcctgcagggacggcagcggccaagaccagccggcaggagtgtcagctgtctcgagaatctcagcacatacccactgctgagggggcatcaggatcaaacacggaggaggagatcaggatggagctaagccctgacctcatctcagcctgcttggccctggaaaagtacctggacaatcccaacgccctcacagagcgggagctgaaagtggcctacaccacagtgctgcaggagtggctgcgcctggcctgccgcagcgacgcacaccccgagctggtgcggcggcacctggtcacgttccgggccatgtctgcgcggctgctggactacgtggtcaacatcgccgacagcaacggcaacacagccctgcactactccgtgtctcatgccaacttccccgtggtgcagcagctgctcgacagcggtgtctgcaaggtggacaaacagaaccgtgctggctacagccctattatgctcaccgccctggccaccctgaagacccaggacgacatcgagactgtccttcagctcttccggcttggcaacatcaatgccaaagccagccaggcaggacagacggccctgatgctggccgtcagccacgggcgggtggacgttgtcaaagccctgctggcctgtgaggcagatgtcaacgtgcaagatgatgacggctccacggccctcatgtgcgcctgtgagcacggccacaaggagatcgcggggctgctgctggccgtgcccagctgtgacatctcactcacagatcgcgatgggagcacagctctgatggtggccttggacgcagggcagagtgagattgcgtccatgctgtattcccgcatgaacatcaagtgctcgtttgccccaatgtcagatgacgagagccctacatcatcctcggcagaagagtagccgtgagggaggcggggaccagccagaccgggagcaaaccgtcccttgtccccgtctcctccctgttcccgttcctccctggcccaccccactcacactccccaaggcccacggctcaaaggcaagcgagctctccctctgcttccctgggggagccccgacggccacaggactccagctccaagtgggttttcttggctcccctgttcaaagtggccacagcgcagaccgaagcaaaattcttgtatacattggcgccagggctgatgctggggtgtgggttttatgaagaacattgagaacaatcagctggtaattatggatggaggaagagggagaggaaaaaaatattgtatttttgaatcattgttgcaggagggggtgggaatcttaggatttgttgccagatttgaaagtcactggaacttgcatattttcattttaatcctaagtgttattacgcaccagttggggttcacccttcatcccccacatttaattgtctgatatagaatagtgttgtgtccactgccccgctagacggctttcttaggggaattttcttctggttgtttcacaagacagattctgtccttgtcacccgggacagaaaactcagtcttttcaccctcattcagatgaagggactcaggacaggctctgtgacttacagggacccaatcaattcacaatgagaaattaccggccaggcgtggtgactcacgtctgtaatcccagcactttgggagggcaaggcaagagcttgagcttgagcctagacgttaaagaccagcctgggcaacacagcaagacccatctctacaagaaatttaaaaactagccaggcgtggtggtgcgcgcctgtagtcccagctacttgggaggctgagccctggaggtcgaggctacagtgagctatgatcacaccattgcacttcagcctgggcgacacagcgagaccctgtctcaagaaagaaaagaaaaagagacaaattacccagaaacccctcccttccccacatggaggccttggcaaatgttaattttcctagaaaatccttcagacctgaagacgcaggaaaagaatctggctctcagggtggcttctgcgtccccgccgccaggccccagactatggtcacagggccgtcctgttcctccccgggactccagaatttctctcctcaaaggaaagaaaacagggcatgcgcttgttggcaaaacgcagggccggctcccaaaaaccccatgtgtgtacgattaaaagttggccgtccccaggcctcccagcgcaaacttaaagagacagggctttgctgaaaaccaaacatgggccagctgggctttttaacaacctagagactttccggagctgcctggaacagagcctgcgggaaacggggcttgccagagacactcacagtttccttcatggcctgttttggtcccctaagaatctccacatcattgtctttcttgtgccttttccttggtgagcaacagaaagggaagggttccaagcctctaaaaatgtgctttgtgatcaggagtgcgctccaaaccaaatacgcgcgctgccctttcgaggccagtgagctcagcctccaaggctttaaagccacatttcagcaagagaaagcgctgagagctcgcaggttcattaaagaaggcaaagcactggtttctctccttagaaaagtaggtttcttggcttgatgtagactggcttgctttgatttttagtgaagggaatgtacgtaaaacaaaatagggcttggctggtcaaaggagacaagcaggatggatggatggatggatggatggatggatggatggatggatggatgaatagatagatggtgtttgcatgtaaattgcagagaaaacaaaaccaaagctgattggaaacaattaattgtgggtgtctgagggggaaggtcgcagctttgggcagctttgagaagcggtacaagagttctgtgcctgtgtgtccagccctggagccagccagtgcatttattttaagctcttagaagcaactccttggcccaggaatgcgtgacccctgagatgggtccacgcatctctctacacttccttctctccgtgggatactggactcgtgcctctgcgcccattctcttctcacgcatatccatgagctttaatttcactttctgatcacggtacgtccataaagccagtattacacttaaatgaagtattcttttttgtaatcgttttttttagaaggtaaacaaatttaataaagctaccaataatgttgatgaaaaaaaaaaaaaaaaa

SEQ ID NO: 4053 - DNA, 6349 bp, Homo Sapiens
  NM_015500
gctcgcgcccctgttccgcaggtgtgcggggcttgcgcccagcccgggccgcggccgccgcgcgtttcctccccgcttgcccgcccagaggcccccggccacgctcctcgccgggctccgaccccgccgcgccccctccacgcccccagcgcgctgtggccgcagccagcgcgtgtcctgagtccgccgttccggcccggggctgccggggaagttggggcgaggcgggccggggatgcgccatggccatggcccggctgggctcgtggctcggggaggcgcagtggctcgcgctggtgtcgctcttcgtcgcggccctggccacggtaggcctgtacctggcgcagtgggcgctggccagggcgcgaccccagccccagcggcgggcggtggagcctggagaggggccgcgcccggggtccgacgcgctgctctcctggatcctgacgctgggcagctggaggagccagtggcaggcggcctgggtgaccgccctgaacgaggaggccgagaggaaagggggcccacctttcctgtcctttgaggaggacccgcggcagcaggcactggagctggtggtgcaggaggtctccagcgtgctcaggtcggcggaggagaaggtggtggtctgtcacgtggtgggccaggctattcagttcttggtcagcgagacgcctgccttgggtgctggatgccggctgtacgacatgcggctctcccctttccatttacagctggagttccacatgaaggagaagagagaggacctccagattagctggtctttcatcagtgtgccggaaatggccgttaatatccagcccaaagcactgggggaggaccaggtggctgagacaagtgcgatgtctgacgttctcaaggacatcttgaagcatttggctggttctgcctctccatcagtggttctgattaccaagcccacgactgtaaaggaagctcagaacttacagtgtgctgcatctactgctcaggaatcctgtcctcctaaacctccaagggctcacgagctgaagctactggtgaggaacatccacgtcttgctgctcagcgagcccggtgcctcaggccacattaatgcagtgtgcgtcgtgcagctgaacgatcctgttcagaggttctccagcaccctgacgaaaaacactccggacctcatgtgggaagaggaattcaccttcgagttgaatgccaagtcgaaggagttacacctgcagatttcagaggctgggcgatcctcagaaggtctgctggcgacggcgacagttcctctggacttatttaagaagcagccttctgggccacagagcttcacgctgaccagcgggtctgcctgcggcagctcggtgctgggctcggtcacggcagagttctcttacatggaacctggtgaattgaaatcctggcccatccctccccctgttcctgctgcaaaaatagaaaaggaccgcacggtgatgccctgtgggactgtggtcactactgtcactgctgtgaagaccaagcctcgcgtcgacgtggggagggcgtccccgctgagctctgattctccggtgaagactcccatcaaggtgaaggtgatcgagaaggacatctctgtccaggccatcgcctgccgcagcgcccccgtcagcaaaacactctcttcttcagacacagaattgttggtgttgaatggttcggatccagtggctgaagtggccattcgacagctcagtgaatcttcaaagctgaaactcaagtcgccacggaagaaaagcactattatcatatcagggatctccaagacctcactatctcaggaccacgacgctgccctgatgcagggctacacggcctctgtggacagcacccaccaggaggacgccccatcccatccggagagggcggcagcctctgccccgccagaggaagccgagtcagcccaggcatcccttgcccccaagccccaggaggacgagctagactcctgggacttggagaaggagccacaggccgcggcatggagcagccaggtcctgctggaccccgacggtgatgagctgtcagagagctccatgagtgtcttggagccgggcactgccaaaaagcataaaggaggaattctaaggaaaggtgcaaagctgttcttccgccggcggcatcaacagaaagacccaggcatgagtcagtcacacaatgaccttgtgttcctggagcagccagagggttcccggaggaaaggcatcaccctcaccaggatcctgaacaagaagctgctctccaggcacagaaacaagaacaccatgaacggtgcccccgtggagccctgcacgtagggcctgaggtcatcacctccaagccagaagacgtgcacccatgttaactaccctcaccaggacgcagccagtgtgtccgccggatgtccagatgccccgcttgtcttgctgggtttcttccaaccatctcgtcatttaaagggaaaacaaaatctgagtctccagccaggaggcttctcccagagaggacaaaaaagcccaacttgccaccagatgctaaatgagacttgacagctgcagagcttgggctgtgctcatagctaagggttagggttcaatattagaaggagattaacattataagtgaaataatatgctctaatagattgtggagggcaggtttgagggacttagtttacctattctacactaacaagtgttgttttgggtccatgcctggaccatgtcacaaaaaggaggtgcccccctgtgctgtcactgtgaatggaaaggatgggtcacctctcttcatctgctgcttggaataaaaaatgcagctggccctgagtacagggaagtggaacataggcaggattttggattaatagagaaattttgataagaatggagacgctacgacagatgtaggaagtcatctacctttgatattagccatagaacttgaacactaactatatcctatgcatagtatgcagaacacttttctaagtttactttgagcctacttgcaagtggaagatatatatattctcacatggtttttacatttttctctatcgtgttaaaagctctaataatgctagtggagcagttgacatccagggttttttttcctgcctgtcatacttgctaaacaagagcacagcgggcctgtcagatgaagtcaggagccatacgtgaccgctcgtagaacacagtaaccaaacacatacatggattttgccaagtgctgccagtagccaaaacaaagtctttttagggcaatagaggaaattattttgtgtctcaggtgtcagtcttaggaatggaagtttaataacaaatgggccaaactcgcaggacattccttctatgagcgcttcagaattttgctgtgaacagtcctcttggacacaggttggggtgcccttgtttgggtttgttttggtggaaaacatcacaaacctggcacaccatttgaatatccctaatatcattccagtcgctttcctcatcagttgcctttctatttcagttcattcacagatctcacttctgaatgtgccacttccagtagacatgctggtcaaagagcagtcatcattggggtgaagtgttcttgacagtttaatatgattcacttttctccaaagacatgtaaaaggctgttacgaaagcttggcttctgtcatggagacggaaatgggcaagcttccttccgtagcctcttgttaatccttaaacattaaatatttcgggggtaatagagccactggtgagtaaaaacctatataaaaaccaaaattataggattttttcttttttagtaaaaaccggtatcaaaaccaaaattataggatttttttcttttttagtaaaaacctatataaaaaccaaaattataggattttttcttttttagtaaaaacctatatgaaaaccaaaattataggatttttttcttttttagtaaaaacctgtataaaaaccaaaattataggatttttttttcttcttttttagagagagagattagaaaacgacattaggaatttcactttaaaatgcgcattacaaacttcttaggtgttccaggaattatcaagtgactttaaaatgacttttccaacctgctttgtttttaaaaattatattccagttttaatcattgtaaaaaaagcacctggagtttcaaaacatgtgaatactaccaagtttctgtccccaaagtcaggcatcactgttagtcttttgggacagatgggacagatgttcactttaatgttttacttgaagttttactgctctttgccatgtggtaaaaagaggctgagacatatttaagaattccaagaggatattatgtgtcagaatttcagacactgatgagaagtttttaattgttcttttttatttgattttggaattcaggtgcactctattcaagtgcaaggatatcagaagtttttttttatttaaaaaatttttttttcgagatggagtttcactctgttgcccaggctggagtgcaatggcagcttactgcaacctccacctcctggttcaagcgattctcctgcctcagcctcccaagtagctgggattacaggcacgcgccaccacacctggctaattctatttagtagaaatggagtctcaccatgttggtcaggctggtctcgaactcctgacctcaggtgatccacccaccttggcctcccagcgtgctgggattataggcatgagccaccaggccggccccaggattttatattaagccttcttgctctcaaaaaaaaaaaaaggttttaactattccatttccagatgaatcccatgagcgctgcttactgttgaataccaaggtctagggctctgcttcctgtagacacgcacacgttgtctccatccaatggccttttctgaagttacagaaaacaccaacatgggagggagtttatgaagcaaaggcaaaggcaacacgtcggctagcttcagggtagcaccgtgagaaatgggctgtattgatactgtgaatgtttgttttccaagctgttttatacaggtttgttttttcatggtgtagggtatttatgacaaagtaaatgttgtgaaggttaaagataaattaagattatccaccaaatgctaaaaatactgatgtgtaaatcacctttatcgcctcacctcttctacaagcttttgtggcttgagggcttttgtttttggcttttgtctggatgaaagttttgcccagttgtgttttaaaaacaattcctcatgaacactaagattaattgtgtctgtatctctggaactgggtgctcatgttggttttaatgagcttgcaacccttccccgtttgctttgtttaaggaggtgcctctgttctttgtggaggagtgaaatggagctttaagtgtgtgtgtgtgttatgtgtgtttgcacacacgcgtgtgttattgtagcaataacaaaaagtagccatctccttgttccagctgaaaacctgctgtgagagttttgacagagcactttattttcgtcaagtttcaagtctgagttcaaaaccagccctgatcccttatgaccaactgctactcgaccagtcgccactcagtggccacctggtgcccgtttagatttttgcttgggttttactggccacctctatagacgagagttgcaaagttgctttgagcagagagggaaagattaatttacactgctggccaccgaaggcaggtgtttcctgggtagtaatctcacggctcttgatctggaaacttcagagtacaaattggtggatggtggaaggcaggacacgtatctctgtctgacggaaaacagacctcggggctggcgtaaaccctgctgccaggccctctccccactgccccaaaccggcctagacacgaagaccaaagcagcctgcacagggcaaggcccccgcggaatcctgcagagcaaactcaggttaacttgggtccatgaccgtttgcattcgaaacacaatacactgcctcgttctctcagttagcagctgggcagcagcgcaccattcatcatttaggcttgtggtttgttgtttactctaccaatgttatgtcgaaactgcattgtaaaaagagaagaaagtggcaggttttccaggtccacggaaaggtttggcctgacgctggagtgcggtgatgaacttacgtgacaatgattgtattcctcagtagcactttaaacgccgaagacagccctgcagcaagcctgcacacgggcttgggtgggttcctttggagaagatgtggctggaacacaaacaatctttgaaagaaataaatgtgcacacagaacactacaaa

SEQ ID NO: 4054 - DNA, 4876 bp, Homo Sapiens
  NM_015503
cgcgacccggccctggcgcccgagaggattcctgggtgggggtgggcgtggagggccgggggctggagaggcactcggccccggagagtgcagcagacagggctggtcccgaggtggatgcggccccggaaaatgggcggctggggggtgtccagggagtagggtcggatcggagtatatggaccaccgggcccggagggtccgagccgagagcggagcctgcaccctccacctcccgcccttcgggaaatatcagaactgagccaggaggcaggtgcaccgggaaaatgtgtctgagtcctgcttggcagaagagaaactgagtcaccagcttaggagtcgcagggtcagcgggcctgaagggggctgggtctgtctgcggtgcggaggattgggtgggcctgtgtgagccgaggtggccgctggctggagattggtttgcacttcttggctgggttcccccgtgctccatgactcctgcatctcctgattgtttctcgttggtttggagttgtccctgcggttggagccatctgagcttgtagggtcgaggcccaggaggaaggggagggttcaccgacttacagcctggctgtaggtttgaacaggagtctgaggtcgctgagggtttggggaggctttcctgagctgctctggccccagtcctggggctgtcaccttccagtattgcgtggcgggaggagcgctaacaagagccaagggttgtaaattccacacccagctctgccactttctagttgtaagaccttgagagggctcctcctttctctaatttctattttagaaaattggaacaataatattcttctcccacatgaagatagtaacaatggcagtcgttcagcggatgcttactttgcgttcagcgctgacataccccattccatgtaattctctcaacatttcgaggggagggatcattagctttgtttaacagatagaaaaacggaggctcagagaggacgtggaatttgttcaagataacatcgctcataaggtggctggactgggtgctcataaggtggtttgagccctggtctgactcaagtccatggccttaaccagaaggctaacctgcctttagggcatactccccagtgggagaagaggaaggtgaaaaatcctagggccccagctctccctgtgatgttttgtttacgtgaggccagcaaagacttgacctgagccaacccagtttctcctctggggcccctgcggcctctggccccagactgaagggataccaaagaagtgggctgtagctatttcacatctccttcacgcagtgcgtgggtgctggactctggggtcagctttcaagacaattactgttttggtccatcatgcatccatcctcattaatgaatcggccccctccaaagagttggaccctaagatgcgtgaggcaggctctctaaggtctagaatcccagctcctctctagccccctgcgagctggggcggtgaggtgctatggctgaggctggcccagccgggccctggggacagggactatgaagtggggaaaacagtagacttggagttctgaaacttttctgagcttcggtttcctcatctgttcgagaggtctttgaaacctctcagggaaaggtaagataaccaagtgggagcctctagaatggctcatgggaagtgtgacatgaatattggaggatccgatgtagagggggggtgatctggaaaagttcccttttttagggggaaggtgctccaaagccctctactgctggatccaaagctaaggaaagtgggggcaaatgtggcaggctcggggcaggttagacgctggggagccagttggctggggcctgcagggtgccaggatctgggagagggaagggaggtgttgggctcccttccccattgctctctgcggagtctgaagtagggtcggacgtctctggctgggggtgggatgcagcctccggtgcgccctcagcagtgaccctcgtgtgtgcctctctcttcctttcgcagctgctgccgcccacccctcgtcttctggctgcctccctctttgtgccccacaggctccccctctccacctcctggggcccatcatgaatggtgccccttccccagaggacggggcctccccctcgtctcccccgctgcccccacccccgccccctagttggcgggagttctgtgagtcccacgcccgggctgcggctctggactttgcccgccgttttcgcctctacctggcctcccacccccaatatgcggggcccggggccgaggctgccttctcccgccgttttgctgagctcttcctgcagcactttgaagccgaggtggcccgggcctctggctccctgtcgccacccatcctggctcccctgagccctggtgcggagatttcgccacatgacctgtcccttgagagctgcagggtgggtgggcccctggctgtgctgggcccttctcgatcatctgaggacctggccggccccctcccttcctcagtctcttcctcctctacaacctcctccaagccgaagctcaagaagcgcttttccctgcgttcagtgggtcgctctgtccgaggctcagtccgtggcatcctgcagtggcgggggaccgttgaccctccctcctccgctgggcccctggagacctcgtcaggccccccagtcttaggtggaaacagcaactccaactcctctggcggggctgggaccgttggtaggggactggtcagtgatggaacgtcccctggggaaagatggactcaccgttttgagaggctgagactcagtcggggagggggcgccttgaaggatggagcagggatggtgcagagggaagagctgctgagtttcatgggggctgaggaggcagcccctgacccagccggagtgggccggggaggaggggtggctgggcctccttcagggggaggagggcagcctcagtggcagaagtgtcgcctgctgcttcgaagtgaaggagaaggaggaggaggaagtcgcctggagttctttgtaccacccaaggcctctcggccccgactcagcatcccctgctcttctatcacagacgtccggacaaccacagccctggagatgcctgaccgggagaacacgtttgtggttaaggtggaaggtccatccgagtatatcatggagacagtggatgcccagcatgtgaaggcctgggtgtctgacatccaagaatgcctgagcccaggaccctgccctgctaccagtccccgccccatgaccctccctctggcccctgggacctcattccttacaagggagaacacagacagcctggagctgtcctgcctgaatcactcggagagtctacccagccaggacctgctgcttggacccagcgagagcaatgaccgcctgtcgcagggggcatatgggggcctctcagaccgcccctcggcatccatctcccccagctctgcctccattgccgcctcccattttgactcgatggaactgcttcccccagagttgcccccccgcatccccattgaagagggacccccaacagggacagttcatcccctctcagccccctaccctcccttggacactccggaaacagccacagggtccttcctgttccagggggagccagagggcggtgagggggaccagcccctctcagggtatccttggttccacgggatgctctctcggctcaaggctgcacagttggtgctgactggcggcactggctcccacggtgtcttcctggtgcgccagagtgagacaaggcggggtgaatacgtcctcaccttcaacttccagggcaaggccaagcacctgcgtttgtcgctgaacgaggagggtcagtgccgggtccagcacctgtggttccagtccattttcgatatgctcgagcacttccgggtgcaccccatccctttggagtcgggaggctccagtgatgttgtccttgtcagctatgtcccatcctcccagcgacagcagggccgggagcaggctgggagccatgcgggggtgtgcgagggagatggatgccaccccgatgcctcctgcaccctcatgcccttcggagcgagtgactgtgtaaccgaccacctcccatgacccaccccagccccctgaacccccttcatggacagatcccccacagcctggggcagaagaggcgtcgagggcgccagaagtggcggcagcagcagccgcagcagccaaagagaggcaagagaaagagaaagcgggcggtggaggggtcccggaagagctggtccccgtggttgagctggtccccgtggttgaattggaagaggccatagccccaggctcagaggcccagggcgctgggtctggtggggacgcgggggtgcccccaatggtgcagctgcagcagtcaccactagggggtgatggagaggaagggggccaccccagggccattaacaaccagtactccttcgtgtgagccaaccccacccgctccaccctttttaaaccccccagccctgctcgtgagattgggctgggtagggacagaggaggccgaaatccctcccccatgcttcctgacccttgttggccaagggcatctttgatggtacaagcagaggctcgggagaggctcccgtcacacactacaggtcccctccccagggcaggggatttgggctccatgagctccttgaggggctcttctggtcagccccaccctgggggccatttccccattaactacccccagcccgaggcagggtgagggggaagggctgtcagttacattaaggtggttgttgttgttgttttaaacaaaatggagaagcataaataaataaaaaggtttatctcggttctatcgtgaaaaaaaaaaa

SEQ ID NO: 4055 - DNA, 2866 bp, Homo Sapiens
  NM_015506
atcccaagatgcatcgcgcataggcaatatggtcccgctactggacccatttcctacctgggaaatggagtcgaagctgactcaaaacgtaacggcccaattgtccttgagacttcattccccagcaagctcagcgtgtaacgtgcgctatggagccgaaagtcgcagagctgaagcagaagatcgaggacacgctatgtccttttggcttcgaggtttaccccttccaggtggcatggtacaatgaactcttgcctccagccttccacctaccgctgccaggacctaccctggccttcctggtactcagcacgcctgccatgtttgaccgggccctcaagcccttcttgcagagctgccacctccgaatgctgactgacccagtggaccagtgtgtggcctaccatctgggccgtgttagagagagcctcccagagctgcagatagaaatcattgctgactacgaggtgcaccccaaccgacgccccaagatcctggcccagacagcagcccatgtagctggggctgcttactactaccaacgacaagatgtggaggctgacccatgggggaaccagcgcatatcaggtgtgtgcatacacccccgatttgggggctggtttgccatccgaggggtagtgctgctgccagggatagaggtgccagatctgccacccagaaaacctcatgactgtgtacctacaagagctgaccgtatcgccctactcgaaggcttcaatttccactggcgtgattggacttaccgggatgctgtgacaccccaggagcgctactcagaagagcagaaggcctacttctccactccacctgcccaacgattggccctattgggcttggctcagccctcagagaagcctagttctccctccccggaccttccctttaccacacccgcccccaagaagcctgggaatcccagcagagcccggagctggctcagccccagggtctcaccacctgcatcccctggcccttgattttctcccatgtggaccctgatttatggtggtacttgctaggacttaattggctttggcaaagcaaaaggttttgagtacaagattactatttttgataatatagtagagatcttccatgaagataacaaggctcaaggaagttaggtttggccaagataaaggccagggaaccagaattcccatctgccttcaaatgagttttttttttttttttagacagagtcttactctgtcacctaggctggagtgcagtggcacagtctctactcactgcaacctctgcctcctgggttcaagcaattatctgcctcagcctcctgagtagctgggatgacaggtgcctgccactacacctggctaattttttgtatttttagtagagatggggtttcatcatattggccaggctggtctttaactcctgacctcgtgatccacccatcttggcctcccaaagtcctgggattacaggaatgagccaccgcacccagccaagactctatctgttcccatttctaagcagttccccaagatgttgttacagggcctaaggggcaaatatcctctaaagagtacctaccagcagggtgtggtggctcccgcctgtaatcccagcactctgggaggccgaggcaggtggatcatgaggtcgagtttgagaccagcctggccaatacagtgaaaccccgtctctactaaaaatgcaaagttagccgggcatggtagcgcaggcctgtagtcccagctactcaggaggctgaggcagtagaatcatttgaaccagggaggcagagattgcagtgagccgagattgcatggctgcactctagcctgggtgacagtgtgagactctgtctcaaaaaaaaaaaaaaaagtacctacctcaggtagggactgaataaacacgtgtaaggcactttggaaaaatacctggcatatatagtaagcagtatgttggccattaccaaaggccctgggaattctgtactgctgctcatgggtgtagtcggttctagaggggtgggcaggtgggagtagctgaggaagacaagtggctggaatggtatcacatgatacacagaagtatcctcagttctgaatctaccttggcctcaagggcccaggagaataacttttcccagctgacagcctctctgaggacaatgacatatgaatgaggatcaaaacgagctttggccaggcactgtggcgctcacctgtaatcccaccattttgggaggctgaggcggaggaccgcctgaggcaaggaattcagaaccactctgggcaacataatgacactaaaaaagactatctctaatcaaggctagaaccaagggaaggctaagaattgcccagtactgtgcaactacgaaagccctacccaaggccaccagccttgtcttcctctttcctctgtcagttcaaaaagaacagaaacctccagctcttttacatagcaggtaccaggcatttatcagaagaggccaagcttctggttcccatgcagccctttgaatagtgtgtctaaacaaaaataggtgtccaagtagtcacactgagactttaactggtaacccagcctgtggcgtcagtcgcagtgctctggccaacactatagcagggcttattcttctccctcatgtgtagtgaaacaaaatgtaacaccttgggttcattcagttccattccctatatctacctgtgtcaatataattccctgatttggaggcagctctcctcattttccccaaaacagggaaagcaaggagtaaattcctcttaaaatcaaaagctaataatatgcttcctaaaataaagactcatcaaggtctcagttcaagtttaaaaaaaaaaaaaaaaaa

SEQ ID NO: 4056 - DNA, 4047 bp, Homo Sapiens
  NM_015508
agaactcgcgcgcctcccctcgaacgaacgcgcacgcgcgcgcagggggcgggtcttcttcccgacacccactgagcgcccggcctcctcaccccaccccaccgaactccggccgcccaggctccgcctccgcgacgggccgtcgggaggaggcgaccggaagccacttaaagcagagatcgaggtgacaggcgagctggctggactcggagcgcggtcgaggctttctgcgttcgcggcggcggaatggcccgtgcgcggctcgccgcgtcgcggctctgtggtccctagacgtcggctcccgccctcggcgctgatctccggcgcgggcactgctttccactcggctcctgtcgtccgttctctcaggctcccgttcaggatttttagactctgaggagcagttggagctaatccacattatggaaatggaaaccaccgaacctgagccagactgtgtagtgcagcctccctctcctcctgatgacttttcatgccaaatgagactctctgagaagatcactccattgaagacttgttttaagaaaaaggatcagaaaagattgggaactggaaccctgaggtctttgaggccaatattaaacactcttctagaatctggctcacttgatggggtttttagatctaggaaccagagtacagatgagaacagcttacatgaacctatgatgaagaaagccatggaaatcaattcatcatgcccaccagcagaaaataatatgtctgttctgattcctgataggacaaatgttggggaccagataccggaagcccatccttccactgaagctccagaacgagtggttccaatccaagatcacagctttccatcagaaaccctcagtgggacggtggcagattccacaccagctcacttccagactgatcttttgcacccagtttcaagtgatgttcctactagtcctgactgcttagacaaagtcatagattatgttccaggcattttccaagaaaacagttttacaatccaatacattctggacaccagtgataagctgagtactgagctctttcaggacaaaagtgaagaggcttcccttgacctcgtgtttgagctggtgaaccagttgcagtaccacactcaccaagagaacggaattgaaatttgcatggactttctgcaaggcacttgtatttatggcagggattgtttgaagcaccacactgtcttgccatatcattggcagatcaaaaggacaactactcaaaagtggcagagtgtattcaatgattctcaggagcacttggaaagattttactgtaacccagaaaatgatagaatgagaatgaagtatggaggacaagaattttgggcagatttgaatgccatgaacgtgtatgaaacaactgaatttgaccaactacgaaggctgtccacaccaccctctagcaatgtcaactctatttaccacacagtctggaaattcttctgtagggaccactttggatggagagagtatcccgagtctgtcattcgattgattgaagaagccaactctcggggtctgaaagaggttcgatttatgatgtggaataaccactacatcctccacaattcattcttcaggagagagataaaaaggagacccctcttccgctcctgttttatactgcttccatatttacagacacttggtggggttcccacacaagctcctccacctcttgaagcaacttcatcatcacaaattatctgcccagatggggtcacttcagcaaacttttaccctgaaacttgggtttatatgcatccatctcaggacttcatccaagtccctgtttctgcagaggataaaagttatcggatcatttacaatctttttcataagactgtgcctgagtttaaatacagaattttgcagatattgagagtccaaaaccagtttctttgggagaaatataaaaggaaaaaggaatatatgaacaggaaaatgtttggccgtgacaggataataaatgagagacatttatttcatggaacatcccaggatgtggtagatggaatctgcaaacacaactttgaccctcgagtctgtggaaagcatgctacaatgtttggacaaggcagttattttgcaaagaaggcaagctactctcataacttttctaagaagtcctccaaaggagtccacttcatgtttctggccaaagtgctgacgggcagatacacaatgggcagtcatggcatgagaaggcccccgccagtcaatcctggcagtgtcaccagtgacctttatgactcttgtgtggataatttctttgagcctcagatttttgtcatttttaatgatgaccagagttacccttattttgttatccaatatgaagaagtcagtaacactgtttccatttgaaaaatcttggtactgctaaattatttgatatgaactcaatccagcatttgtagcaggttttgaatgggtgggactgggtggggaacagcattggacattaatagggcacttttcagacccattttttaaagtgctagaaaatgctttttttaaaaaaaaaatacaagttttaaaatgaccacttactctttaattatttactaattgctagtgtactcagtgtggaaaagactacagattacacactcttttcattcacacttgtacatatagacagcaatgttattaggagcattaaattaaaaaactgaacagcctaatttaaatgtggcttgggcctggtagaagtttgaccaaatggaatggaggctgtgagcaatgtgaggattctatttatttatttacgtttgataaaacttactggaactagtactaccatgcgtattccctgtccaaagcatcactgctttggtatagtataagttcatgaaattctggtgggtagaaagaaatttttatttctatcagcagtactaaaatgtatcagccaaccagagaacatcagtgactttaacttctgcagagtttgccccagaattcagagttctatttagaggaagttaaaacaacaacaaaaaacaaccatttgaaaaatttttgtcaccagcaaaacttttcactaattagtgatatgaaatgtgatttttgtgttgttaaacttcagctttggaaaactcagtctctttcattatcatccattccaatttgaaggagttgggcagctaatttggttaaaggcagtcttgagggttagaagtattacttccttttcgggttccagacctagcttgtgactgaaagttttagaaaaaggaagtacatctatagccaaattgataaggttattactgtgttttgcacaaagtatattagcaaaagtatttgctggaattattggtagatggcagtcccactcctacacctgctttgtcagatacagctgggttccctggctgactctgtaccttacttacactacttacttaatagaaacacaaacttggaaattgtgccagtggtccagctggagcacaacgtttggtgaatatgctgtttcctcagttcagagaggtagcaactaggtaaactccttataaaaagcaaatacctggatttacaaaagtgaaagtagttgttcacaaaagaattcgccatggaattctttcagttaccaagctctcctggtaatgtttgtggttatatcatttacacaaaacttttcaggaacttctgtgttgtttaagcaagatgtatctgtactgatgtctcagtgaatcagtctgtttattaagcacttatcagggcttccacacacttatttattttgccctagttaatcctgttgtttgctgccattggcatgaaatggccaactgtggctgttacagttctttcattcaattataacttgtaaaccagtgactcctaatctttttcaagttaagacaccttaccattgcttatttggttttatgagacttgttcctttttttctccctaaggaaaaagaaagctttatgacatatttatttttttaataaaactaagcaaaaataaaacttatggtaattctttaaaaaaaaaaaaaaaa

SEQ ID NO: 4057 - DNA, 1377 bp, Homo Sapiens
  NM_015510
gaggcgggaggatgaagttgattgactatggtctctccggctaccaggaagagtctgccgaaggtgaaggccatggacttcatcacctccacagccatcctgcccctgctgttcggctgcctgggcgtcttcggcctcttccggctgctgcagtgggtgcgcgggaaggcctacctgcggaatgctgtggtggtgatcacaggcgccacctcagggctgggcaaagaatgtgcaaaagtcttctatgctgcgggtgctaaactggtgctctgtggccggaatggtggggccctagaagagctcatcagagaactcaccgcttctcatgccaccaaggtgcagacacacaagccttacttggtgaccttcgacctcacagactctggggccatagttgcagcagcagctgagatcctgcagtgctttggctatgtcgacatacttgtcaacaatgctgggatcagctaccgtggtaccatcatggacaccacagtggatgtggacaagagggtcatggagacaaactactttggcccagttgctctaacgaaagcactcctgccctccatgatcaagaggaggcaaggccacattgtcgccatcagcagcatccagggcaagatgagcattccttttcgatcagcatatgcagcctccaagcacgcaacccaggctttctttgactgtctgcgtgccgagatggaacagtatgaaattgaggtgaccgtcatcagccccggctacatccacaccaacctctctgtaaatgccatcaccgcggatggatctaggtatggagttatggacaccaccacagcccagggccgaagccctgtggaggtggcccaggatgttcttgctgctgtggggaagaagaagaaagatgtgatcctggctgacttactgccttccttggctgtttatcttcgaactctggctcctgggctcttcttcagcctcatggcctccagggccagaaaagagcggaaatccaagaactcctagtactctgaccagccagggccagggcagagaagcagcactcttaggcttgcttactctacaagggacagttgcatttgttgagactttaatggagatttgtctcacaagtgggaaagactgaagaaacacatctcgtgcagatctgctggcagaggacaatcaaaaacgacaacaagcttcttcccagggtgaggggaaacacttaaggaataaatatggagctggggtttaacactaaaaactagaaataaacatctcaaacagtaagagttgtagtcttccaggactagaaccttgtgtcctttgaattctcgccctgccagctcctagaaatagtttcaatcttggaatcagatgttatgtcacctgaaa

SEQ ID NO: 4058 - DNA, 2682 bp, Homo Sapiens
  NM_015511
ctttttcctttcctgattccttgtgtatgtgtggctgggccgcccctcttctcggctcagagtcacggagtgccttgaactaggcccacctcgccggggcggctggttctctgtttgtgggacgctggtgtctctggaggcccttcctgagaagccgtcgccagagttacgtcgcggttttcttaactttagagcctgggggccggagaccctgattgcactcgacctggctctgccctactctctgcgtgacttccactgttcatcaaagaaaaagggttcttttggtcacccaccactggccccatggctgccgtgcagatggatcctgagctagccaagcgcctcttctttgaaggggccactgtggtcatcctgaacatgcccaagggaacagagtttgggattgactataactcctgggaggtcgggcccaagttccggggcgtgaagatgatccctccaggcatccacttcctccactacagctctgtggacaaggctaatccgaaggaagtaggccctcgtatgggtttcttccttagcctgcaccagcgggggctgacagtgctgcgctggagcacactcagggaagaggtagacctgtccccagccccagagtctgaggtggaggccatgagggccaacctccaggagctggaccagttcctggggccttacccatatgccaccctgaagaagtggatctcactcaccaacttcatcagcgaagccacagtggagaagctacagcccgagaatcgacagatctgtgccttttccgatgtgctacctgtgctctccatgaagcacaccaaggaccgcgtggggcagaatctaccccgctgtggcattgagtgcaaaagctaccaagagggcctggcccggctaccagagatgaagcccagagccgggacagagatccgcttctcagagctgcccacgcagatgttcccagagggtgccacgccagctgagataaccaagcacagcatggacctgagctatgccctggagactgtgctcaacaagcagttccccagcagcccccaggatgtgcttggtgaactccagtttgcttttgtgtgcttcctgctggggaatgtgtacgaggcatttgagcattggaagcggctcctgaacctcctgtgccggtcagaagcagccatgatgaagcaccacaccctctacatcaacctcatctccatcctgtaccaccagcttggtgagatccccgctgacttcttcgtagacattgtctcccaagacaacttcctcaccagcaccttacaggttttcttttcctctgcctgcagcattgccgtggatgccaccctgagaaagaaagctgaaaagttccaagctcacctgaccaagaagttccggtgggactttgctgcggaacctgaggactgtgccccggtggtggtggagctccctgagggcatcgagatgggctaactcggggagcgctctcagctgcgaggggccccttcccacagggctgcagtcctggcctctccatttacttcttcccatcctgggacctgccagggcagcaatctctccaggtcctgcaaagatggagccagaattccctttttcactgataaatatatttcttcattgccaaagaggctgtacccatcctgaaggcacatttgtgggttccccatcagccaggccttggtgctaacctggctgaatttcacacaggctcttacacacacacgctcctaggagacatctgcctacacggcaaccatatttcctctgaatgagaaggaattgaaccaaaagtccaagaaagaactgattgcttgttccataggagcttaggaaacaagaaaccctggattgcccagggggtctgagaagttggttggtgactttttttgcggttaaatgaagggtgatggggagatcagcccgaattgccgcctgcctcttgctaaataggagcagaggacttggcctgcagctccttgggagcccttgattgggaagagagtttcaagggaggcagctggattcaatctagcaggtggtcagcttcagctttctccatcgaaatcccattctcctgtccagaggcccagtgggtcatctcccaaggtgggtgtggaccctggcctcagaggccttgctggtgctgtcacctcccacctgttccattccgaggcctcacccagaagtgggaccctccccttcctcaccagagccaccgtgactgtttctgatgacctggagagtcaacaacaaccagaaaggtttctgcccagagcaggcttcttaaggcctttacgaagttttgtgccttccaagtgctgaagaagacctggtcagcctaaatcttcccagtcccgctgtggagctgtcagtcaccggagtaatgagctcctggttcctcgggagtccttcgtgctgtgtggcagggttcctctctagacaagtacacaggccctgccaccctgacatcaaactgttgtactatgatcacagtccctgtgccatccttttccaagactggggctcacaccatgtttttgaatgagaatccctgctggttgagacttttgcttccacttgtttccttggagatgtttttccaagagcataatgtacattaaagtcttcgagttgagaccaaaaaaaaaaaaaaaaaaaaaaaaaaaaaaaaaa

SEQ ID NO: 4059 - DNA, 13126 bp, Homo Sapiens
  NM_015512
ggggggtacccaacctatacgcagacccattgagcagccagactgccctaaacagggctatggagtccttgtcccttctaagagctgtggacaccttgcctccagttcccctcacagtcctttcttccttctgcagtgatcactgagtacctgtgtgaatgccaacaagaaaaataaaaccacagtttggattcaggaaaggttgcaccaccatcaggtcttgaagggagcttcggctggggcatctccctgagaagcagcatggagcagcctaacagtaaaggctatagcctgggaaggacccctcagggcccagagtgcagcagtgctcctgcagtccaagtggggacccacaggggcctagagtataacccggggaagattcttccaggatcagactatgggttgggaaatcctccagcccttgaccccaagctcccacatttacccctgcccccggccccacccacactctcagacttggggcagccacggaagtcacccctgacaggcactgataagaagtacccgctgatgaagcagcgtgggttctactccgacatcctcagccctggaaccttagatcaacttggggaggtatgtcgtggcccccgaatgagccagaacctcctgcggcaggctgaccttgacaagttcaccccaagagtcggaagctttgaggttcctgaagacttccaggagcgcatggagcagcagtgcatcgggtccaccacccggctgctcgcccagactgacttcccactgcaggcctacgagcccaagatgcaggtgcctttccaggtgctgccaggccagcatcctcgcaagattgagatcgagaggaggaaacagcagtacctgagcctggacattgagcagttgctgttcagccagggcatcgactccaacaagctcatgcccaggcacctggaccaccagcacccccaaaccatcgaacagggccatgacccaatcttccccatctacctcccactgaaggtatttgacaatgaggactttgactgccggactcccagagagtggatcaacatgggcttggagccagggtctctggacaggaaacctgtcccgggaaaagccctcttgcccactgatgacttcctggggcatgaggaccccaagagtcagaagctgaagtacaaatggtgcgaggtcggcgtcctggactacgacgaggagaagaagctatacctggtacacaagacagacgagaaaggcctggtgcgagatgagatggggaggcccatcctgaatgcaggggtcaccactgaaggaaggccaccccttcaggtctgtcagtactgggtgccacggatccagcttctcttctgcgctgaggacccttgcatgttcgcacaacgtgtggtccaggccaacgccctgcgcaagaacacggaagcactgctgctctacaacttgtatgtggactgcatgccctctgacggccagcatgtcatcagtgaacagagcctgagcaagatcaagcagtgggccctgagcacgcctcggatgcgcaaaggcccctcggttctagagcacctcagcagtcttgccagagaagtgagcctggactatgagcgcagcatgaacaagatcaactttgaccacgttgtctcttccaagcccgagaccttctcctacgtcaccctccccaagaaggaggaggagcaggtgcctgagcgagggctggtgagtgtccccaagtaccacttctgggagcagaaggaggacttcactttcgtgtccctgctcacacggccagaggtcatcacggccctcagcaaggtgagggccgagtgcaacaaggtgaccgccatgtccctgttccactcgagcctctccaagtacagccacctggaggaatttgagcagatccagtcacagaccttctcccaggtgcagatgttcctcaaggacagctggatcagctcgctaaaggtggccatgcgcagcagcctgcgcgacatgagcaagggctggtacaacctctacgagaccaactgggaggtgtacctcatgtccaagctgcgcaagctgatggagctggtgaagtacatgctgcaggacacactgcgcttcctggtgcaggactcacttgccagcttctcacagttcatcagcgacacctgttgcagcgtgctcaactgcaccgatgacatggtctggggtgacgacttaattaacagcccctacaggccccggaagaatcccctgttcatcatggacctggtgctggacagctctggggtgcactatagcaccccactggagcagtttgaggcatctctgctgaacctcttcgacaagggcatcctggccacccatgccgtgccccagctggagaagctggtgatggaggacatcttcatcagcggtgaccccctgctggagtccgtgggccttcatgagccactggtggaagagctacgggccaccattgccagtgccgtgtccaaggccatgatcccactgcaggcctacgccaaggagtaccgaaagtacctggagctgaacaacaatgacattgcctcctttctcaaaacctaccagacgcagggcctgttggcccaggaggtgcgggaggtagtgctcacccacctgcgggagaaggagatcctggacagctcgctgcccagcagcatcatcattgggcctttctacatcaacaccgacaatgtcaagcagagcctgtccaagaaacgcaaggccctggccacttccgtgctggacatccttgccaagaacctgcataaggaggtggatagcatctgcgaggagttccgcagcatcagccgcaagatctatgagaagcccaacagcattgaggagctggctgagctgcgagagtggatgaagggcatcccggagaggctggtgggcctggaggagcggattgtgaaggtcatggatgactaccaggtcatggatgaattcctctacaacctcagctcagatgacttcaatgacaaatggattgccagcaactggccttctaagatccttgggcagatagagctggtgcagcagcagcatgtggaggatgaggagaagttccgcaaaatccagatcatggatcagaacaacttccaagagaagctggaagggctgcagctggtagtagctggcttctccatccatgtggagatttcacgtgcacacgagatcgccaacgaggtgcggcgtgtcaagaagcagctgaaggactgccagcagctggccatgctctacaacaaccgcgagcgcatcttcagcttgcccatcaccaattatgacaagctctccaggatggtgaaggagttccaaccctacctggacctttggaccacagcgtctgactggctgcgctggtcggagagctggatgaatgaccccctctctgccatcgatgctgagcagctggagaagaacgtggttgaagccttcaagaccatgcacaagtgcgtgaagcagtttaaggacatgccagcctgccaggaagtggccttggacatccgggcccgcatcgaggagttcaaaccatacatcccactgatccaggggctgcgcaaccctggcatgcggatccggcactgggagacactgtccaaccagatcaacatcaatgtcaggcccaaggccaacctgacctttgctcgctgcctggagatgaacctgcaggaccatatcgagagcatcagcaaggtggctgaggtggctggcaaggagtacgccatcgagcaggcactggacaagatggagaaggagtggtcgaccatcctgttcaatgtactgccctacaaggcgacagacacctacatcctgaagagcccggacgaggcctcacagctgctggacgaccacatcgtcatgacccagaatatgtcattttcaccctacaagaagccctttgagcagcgcatcaactcctgggagaacaaactgaagctgacccaggaggttctggaggagtggctgaactgtcagcggtcctggctctacctggagcccatctttagctctgaggacatcaaccagcagctgcctgtggagagcaagcgctaccagaccatggagcggatctggaagaagatcatgaagaatgcctacgagaaccgggaggtgatcaatgtgtgttccgacctgagaatgctggacagcctgcgggactgcaacaagattctggacctggtgcagaagggcctcagcgagtatctggagaccaagaggagcgccttccccagattctacttcctgtcagatgatgaactactagagatcttgtcgcagacaaaggaccccacggccgtgcagccacacctgcgcaagtgcttcgagaacatcgctcggctgctattccaggaggacctggagatcacgcacatgtactcagccgagggggaggaggtacagttgtgcttctccatctacccctccagcaacgtggaggactggctgcgggaggtggagcgcagcatgaaggccagtgtgcacgacatcattgagaaggccatcagggcctaccccacgatgcccaggacccagtgggttctgaactggcctggccaggtgaccatcgctgggtgccagacctactggaccatggaggtggcagaggctctggaggccggcaacctcagaagccaactgttcccccagctctgccagcagctcagtgatctggtggcccttgtgcgggggaagctgtcccgcatgcagcgggcagtgctgtcagcgctaatcgtcattgaggtccatgccaaggacgtggtgagcaagctaatccaggagaacgtggtcagcgtgaatgacttccagtggatctcacagctgaggtactactggacaaataatgacctgtatatccgtgctgtgaatgctgagttcatctatggctatgagtacctgggcaacagtgggaggctggtgatcacgcccctcaccgacaggtgctacctgacactgaccggagctctgcacctcaagtttgggggtgccccagctggcccagctggcacaggcaaaactgagaccaccaaagacctgggtaaggccttggccatacagaccgttgtgttcaactgctctgaccagctcgacttcatggccatgggcaagttcttcaagggcctggccagtgctggggcctgggcctgcttcgacgagttcaatcgcatcgacatcgaggtgctgtctgtggtggcgcagcagatcaccaccatccagaaggcgcagcagcagcgggtggaacgcttcatgtttgagggtgtggagatcccactggtgccatcctgcgcagtgtttatcaccatgaacccgggctacgctggccgcacggagctgcctgacaatctgaaggcgctcttccgacccgtggccatgatggttccagattacgccatgatcactgagatctccctctattcctttggctttaatgaggccagtgtgctggctaagaagatcacaaccaccttcaagctgtcttctgagcagctcagctcccaggatcactatgacttcgggatgagagccgtgaaaactgtgatctcggctgctgggaacctcaagcgagaaaaccccagcatgaatgaggagctgatctgcctccgggccatccgtgatgtgaacgtgcccaagttcctgcaggaggacctcaagctcttctctggcatcgtgtccgacctgtttcccaccatcaaggaggaggacacggactacggcatcctggatgaggccatccgcgaggcctgcaggaacagcaacctcaaggatgtggagggcttcctgacaaagtgcatccagctctacgagaccacggtggtacgacacggcctcatgctcgtcgggcccacaggctccggcaagagtacttgttacagagtcctggcagctgccatgacgtcactgaaagggcagccatccatcagtggtggcatgtacgaggctgtcaactactacgtgctcaaccccaagtccatcacgatgggccagctgtacggggagtttgacctcctcacccatgagtggacagacgggatattctcctcgttcatccgggcgggggccatcacctccgacaccaacaagaagtggtacatgttcgatgggccggtggatgccatctggattgagaacatgaacacggtgctggatgacaacaagaagctgtgcctcagctctggggagatcatcaagctcacagaggcaatgaccatgatgttcgaggtgcaagacctggcggtggcttcaccagctacagtctcccgctgtggcatggtgtacctggagcccagcatcctggggctcatgcccttcatcgagtgctggctgaggaagctgcctcccttgctgaagccctatgaggagcatttcaaggccctctttgtcagcttcctggaggaatccatctccttcgttcggtcctcagtgaaggaggtgatcgcctcaaccaactgcaacctgaccatgagcctcctcaagctgctggactgcttcttcaagccctttctgcctagagagggcctcaagaaaataccctctgaaaagctgagtcgcatcgtagagttgatcgagccctggttcatcttctccctgatctggagcgtgggtgccactggggacagcagtggccgcaccagtttcagccactggctaaggctcaagatggagaacgaacagctgactctgcttttcccagaagaggggctggtgttcgattacaggctggaggacgcgggcatcagtggcaccaacgacagtgaggatgaagaggaggaatacaagcaggttgcctgggtgaagtggatggactcctcagctccattcaccatggtaccagacaccaactactgcaacatcattgtgcccaccatggacaccgtgcagatgtcccatttactggacatgctgctcaccaacaagaagcccgtgctgtgcattgggccaacaggcacggggaagacgctcaccatctctgacaagctcctcaagaacctggcactggattacatcagccacttcctcaccttctcagcccgcacttcagccaaccagacccaggacttcattgacagcaagctggacaagaggcggaagggtgtgtttggaccacctctggggcgcaactttatcttcttcatcgatgacctgaacatgccggccctggagacctacggtgcacagccacccatcgagctgttgcgccagtggatggaccacggcggctggtacgaccgcaagatcattggtgccttcaagaacctagtggacatcaactttgtctgtgccatgggccccccgggtggaggcaggaacaccgtcaccccgcggctgatgcgtcacttcaactacctgtctttcgctgagatggacgaggtcagcaagaaacgcatcttctccaccatcctgggcaactggttggatggactccttggagaaaaaagctaccgggagcgtgtgcctggggccccccacattgcccacttcacggagccccttgtggaagccaccatcatggtgtatgcaaccatcacctcccagctgctgcccactccagccaagtcccactacaccttcaacctgagggacctctccaaggtcttccaaggcatgctcatggctgacccggccaaggtcgaggaccaagtgcagctgctgcgactgtggtatcacgagaactgccgcgtgttccgggaccgactggtgaatgaggaggaccgcagctggttcgaccagctcctcaagcgctgcatggagcagtgggaggtgaccttcaacaaggtctgccccttccagcccattctttacggggacttcatgtcaccaggctccgatgtcaagtcctacgagctcatcaccagtgagagtaagatgatgcaggtgatagaggagtacatagaggactacaaccagatcaacacggccaagctgaagctggtcctcttcatggacgccatgagccacatctgtcgcatcagccgcaccctacgccaggcgctgggcaatgcactcctgctgggcgtgggtggcagcggccgcagctccctcacaaggctcgcctcgcacatggccgagtacgagtgcttccagattgaactatccaagaactacggcatgtccgagtggcgagatgatgtgaagaaggtcctgctcaaggcgggcctacagaacctacccatcaccttcctcttctcagacacccagatcaagaacgaatccttcctggaagatatcaacaacgtcctaaactctggtgacattcccaatctgtatactgcggacgagcaggaccagatcgtcagcaccatgcggccctatatccaggagcagggcctacagcccaccaaggccaacctcatggctgcttacacagggcgtgtgcgcagcaacatccacatggtgctgtgcatgagccccatcggagaggtcttccgagctcgtctgaggcagtttccctccctggtcaactgctgtaccatcgactggtttaacgagtggccggcagaagccctgaagtctgtggccaccgtgttcctcaatgagatcccagaactggaatcctcccaggaagaaatccaaggactgatccaggtctgtgtgtacatccaccagtcggtgtccaagaagtgcatcgagtacctggcagagctgacccgccacaactatgtgacccccaagagctacttggagctgcttcatattttctccatcctcatcgggcagaagaaactggagctgaaaactgccaagaaccgcatgaagagcggcctcgacaagctgctgcgcacttctgaggatgtagccaagatgcaggaggacctggagagtatgcaccccctgctggaggaggctgccaaggacaccatgctcaccatggagcagatcaaggtggatacggccatcgccgaggagacccggaattcagtgcagacagaggagatcaaagccaatgagaaggccaagaaggcacaagctattgctgacgatgcccagaaggacctggacgaggcgttgccagccctggatgcggctctggccagcctgcgcaacctcaacaagaacgatgtgaccgaggtacgtgccatgcagcggccacccccgggtgtgaaactggtcatagaagctgtgtgcattatgaaaggcatcaagcccaagaaggtgcctggagaaaagccaggcaccaaggtggatgactactgggagcctggcaaggggctgctgcaggacccgggccacttccttgagagcctcttcaagtttgacaaggacaacattggggatgtggtgatcaaagccatccagccgtacatcgataatgaagagttccagccagccaccattgccaaggtgtccaaggcttgcacctccatctgccagtgggtgcgcgccatgcacaagtaccactttgtggccaaggccgtggagcccaagcggcaagccctgctggaggcccaggatgacctgggggtgacacagaggatcctggatgaggcaaaacagcgccttcgtgaggtggaggacggcatcgccacaatgcaggctaagtaccgggaatgcattaccaagaaggaggagctggagctgaagtgtgagcagtgtgagcagcggctgggccgagctggcaagctcatcaacgggctgtcggatgagaaggtgcgctggcaggagacggtggagaacctgcagtacatgctcaacaacatctccggcgatgtcctggtggccgctggctttgtggcctacctgggccccttcacgggccagtaccgcacggtgctctacgacagctgggtcaagcagctcaggagccacaatgtcccacacacctccgagcccacgctaatcgggacgctggggaaccctgtgaagatccgatcgtggcagatcgctggcctccccaacgacacactgtcagtggagaacggggtcatcaaccagttttcccagcgctggacccacttcattgaccctcagagccaggccaacaaatggatcaagaacatggagaaggacaatgggctggatgtgttcaagttgagtgaccgcgacttcctgcgcagcatggagaacgccatccgctttggcaagccatgtctcctggagaacgtgggcgaggagctagacccagccctggagccagtgctgctcaagcagacgtacaagcagcagggaaacacggtgctgaagctgggggacacggtgatcccctaccatgaggacttcaggatgtacatcaccaccaagctgcccaacccacactacacgcccgagatctccaccaaactcaccctcatcaacttcaccctgtcgcccagtggcctagaggaccagctactgggccaggtagtggcagaggagcgacccgacctggaggaggccaagaaccagctgattatcagtaatgccaagatgcgccaggagctgaaggacattgaggaccagatcctgtaccggctcagctcctccgagggcaaccctgtagatgacatggaactcatcaaggtgctggaagcctccaagatgaaggctgctgagatccaggccaaagtcaggattgcagagcagacggagaaggacatcgacctgacgcgcatggagtacatacccgtggccatccgcacccagatcctcttcttctgtgtgtccgacctggccaacgtggaccccatgtaccagtactcccttgagtggtttctcaacatcttcctctcgggcatcgccaactcagagagagcagacaacctgaagaagcgcatctccaacatcaaccgctacctgacctacagcctctacagcaacgtctgccgcagcctctttgagaagcacaagctgatgtttgccttcctgctgtgtgttcgcatcatgatgaacgagggcaaaatcaaccagagtgagtggcgatacctcctgtctgggggctccatctcgatcatgactgagaatccggcaccggactggctgtcagaccgggcttggcgagacatcctagcactctcgaacctgccaaccttttcctccttctcttccgacttcgtgaagcacctctcagaattccgggtcatcttcgacagccttgagccccaccgggagcctttgcctggcatctgggaccagtacctagaccagttccagaagctgctagtcctccgctgcctgcgtggggacaaggttaccaacgccatgcaggactttgtggccaccaacctggagccacgcttcattgaaccccagacagccaatctgtcagtggtgttcaaagactccaactccaccacacccctcatctttgtgctgtcacccggcacagaccctgctgccgacctctacaagtttgccgaagaaatgaagttctccaaaaagctctctgccatctccctgggccaggggcagggccctcgggcagaagccatgatgcgcagctccatagagaggggcaaatgggtcttcttccagaactgccacctggcaccaagctggatgccagccctagaacgcctcatcgagcacatcaaccccgacaaggtacacagggacttccgcctctggctcaccagcctgcccagcaacaagttcccagtgtccatcctgcagaacggctccaagatgaccattgagccgccacgcggtgtcagggccaacctgctgaagtcctatagtagccttggtgaagacttcctcaactcctgccacaaggtgatggagttcaagtctctgctgctgtctctgtgcttgttccatgggaacgccctggagcgccgtaagtttgggcccctgggcttcaacatcccctatgagttcacggatggagatctgcgcatctgcatcagccagctcaagatgttcctggacgaatatgatgacatcccctacaaggtcctcaagtacacggcaggggagatcaattacgggggccgtgtcactgatgactgggaccggcgctgcatcatgaacatcttggaggacttctacaaccctgacgtgctctcccctgagcacagctacagcgcctcgggcatctaccaccagatcccgcctacctacgacctccacggctacctctcctacatcaagagcctcccactcaatgatatgcctgagatctttggcctgcatgacaatgccaacatcacctttgcccagaacgagacgttcgccctcctgggcaccatcatccagctgcaacccaaatcatcttctgcaggcagccagggccgggaggagatagtggaggacgtcacccaaaacattctgctcaaggtgcctgagcctatcaacttgcaatgggtgatggccaagtacccagtgctgtatgaggaatcaatgaacacagtactagtacaagaggtcattaggtacaatcggctgctgcaggtgatcacacagacactgcaagacctactcaaggcactcaaggggctggtagtgatgtcctctcagctggagctgatggctgccagcctgtacaacaatactgtgcctgagctctggagtgccaaggcctacccatcgctcaagcctctgtcatcatgggtcatggacctgctgcaacgcctggactttctgcaggcctggatccaagatggcatcccagctgtcttctggatcagtggattcttcttcccccaggctttcttaacaggcactctgcagaattttgcccgcaaatttgtcatctccattgacaccatctcctttgatttcaaggtgatgtttgaggcaccatcagagttaacacaaagaccccaagtagggtgctatatccatggattattcctggaaggtgcccgctgggatccagaggccttccagctggctgagtctcagcccaaggagctgtacacagagatggccgttatctggctcttgccaacacccaaccgcaaggcccaggaccaggacttttacctgtgccccatctacaagacactgactcgtgctggaacactatcaaccacaggacactctaccaactatgtcattgctgtggagatccccacccatcagccccagcgacactggataaagcgtggtgtggccctcatctgtgccctggactactagactcagacagaagggctggggccattaaagctgaattttctaagcagtccaaaaaaaaaaaaaaaaa

SEQ ID NO: 4060 - DNA, 1588 bp, Homo Sapiens
  NM_015514
acaccggaaggggtgggctttgcgaagatggcggcgctgggggtgctggagtccgacctgccaagtgccgtgacacttctgaaaaatctccaggagcaagtgatggctgtaactgcacaagtgaaatcactgacacaaaaagttcaagctggtgcctatcctacagaaaagggtctcagcttcttggaagtgaaagaccagctgctgctcatgtaccttatggatttgacccacctcattctggacaaagcctcaggaggatctcttcagggacatgatgcagttttgagactggtggagattcgcacggttttggaaaagcttcgtcccttggaccaaaagctgaagtatcaaattgacaagctgatcaagactgcagtgacaggcagccttagtgagaatgacccacttcgttttaagcctcatcccagcaatatgatgagcaagttgagctctgaggatgaggaggaagatgaagcagaagatgaccagtctgaggcttcagggaagaaatctgtgaagggagtgtctaagaaatatgttcctccacgcttggttccagtacattatgatgaaacagaagctgagcgggagaagaagcgtctagaacgagccaagagacgggcattgagcagctctgtcattcgtgaacttaaggagcagtactcagatgctccagaggaaatccgtgatgctcggcatccccatgttacccgccagagtcaggaggaccaacacaggattaactatgaggagagcatgatggtgcgtttgagcgtcagtaagcgagagaaaggacggcgaaaacgagcaaatgtcatgagctcacaacttcattcccttacacacttcagtgacatcagtgctttgacagggggaactgttcatcttgatgaggatcagaatcctattaagaagcggaagaagatacctcagaaaggtcggaagaaaaaaggtcagtgaactgctgggacttaggtgatcaggtgcaaggtggggagtacaaattgagtctctttggatttgccattctgggtctcaccaagccctgtagtatctcttccatactgggcaataatctccttaggtgggcttttattttttgctttcctgagctggaaatcagcatcattcacaaaatgaatctctggattctgcctctaaggtcccacagctcctgttcaggcttccctaaatagaactggtaaagtgtcacttgaaggaaccattatcccatttcaattttattcctacttctcgtcttttgtcctgggaagatattcagggtactgcctaggagaccccacccctgtgagcccttccctctagatgtcctgttttcctgtccctttagcttttccaactgtcctttgcctcattcttggtttcccttcctttcaggttttcggaggcggcggtgattatgggtgtacatatttgtatattttttgtcatcctgagatacttctaatttcattgtatataggtggttttccctggaattcattaattgtttgctttggacatgtggaaagagccttactaataaaattgattttgcttatgaattaaagcccctttttgcaca

SEQ ID NO: 4061 - DNA, 2319 bp, Homo Sapiens
  NM_015517
gcgcctctccggagatggtctgaggtgggagaagagctgaagagacctggagccgacagacgggtctgggtctgccgcccaggatggagtacaatggtgtgatcttggctctttgcaacctctgcctcctgggctcaagccttcctcccacctgaacctcccaagtagcgggactgcagggtgaaggccatgccgcctcctgggaaagttccccgaaaggagaatctgtggctacagtgtgagtgggggtcctgctcctttgtgtgctcaaccatggaaaagttctttgagcatgtcactcagcacctgcagcagcacctgcatggctctggggaggaggaggaagaggaagaggaggatgacccacttgaggaagaattctcctgcttgtggcaggaatgtggcttttgttctctggacagttctgctgacctcatccgccatgtctacttccactgctaccacaccaagctgaaacagtgggggctgcaggccttgcaaagccaggctgaccttggcccctgcatcctggacttccagagccggaacgtcatccctgatatccctgaccacttcctgtgtctgtgggagcactgtgagaattccttcgacaatcctgagtggttttatcggcatgtggaagcacacagtctgtgctgtgaatacgaagcagtcggcaaggacaacccggtggtgctgtgtggctggaaaggctgtacctgcaccttcaaggaccgcagtaaacttcgagagcacctccgcagccatacccaggagaaagtggtagcctgccccacctgtgggggcatgtttgccaacaataccaagttcttagatcacatccgtcgccagacctcattggatcagcagcacttccagtgttctcactgttccaagagatttgccacagagcggctattgcgggaccacatgcgcaaccatgtgaatcactataagtgccctctgtgtgacatgacctgcccgctgccttcctccctccgcaaccacatgcgctttcgtcacagtgaggaccggccctttaaatgtgactgttgtgactacagctgcaagaatcttattgacctccagaagcacctggatacccacagcgaggagccagcctacaggtgtgattttgagaactgcaccttcagtgcccgatccctctgctctatcaagtcccattaccgcaaagtacatgaaggagactctgagccaaggtacaaatgtcatgtgtgtgacaaatgcttcacacggggcaacaacctcaccgtgcaccttcgcaagaagcaccagttcaagtggccctcagggcatccccgttttcggtacaaggaacatgaagatggctatatgcggctgcagctggttcgctacgagagtgtagagctgacacagcaactgctgcggcaaccacaagagggatcgggcctgggaacgtcgctgaacgagagcagcctgcagggcattattctagaaacagtgccaggggagccaggacgtaaggaagaggaagaggagggcaagggtagcgaagggacagccctctcagcctctcaggacaaccccagttctgtcatccacgtggtgaatcagaccaatgcccaaggccagcaagagattgtctactatgtgctgtctgaagccccaggggagcctcccccagcccctgagccaccttcagggggcatcatggaaaagcttcaaggaatagctgaggagccagagatccagatggtttgaaggccgcagagccagaccatttcttccccaggtcctgaagtttgagccaggcaagtggcagtgcccctagtgggcagccgttgccaatggatgcctttaggagtggtgccgagagcagtgtggtccactctggcctgggtttgcatcattctgcagactctaaagacttcccttttctgccagactacattttgtggggagcctgaggactctggattctttgaggggatcctggatgtgtgtgttcttgttaaagaggctgttatcaggcttaaccataaccctcaagatctgcttgacagtgattaaatccttagctcacatccattcccatctttcgggctccttaggcccaaggatggcatgtgactggtccctgcaagggtcctttctttgtcaccagccaaggcattgataaccaagtagccattttcctcttaaggtttcctctacaaccccaaggactttcatgattatcctcagggacaggattggaggcattgagcgtgtttattaacaaattgtttttggtaataaaataaatgcttggactcttaaaaaaaaaaaaaaaaaaaa

SEQ ID NO: 4062 - DNA, 5775 bp, Homo Sapiens
  NM_015525
attcctgtagtagcggctgtattgcagccgcctgccgaactgacccgggtctggggactggcccctctggcgccgttcggtttctcttattgccttcactgaggatgagtccctttgtggctctatgtggaccctgcggaatccaccggcgcagtttcatctagcgactggtcacccttgcaattatggatatttaaaagggtcagacagtgtggagggggagttcccctcctcactcccccttggtgcttgactccaggaataatttataaactgtggaatttttttaaatgaagaacttgtatttgatatgaactttatagagctatttataatttttttgatttaagtgccaaaaaattgtataaagatatatagttttatactattgtcaggaggatttaaattatcctaaaaaggtaatttattctctgtaacttcctcaatagcacctttgtgtcctggctttttcattttttaaaattagttttcacgattctgaagtaagtggtataaaaacagttaggatgagttcacccatgcctgactgcacatcaaagtgtcgatccctgaagcatgctttggatgtcctttctgtggtaacaaaggggagcgaaaaccagattaaggcctttctctccagtcattgttacaatgctgcaactatcaaggatgtttttggcaggaatgccctccaccttgtttcctcctgtggaaagaaaggagtgttagattggcttattcagaaaggagtggatctgttggtgaaagacaaagagtctggatggacagcattgcacagaagcattttttatggacatattgattgtgtttggtctctattgaagcatggtgttagtctgtatattcaagataaagaaggcttgtcagctttggatcttgtaatgaaggatagaccaactcatgtagtattcaagaatactgatcctacagatgtttatacttggggcgataatacaaattttaccctgggtcatggaagccagaatagcaaacatcatccagagttggtggatctgttctccaggagtgggatttatatcaagcaggtggtgctttgtaaatttcactccgtgtttctgtctcagaaagggcaggtttatacctgtggtcatggtcctggagggcgattaggacatggagatgaacagacatgcttggtccctcggcttgtggaaggactgaatggtcataattgttcccaagtggcagctgctaaggatcatactgttgtattaactgaagatggatgtgtttatacatttggtctaaacatttttcatcaattaggaattattccaccgccttccagttgtaatgtacccagacagatacaggcaaaatatctgaaaggaaggacaatcattggcgttgcagcaggcaggtttcatacagtcctatggactagagaagctgtttacactatgggactaaatggtggacaactgggttgtttgctagatcccaatggagaaaagtgtgtaactgctcctcgtcaggtctctgcccttcaccataaagacattgctctgtctttggttgctgcaagtgatggagctacagtctgtgttaccacaaggggagatatttacttacttgcagactatcagtgcaagaagatggcttctaaacagttgaacttgaaaaaagttcttgtgtctgggggtcatatggaatacaaggttgatcctgaacatttgaaagaaaatgggggtcaaaaaatttgcattcttgcaatggatggagctggaagggtgttttgctggagatcagtcaacagttctctgaagcagtgtcgatgggcctatccacgtcaggtcttcatttctgatattgctttaaatagaaatgaaattctatttgttacgcaagatggagaaggatttagagggagatggtttgaagagaaaagaaagagttctgaaaagaaagagattttatcaaaccttcacaattcctcatcagatgtgtcttatgtctctgatataaatagtgtgtatgaaagaattcgacttgagaaacttacctttgcacatagagctgttagtgtcagcacagatccaagtggatgcaactttgcaatcctgcagtcagatcctaaaacaagcctttatgaaattccagctgtgtcctcatcatccttttttgaagagtttggcaaactgttgagggaagcagatgaaatggacagcattcatgatgtgacatttcaagttggcaatagactcttccctgcacataaatatattttggcagtgcattctgatttttttcagaaattgtttctttcagatggtaatacttcagaatttacagatatttaccagaaagatgaagattctgcagggtgccatctctttgtggtagagaaggttcatcctgacatgtttgaataccttttacaatttatatacacagatacttgtgactttttaactcatggcttcaaaccaagaatacacttaaacaaaaacccagaagaatatcagggaactctgaattctcatttgaataaagtgaatttccatgaagatgataaccagaagtctgcatttgaagtttacaaaagtaatcaagctcaaacagttagtgagaggcagaagagcaaacctaaatcttgtaaaaaaggaaaaaatattagggaagatgatcctgtaagaatgttgcaaactgttgcaaagaaattcgacttcagtaatttgagtagtaggttagatggagtcagatttgaaaatgaaaaaattaatgttattgccaagaacactggtaataaactgaagctaagtcagaaaaaatgttcatttctgtgtgacgtgaccatgaaatcagtggatggaaaggaatttccttgtcataaatgtgttctttgtgctagacttgaatattttcatagtatgctgagtagctcatggattgaggcttccagttgtgcagctctggaaatgccaatacattctgatatattaaaagttattttggactacctctatactgatgaagctgtggtgataaaagaatctcaaaatgtagattttatttgtagtgttcttgtggtggctgatcaacttctcataacccggttgaaagagatttgtgaagtagcattaactgaaaaacttaccctgaagaatgctgctatgctactggaatttgcagcaatgtatagtgcaaaacagttgaaactgtcttgtttacagtttataggattgaatatggcagctttacttgaagcaaggtctcttgatgttttaagcgatggtgttttgaaggatctttctgagttttaccggaaaatgattccagcaatggatagaagagtcattacaccatatcaagatggaccagatattagctatttggaagtagaagatggagatatcttcttgaaagaagaaataaatatggaacaaaatcattcggaaactatgttcaagaaagcaaaaacaaaagctaaaaagaagccacgtaaacgttcagatagttctggaggttataacctttcagatattattcagagtccatcatctacaggattattaaagtctggtaagaccaattctgtggaatctcttccagaactgttgacatcagactctgaaggaagctatgcaggagtgggtagtcctagagatttacagtcccctgatttcacaacaggatttcattcagataagattgaggcgaaagtcaaaccgtatgttaatggtacatctcctgtgtattctagggaagatttaaaaccatgggaaaagtcaccaatacttaaaatatctgctccacagcctattcccagtaacagaattgatactaccagctctgccagttgggttgctggttctttcagtcctgtcagccctcctgttgtggatctcagaactatcatggaaatagaagaaagtagacaaaaatgtggagctacaccaaagtcacatttaggcaaaacagtttctcatggagttaaactttctcagaagcaacgaaaaatgattgcattgactaccaaggaaaacaattcaggaatgaatagcatggaaacagttttattcactccttcaaaagcccccaaaccagtgaatgcatgggcatcttctctgcattcagtttcatccaagtcattccgggatttcttactagaagaaaaaaagtctgttactagccatagttcaggcgatcatgtcaaaaaagtttcttttaaaggaattgaaaattctcaggcaccaaaaattgtcagatgctctacccatggtaccccaggaccagaaggcaaccatatttcagatttaccacttctagacagtcccaatccctggctatcttcttcagtgactgctccatccatggtagccccagtcacttttgcatctattgtagaagaagaactacaacaagaagcagctcttattagaagtcgagaaaaaccgttggctctgattcagattgaggagcatgccatacaagatttattggttttctatgaggcatttggcaaccctgaagagtttgtcattgttgaaaggacaccgcagggaccactggcagtacctatgtggaataagcatggatgctagttcactgtggagttgagatgcattttacataattatgagtttgttcatataaagaaaagctgtggaaaagagtcttagagattttgtaatatcattctaaatagattaagaaaagatataatttctttactgcagttaaatcatataatgtttgtatgattaaaaataaatttctcagaattgtgattttagtaactttatataaaatgtgtgagacaaaaacttattaaggttaaatagaattgtttcttctgaataatctaacaaaggaaaatataagtgattgaatcataagatataaggggggtaaagtattaaaaataacttttttgtttgataacttgagaatttagaagattttgccaagtatgtgttgttgcttgacttcttaaatatggcattgatgaatttaaagtaggagcatcagttattacttctgattcattaatggccagaattttgtgtttggtgtaatagttgtgtcaccattcttgttgctttttaaaaatcaggctaatcatgtggtccatgtctcttcaaagcttgacctgcacaaatgccatatttctatttggaccacatattctccattttgcattgagcagtagagtacagtggaaagggaataagaatactgattattctgaacagtttagtcccaagagaatagcgttttaaaaaagaaaaacaagatttggagtcattgtgggttatttttggtgggatggaggatcttaaaaatgcctaattgtgagagaatcaattgctgaaagtgttaaaatttctgaaaataaatgcttaattacatatacaggaattaaatagtttggaagagggttggattatcattacctttacaatactgtataatcagaagttctctgaacctcaattgtatatctagacataaaaattgttttctgtataggatgttgtttggtttgtttctgagtgtttaaattttgcaaaaacaaatgttaaatttgtgcttcagtacctagataaattggaaaggttaatgttctagtttctggaaggtaagcctgggagacacataagcaattcactgctataatttagttgatgtaaaatgacggaaactgactcaatatgtcaggtttaactctgcccaaaagcagcagacatgtaagcagatgtgcaataaaaaatgatcttgatccatttc

SEQ ID NO: 4063 - DNA, 3389 bp, Homo Sapiens
  NM_015526
gcatgcgcagtcgcgcccctccctctccgcccccaccccctgtcggcgtctgggcctcgtccccttctctctgtctcccttgcctcccccatcacgtcccctgacaccgacaccccattgctcccacagtctccccagtctccactttggtccccagcgctgtctgcccgaggatttgcctgaaggctgcccccaactctgcacccgccccccgagggccaccgaggaccatgactaagacagatcctgccccgatggccccgccaccccgaggagaggaggaagaagaggaggaggaggatgaacccgtccccgaggcccccagccccacccaggagcgccggcagaagcctgttgtgcacccctcggcacctgcccccctccctaaggactacgctttcaccttcttcgatcccaatgacccggcgtgccaggagatcctgtttgaccctcagaccaccatccccgagctgtttgccattgtgcgccagtgggtgccccaagtccagcacaagatagacgtcatcggcaatgagattctgcgccgaggctgccatgtgaacgatcgtgacgggctgaccgacatgacactgctccactatgcgtgcaaagctggggcccacggagtcggggaccccgcggcagccgtgcgcctctcgcagcagctgctggcgctgggcgcagatgtgacgctgcgcagccgctggaccaacatgaacgcgcttcactacgcggcctattttgatgtgcccgacctcgtgcgtgtgctgctgaagggtgcgaggccgcgagtggtgaactccacgtgcagtgacttcaaccacggctcagccctgcacatcgctgcttccagcctgtgcctgggcgccgccaaatgtttgctggagcacggcgccaaccctgcgctgaggaatcgaaaaggacaggtgccggcggaggtggtcccagatcctatggacatgtccctggacaaggcagaggcggcactggtggccaaggagctgcggacgcttctggaagaggcagtgccactatcttgcgccctccccaaggtcacgctacccaactatgacaacgtcccaggcaatctcatgcttagcgcactgggcttgcgcctgggagaccgcgtgctgctggatggccagaagacgggcacactgcggttctgtgggaccacggagtttgccagcggccagtgggtgggcgtggagctggacgaacctgagggcaagaacgatggcagcgttgggggcgttcggtacttcatctgccctcccaagcagggtctctttgcctccgtgtccaagatctccaaggcagtggacgcacccccctcctctgtcacctccacaccccggaccccccggatggacttctcccgtgtcaccggcaaaggccgcagggaacacaaaggcaagaagaagaccccatcatccccatctctgggcagcttgcagcagcgtgacggggccaaggctgaggttggagaccaggtccttgtcgcgggccagaagcaggggatcgtgcgcttctacgggaagacagactttgccccaggttactggtatggcattgagctggaccagcccacaggcaagcatgatggctctgtcttcggtgtccggtacttcacttgccccccgaggcatggggtcttcgcaccagcatcccgtattcagaggattggcggatccactgattcccccggggacagcgttggagccaaaaaagtgcatcaagtgacaatgacgcagcccaaacgcaccttcaccacagtccggaccccaaaggacattgcatcagagaactccatttccaggttgctgttctgctgctggttcccctggatgctgagggcggagatgcagtcttagaggccctggacacctgacaaagagacagagtccccactagcatctcctgacacccgaggagccctgagtcaccctgagatagagattcccagtaacacatccagagtagagacccctgttagccagccctcgatcattgaggccccattattaacagatactcccataataacccccaaatacagaccccatgtcacccagaaagagattccctgagtagcaccttcaggctagtccctatccccaacccctcagagcagattcccagattaacagatttccatatcaccccaaatgatggtgaccctctccacataatgcattacaacagaacattcttgaatcacccaaccctggatcagaaacctccccattaacaaacactgccccttaagtcctcttgaaataaacataggtcacacccccaaagcaaaagagtaacagacattcatgtcattgttccccatttaacatcagtcctctcaagatgtcgtgaccccatggtcaccctgaagcccttagattccaacccctcaatcagagacttccttcattaacaaagacccttgttcttatccctcaagaagaaacccaccataaccagcccactgtcacccctaatttacagacaccaaaacagtcctggaagtgctaattacaggaccccccaagtcttcctaccctctgcaccctcaagaaacccccagtgccttgtatgaagcccaccccacatggcccacagctcctgtgctggccagactcccagaaaattctctattttttaagtaacgacttccccctttgggggaccccaaaatttggaggccccattctaggactctggggatcccaaaccctagagtacacacgtcccaaactcccctgtgccctcaagtcctacagcccctagaagaccccaatgccgtaactcctaggacccccaaatcatggaatcccaaatccccagggaatcccaaatttgaaaatccaatcccaagtccccaggaaacccaatcatgaggtccttgtgcctggtatggaggagactgcagtcaggatatgcattccaggctcccagacacctcaagccctattcacaggcaccaggaaaccccacacaggaattcccatccctggaaactggagaatttcaatgccccgagtccatgggtttcaagacaccaaattccaagagccccagccctaagggaaccccaaatcctaaagcctccatctctaataaatggaaggccccaaggccctgaggggatctcaaatcctggaaccccgatttcaatctacgttctagtcactggcctcaaaggaccccacagcacctgggccagaccaacagctcgagggagaacctgaaggcccagggggtccagggcggacctggggccccgaccaccaaggacagctcacgactgccccttcactgcatgtccccaaactcagcatgactcctgtcctcttcaataaagacgtttctatggccaaaaaaaaaaaaaaaaa

SEQ ID NO: 4064 - DNA, 3326 bp, Homo Sapiens
  NM_015527
gaggggcggcccgcggccatggagacgggcacggcgcccctggtggccccgccgcgccgtcatggcgcccccgcggccccctcgccgccgccccggggttcccgggccgggcccgtcgtggtggtggctccgggacctccagtgactacggccacttcggcccccgtcaccctggtggcccccggggaggcgcggcccgcctgggtcccggggtcggccgagacctctgctccggccccggccccagccccggccccagccccggctgtcacgggcagcacggtggtggtgctgaccctggaggcctcgcccgaagccccaaagccgcagctcccctccggcccggaatccccagagcccgcggcagtggctggagttgagacatcgagggctctggccgcaggggcagactcgccgaagacagaggaggctcgaccctcacccgccccaggaccagggacccccaccgggacccctaccaggaccccttccagaacggctcctggtgccctgaccgccaaacccccgcttgcccccaagccgggaaccacagtggcctcaggagtgactgcacggagtgcatcaggacaagtgacaggtgggcatggagctgccgcagcaacatcagcatcagcaggacaggctcctgaggacccctcaggccctggcacaggcccctctgggacttgtgaggctccggtagctgtcgtgaccgtgaccccagctccggagcctgctgaaaactctcaagacctgggctccacgtccagcctgggacctggcatctctgggcctcgagggcaggccccggacacgctgagttacttggactccgtgagcctcatgtctgggaccttggagtccttggcggatgatgtgagctccatgggctcagattcagagataaacgggctggccctgcgcaagacggacaagtatggcttccttgggggcagccagtactcgggcagcctagagagctccattcccgtggacgtggctcggcagcgggagctcaaatggctggacatgttcagtaactgggataagtggctgtcacggcgattccagaaggtgaagctgcgctgccggaaggggatcccctcctctctcagagccaaagcctggcagtacctgtctaatagcaaggaacttctggagcagaacccaggaaagtttgaggagctggaacgggctcctggggaccccaagtggctggatgtgattgagaaggacctgcaccgccagttccctttccacgagatgtttgctgctcgaggggggcatgggcaacaggacctgtaccgaatcctgaaggcctacaccatctaccggcctgacgagggttactgccaggcccaggcccccgtggctgcggtcctgctcatgcacatgcctgcggagcaagccttttggtgcctggtgcagatctgcgacaagtacctcccaggttactacagtgcagggctggaggccattcagctggacggggagatcttttttgcactcctgcgccgggcctccccgctggcgcatcgccacctgcggcggcagcgcattgaccctgtgctctacatgacggagtggttcatgtgcatcttcgcccgcaccctgccctgggcgtcggtgctgcgtgtctgggacatgtttttctgtgaaggcgttaagatcatcttccgggtggccctggtcctgctgcgccacacgctgggctcagtggagaagctgcgctcctgccaaggcatgtatgagaccatggagcagctgcgtaacctgccccagcagtgcatgcaggaagacttcctggtgcatgaggtgaccaatctgccggtgacagaagcactgattgagcgggagaatgcagcccagctcaagaagtggcgggaaacgcggggggagctgcagtatcggccctcacggcgactgcatgggtcccgggccatccacgaggagcgccggcggcaacagccacccctgggcccctcctccagcctcctcagcctccctggcctcaagagccgaggctcccgggcagctggaggggccccgtccccgccgccccccgtccgcagagccagtgctgggcctgccccagggcctgtggtcactgctgagggactgcatccatcccttccctcacccactggcaatagcacccccttgggttccagcaaggagacccggaagcaggagaaggagcggcagaaacaggagaaggagcggcagaaacaggagaaggagcgggagaaggagcggcagaagcaggagaaagagcgagagaagcaggaaaaggagcgagagaagcaggagaaggagcggcagaagcaggagaagaaggctcaaggccggaagctttcgctgcgtcgaaaggcagatgggcccccaggcccccatgatggtggggacaggccctcagccgaggcccggcaggacgcttacttctgacctctgccctggggctggactgcatggcccccctctttccctcagccaagaacaggcctggcccaaggtgccaccccctagcaccttgtcaggctgtcccttgctggggaaagtggcttggttccccatctcctcgccagctgctgatccctacacgggcaggacagatgggcagctgcaaatgagtctggagcctctcatctcccatgaggctcagctggggtctctgtcgctcctgccccagttccctctgggtcccctcctaggtgctgtcctgaatggcccgttgtcatcccaggggtgactcctggtgatgggagtcagcagtttcagattcttacactccatagctccccttaccatgaggtggagctggcttccttttccctgtcttcagccctccctgtctcccccacttcctggccagggctctcattctggacctgtgttgtaattgtgtacagaggatggcgttggcctggggtgggggtgctcgctttgtcttctgtcctttggttctccttccataatgctcctgtacccagtttatttaaggggacatgcactggaataggaaatgtcccccatctcccttcctgcaccctgctgtgctccctccaaacccaccttgctctgtgttctcaggcccccctgcttttgtctcaccaggacccatacctttcaccttgttcccttccacccctccagttagtccctatctgggtaagggtcttcccttgagctccagggggtggaacccaatgtttacattctcttctgtctctgcccccaccccatgcagcgctttgaggaattggaaaagaacctgctgttgtacctgggaaaaaaaaaaaaaaaaaaaaaaaaaaaaaaaaaaaaaa

SEQ ID NO: 4065 - DNA, 3191 bp, Homo Sapiens
  NM_015530
aataagcatgaatacgacctggctacctgaaggaggtaggacggggaaccgagcagcagcaggtggtggaatgccagggaaatccaaccgtgcttcccacgctggcatcgctctgattatgaccaatcctctaatcttattctcacaattagggaggaagaaaaaaaaacaaacccaaaccaaaaaagaagttggtaggtgactctgtgagactactgttttataaagggagcgtttccttttataaaatttagctgagcagatgctaggcagcccacaggaggccactattcccctcagctgtacagtttgggaaaatacctacacacccggagaacagagagcttggtgtgtgttgagttcgctcctgttcatcagcagccctttccccgcctctggccaccagggggacctgcaaccaagtatgtgttctttcaggcgagcgggaacgcgtctgcataaatctagtccaatccagggccccgtagcaaggcgccaaagctgggggaagcgcatttctgttctctcgcgagcacgacgcggtgcctcccagtcctcctccggccctccctctccgccctcccggcccgcgagcgctcgggccccttccagtggctcgcggcaggtggcgctgtctgcggcgtcgcagcggcccgggctgcagcagagacgatctcccggcgggctgtgcggcccggctctccggcggcagcgagtgccacgtcccaagtgctacgcggaggattagagcaggcggtgcgctgggggcgggagcagcgcggagcccggctcggccacaccgatcgcccgccgccatgggctcctcgcaaagcgtcgagatcccgggcgggggcaccgagggctaccacgttctgcgggtacaagaaaattccccaggacacagagctggtttggagcctttctttgattttattgtttctattaatggttcaagattaaataaagacaatgacactcttaaggatctgctgaaagcaaacgttgaaaagcctgtaaagatgcttatctatagcagcaaaacattggaactgcgagagacctcagtcacaccaagtaacctgtggggcggccagggcttattgggagtgagcattcgtttctgcagctttgatggggcaaatgaaaatgtttggcatgtgctggaggtggaatcaaattctcctgcagcactggcaggtcttagaccacacagtgattatataattggagcagatacagtcatgaatgagtctgaagatctattcagccttatcgaaacacatgaagcaaaaccattgaaactgtatgtgtacaacacagacactgataactgtcgagaagtgattattacaccaaattctgcatggggtggagaaggcagcctaggatgtggcattggatatggttatttgcatcgaatacctacacgcccatttgaggaaggaaagaaaatttctcttccaggacaaatggctggtacacctattacacctcttaaagatgggtttacagaggtccagctgtcctcagttaatcccccgtctttgtcaccaccaggaactacaggaattgaacagagtctgactggactttctattagctcaactccaccagctgtcagtagtgttctcagtacaggtgtaccaacagtaccgttattgccaccacaagtaaaccagtccctcacttctgtgccaccaatgaatccagctactacattaccaggtctgatgcctttaccagcaggactgcccaacctccccaacctcaacctcaacctcccagcaccacacatcatgccaggggttggcttaccagaacttgtaaacccaggtctgccacctcttccttccatgcctccccgaaacttacctggcattgcacctctccccctgccatccgagttcctcccgtcattccccttggttccagagagctcttctgcagcaagctcaggagagctgctgtcttccctcccgcccaccagcaacgcaccctccgaccctgccacaactactgcaaaggcagacgctgcctcctcactcactgtggatgtgacgccccccactgccaaggcccccaccaccgttgaggacagagtcggcgactccaccccagtcagcgagaagcctgtttctgcggctgtggatgccaatgcttctgagtcaccttaactttgaaccattctttggaattggcgtggtatatttaaccacgggagcgtgtctggaaacgcaaactatcattaatttcatactagtttgtaccgtatctgtaggcatcctgtaaataattccaaggggaaaactaaacgaggacgtgggttgtatcctgccaggttgagtggggctcacacgctagggtgagatgtcagaaagcgcttgtattttaaacaaccaaaaagaattgtaagggtggcttgctgccaggcttgcactgccgttcctgggggtgtgcatcttcgggaaaggtggtggcggggcgtccactaggtttcctgtcccctgctgctccttccgtaagaaaatgaaatattctatgcctaatactcacacgcaacatttcttgtactttgtaagtcgtttgcgagaatgcagaccacctcactaaactgtaaacggtaaagagatttttacttttggtctccgtgagtcgcatctctactaaggtttacacaggaattccacctgaagacttgtgttaaagttctacagcgcgcactgttaactgaacgtctttttcttcagcctatacgcggatccttgttttgagctctcagaatcactcagacaacattttgtaactgctgctgttgctttctacatacaccttataaagtgacatttcaaaagaaataaggtgccacagttttaaaccagaaggtggcactctgtggctccttgtagtattatagctatactgggaaagcatagatacagcaataaagtacagtaattttactttttttcttgtgttacatctaaattacaacccttaattgccacgtgtgcacttactactctccagtatgtcttattactctccagtatgtcacgcatctttaacttttcacgtcctatgtttgctttctcccatttttaagagatggtaagttaactggaattgatttactgaatgaaattaaatgcagatatccctgtttttgaaataagacaaaaaaaaaaaaaaaa

SEQ ID NO: 4066 - DNA, 4344 bp, Homo Sapiens
  NM_015534
gttggcagagcagttgtcctggatggcggagccttgggttccgggggcctgggacctgcaactctttctacaagatatcaagttattctagtacaaccatataaataaataatacctgaagtctcagtgtaacatggacaattaacagtgatgacagataaatacagacgcatggggatcaaatactaggcaaaacgctttttaaaagtgtatcaggcttttaagaaacactgcaggatcctgtctatcttaatgctgatagagctcagctaaaaatttaggaggttctagtattcttcatggctgaagctgagagagtctgaaaccctgatgcttaagctccattctagatcatagctccaactccttcaggatataaggaaaagagattatatttccacaatgatagatctttggttgtacaggtttcccaatgagtggatcatgatgaccgtattgtagggacttgccatagtatggctgcttcccgatctactcgtgttacaagatcaacagtggggttaaacggcttggatgaatctttttgtggtagaactttaaggaatcgtagcattgcgcatcctgaagaaatctcttctaattctcaagtacgatcaagatcaccaaagaagagaccagagcctgtgccaattcagaaaggaaataataatgggagaaccactgatttaaaacagcagagtacccgagaatcatgggtaagccctaggaaaagaggactttcttcttcagaaaaggataacatagaaaggcaggctatagaaaattgtgagagaaggcaaacagaacctgtttcaccagttttaaaaagaattaagcgttgtcttagatctgaagcaccaaacagttcagaagaagattctcctataaaatcagacaaggagtcagtagaacagaggagtacagtagtggacaatgatgcagattttcaagggactaaacgagcttgtcgatgtcttatactggatgattgtgagaaaagggaaattaaaaaggtgaatgtcagtgaggaagggccacttaattctgcagtagttgaagaaatcacaggctatttggctgtcaatggtgttgatgacagtgattcagctgttataaactgtgatgactgtcagcctgatgggaacactaaacaaaatagcattggttcctatgtgttacaggaaaaatcagtagctgaaaatggggatacggatacccaaacttcaatgttccttgatagtaggaaggaggacagttatatagaccataaggtgccttgcacagattcacaagtgcaggtcaagttggaggaccacaaaatagtaactgcctgcttgcctgtggaacatgttaatcagctgactactgagccagctacagggcccttttctgaaactcagtcatctttaagggattctgaggaggaagtagatgtggtgggagatagcagtgcctcaaaagagcagtgtaaagaaaacaccaataacgaactggacacaagtcttgagagtatgccagcctccggagaacctgaaccatctcctgttctagactgtgtttcagctcaaatgatgtctttatcagaacctcaagaacatcgttatactctgagaacctcaccacgaagggcagcccctaccagaggtagtcccactaaaaacagttctccttacagagaaaatggacaatttgaggagaataatcttagtcctaatgaaacaaatgcaactgttagtgataatgtaagtcaatctcctacaaatcctggtgaaatttctcaaaatgaaaaagggatatgttgtgactctcaaaataatggaagtgaaggagtaagtaaaccaccctcagaggcaagactcaatattggacatttgccatctgccaaagagagtgccagtcagcacattacagaagaggaagatgatgatcctgatgtttattactttgaatcagatcatgtggcactgaaacacaacaaagattatcagagactattacagacgattgctgtactcgaggctcagcgttctcaagcagtccaagaccttgaaagtttaggcaggcaccagagagaagcactgaaaaatcccattggatttgtggaaaaactccagaagaaggctgatattgggcttccatatccacagagagttgttcaattgcctgagatcgtatgggaccaatatacccatagccttgggaattttgaaagagaatttaaaaatcgtaaaagacatactagaagagttaagctagtttttgataaagtaggtttacctgctagaccaaaaagtcctttagatcctaagaaggatggagagtccctttcatattctatgttgcctttgagtgatggtccagaaggctcaagcagtcgtcctcagatgataagaggacgcttgtgtgatgataccaaacctgaaacatttaaccagttgtggactgttgaagaacagaaaaagctggaacagctactcatcaaataccctcctgaagaagtagaatctcgacgctggcagaagatagcagatgaattgggcaacaggacagcaaaacaggttgccagccgagtacagaagtatttcataaagctaactaaagctggcattccagtaccaggcagaacaccaaacttatatatatactccaaaaagtcttcaacaagcagacgacagcaccctcttaataagcatctctttaagccttccactttcatgacttcacatgaaccgccagtgtatatggatgaagatgatgaccgatcttgttttcatagccacatgaacactgctgttgaagatgcatcagatgacgaaagtattcctatcatgtataggaatttacctgaatataaagaactattacagtttaaaaagttaaagaagcagaaacttcagcaaatgcaagctgaaagtggatttgtgcaacatgtgggctttaagtgtgataactgtggcatagaacccatccagggtgttcggtggcattgccaggattgtcctccagaaatgtctttggatttctgtgattcttgttcagactgtctacatgaaacagatattcacaaggaagatcaccaattagaacctatttataggtcagagacattcttagacagagactactgtgtgtctcagggcaccagttacaattaccttgacccaaactactttccagcaaacagatgacatggaagagaacatcatttactagtcctcttcaacacatagcaatggtatcattgttaattatgtgcacagtttggaaagattctctgctttcccagaaatgacactcacagcatgagagcttcctgagtgttctcgtcaagtacagctctgcaccgttgtggctctagatcactgttcagcagctgaacattcctggtgagcaaaggtttccctggtgaatttttcaccactgcgttttaggtggtgatcttaaatgggtgagatggaacgagagcacacattaaagagagagtaaattccaaaggtttcaaagaacttggtcataaatatgataatgagaagacaaagtatttatattaaaacagtttagtagccttcagttttgtgaaaatagttttcagcacagaaactgacttctttagacaaagttttaaccaatgatggtgtttgcttctaggatatacactttaaaagaactcactgtcccagtggtggtcattgatggcctttagtaaattggagctgcttaatcatattgatatctaatttcttttaaccacaatgaattgtccttaattaccaacagtgaagcactacaggaggcaactgtggcattgcttccttaaccagctcatggtgtgtgaatgttataaaattgtcactcagatatattttttaaatgtaatgttatataagatgatcatgtgatgtgtacaaactatggtgaaaagtgccagtggtagtaactgtgtaaagtttctaattcacaacattaattcctttaaaatacacagccttctgcctctgtatttggagttgtcagtacaactcatcaaagaaaactgcctaatataaaaatcatatatatggtaataatttccctcttttgtagtctgcacaagatccataaaagattgtatttttattactatttaaacaagtgattaaatttagtctgcacagtgagcaagggttcacatgcattcttttatactgctggattttgttgtgcatcatttaaaacattttgtatgtttcttcttatctgtgtatacagtatgttcttgaatgatgttcatttgtcaggagaactgtgagaaataaactatgtggatactgtctgtttatattaaaagaaaaaaaaaaaaaaaaa

SEQ ID NO: 4067 - DNA, 3646 bp, Homo Sapiens
  NM_015537
ggttcgggcagcgctctcccgggagcggcggcacgcgcggagcgccgggtgcggccatgcggggaccgggcccgaccccgagcccgaccccgagcccaagcccgagccggagcccgagcgagaccccgagcccgagcccgagcgcgacccccggtgcggcgcggctaccccggcggaggcggcgggcgcggggcgcgctctgaggcccgggggatgcgccgccgcctcgaccatgggcgccgccgcctccaggaggagggcgctgaggagcgaggccatgtcctcggtggcggccaaagtgcgagcagcccgagcgtttggagagtacctgtcccagagtcaccctgagaaccgcaacggcgcagatcacctgctggctgatgcctactctggccacgacgggtcccccgagatgcagccggccccccagaacaagcgccgcctgtccctcgtctccaacggctgctacgagggcagcctctcagaggagcccagcattaggaagcccgcaggcgagggccctcagcctcgagtgtacaccatctctggggagcctgccctgctgcccagccctgaggcggaggccattgagctggcggtggtgaaggggcggcggcagcggcaccctcaccatcacagccagcccctgcgcgccagccctggtggcagccgggaggacgtcagcaggccctgccagagctgggcgggcagccgccagggctccaaggagtgccccggatgtgcccagctggctcctggccccacccctcgggcctttgggctggaccagccacctctgcctgagacctccggtcgccgcaagaagctggagaggatgtacagcgttgaccgtgtgtctgacgacatccctattcgtacctggttccccaaggaaaatcttttcagcttccagacagcaaccacaactatgcaagcggtgttcaggggctacgcggagaggaagcgccggaaacgggagaatgattccgcgtctgtaatccagaggaacttccgcaaacacctgcgcatggtcggcagccggagggtgaaggcccagacgttcgctgagcggcgcgagcggagcttcagccggtcctggagcgaccccacccccatgaaagccgacacttcccacgactcccgagacagcagtgacctgcagagctcccactgcacgctggacgaggccttcgaggacctggactgggacactgagaagggcctggaggctgtggcctgcgacaccgaaggcttcgtgccaccaaaggtcatgctcatttcctccaaggtgcccaaggctgagtacatccccactatcatccgccgggatgacccctccatcatccccatcctctacgaccatgagcacgcaaccttcgaggacatccttgaggagatagagaggaagctgaacgtctaccacaagggagccaagatctggaaaatgctgattttctgccagggaggtcctggacacctctatctcctcaagaacaaggtggccacctttgccaaagtggagaaggaagaggacatgattcacttctggaagcggctgagccgcctgatgagcaaagtgaacccagagccgaacgtcatccacatcatgggctgctacattctggggaaccccaatggagagaagctgttccagaacctcaggaccctcatgactccttatagggtcaccttcgagtcacccctggagctctcagcccaagggaagcagatgatcgagacgtactttgacttccggttgtatcgcctgtggaagagccgccagcactcgaagctgctggactttgacgacgtcctgtgaggggcagaggcctccgcccagtcaccatcaggccactccctctgcaccgggacctggggctgggccgcctcgtgctccccgggactgtgtggctccggtctcgcctggagccacttcagggcacctcagacgttgctcaggttccccctgtgggttccggtcctcgctgcacccgtggccgcagaggctgcagtccctgggggccgggaggatcccgccctgtggcccgtggatgctcagcggccaggcactgacctgccatgcctcgcctggaggctcagctgtgggcatccctccatggggttcatagaaataagtgcaatttctacacccccgaaacaattcaaagggaagcagcatttcttgttaactagttaagcactatgctgctagttacagtgtaggcaccccggcccagcagcccagcagcccacatgtgttcaggaccctccctgcccaccccctccctgccgtatcgatcaccagcaccagggtggcccgtgtgcgtggggccagcgtcgccgggctgcccagcctggctctgtctacactggccgagtctctgggtctgtctacactggccgagtctccgactgtctgtgctttcacttacactcctcttgccaccccccatccctgcttacttagacctcagccggcgccggacccggtaggggcagtctgggcagcaggaaggaagggcgcagcgtcccctccttcagaggaggctctgggtggggcctgctccccatccccccaagcccacccagcactctcattgctgctgttgagttcagcttttaccagcctcagtgtggaggctccatcccagcacacaggcctggggcttggcaggggcccagctggggctgggccctgggttttgagaaactcgctggcaccacagtgggcccctggacccggccgcgcagctggtggactgtaggggctcctgactgggcacaggagctcccagcttttgtccacggccagcaggatgggctgtcgtgtatatagctggggcgagggggcaggccccccttgtgcagagccaggggtctgagggcacctggctgtgttcccagctgagggagggctggggcgggggccgggcttggaacgatgtacgataccctcatagtgaccattaaacctgatcctccaccgcggccgccgcgtgggtctgtcctctcagtgctttccaggggccttcctgtgcccagcttctgggcccactcctgtgaggtcactgctgcagggccttcctgcctggacagagttggagctaggccactagaccaccccacagggcatagccagggggaccagcacaggaggggacggagaggagctgcaggagggctggggggaggctgcagtctcggaggggggcctcgccgggtctggaggggacagcagagacagcccgttccccctgccgcctgagggcaccagggagagggctgtatgtccctcacgccacactgtgtgtgcagtcagcagtgtggccacagatgggggccactctctcaacctcaggtgtcctcagggcccagaccgctgctgggcacagccaggctggctgccagctggttccctgccccgtggctgggggacagagcagcacgtatcagctgggctagggtcagggggccactggtgcgcagcctggcacagcctggcaggcttgaggcccagtgtgctgggggtggtcacacagccgtcagccacctccagctcttccagggcattctagatggggtcccgggagggggcaggttttggtgccaatttgagtgtataaagttttaggtaaataccaaaaaa

SEQ ID NO: 4068 - DNA, 4698 bp, Homo Sapiens
  NM_015540
gcgatctctgcggggcaagatggcggcgcccagacaggcctggagcacggatgaataagagggaacccccacacggagacactgctggagagagtcgtactggggaggcagctggagcagcaagatgctgtcgagaccgaagccaggggagtccgaggtggacctgctgcacttccagagtcagtttctcgcagctggtgcagccccagcagtgcagttggtgaagaaaggaaataggggcggtggtgatgccaactcagaccggcctccgctccaggaccatcgggatgtggtgatgttggacaatctcccagatttgcccccagctttggtcccttctcctccaaagagagccaggcccagccctggccactgcctgcctgaggatgaggacccagaagagaggctgaggaggcatgatcagcacatcactgctgtcttgactaagattattgaacgagatacaagttcagtggccgtgaatctgcctgtgcccagtggtgttgctttccctgctgtgttccttcgctcgcgggacacacaggggaaatcagcaacatctggtaagagaagcatctttgcccaggaaattgcggcaaggaggatagctgaagccaagggcccatcagttggggaagttgtgcccaacgtgggcccaccagagggtgccgtgacctgtgagacacccactcctaggaaccagggctgccagcttcctgggagcagccacagctttcagggacccaatctggtcacagggaaggggctcagggatcaagaagctgagcaggaagcccagactatccatgaagagaacatagcaagactgcaggccatggctcctgaggagatcctgcaggaacagcagcggttgctggcccagcttgaccccagcttggttgctttcttgagatctcacagccacacgcaagagcaaacaggagagacagcctctgaggagcagaggccaggaggaccctctgctaatgtcaccaaggaggaacccctcatgtcagcttttgccagtgagcccaggaagagagacaagctggagccagaagccccagctctggcattgcccgtgacccctcagaaagaatggctgcacatggacactgtcgagctggagaagctccactggacccaggacttgccccctgtccggcggcagcagacacaggagaggatgcaggctcgattcagtcttcagggagaactactggcccctgacgtggacctgcccacccacctgggtctgcaccaccatggagaggaggcagagagagcggggtattccctacaggagctgttccacctgacccgcagccaggtttcccagcagagagcactggcactgcatgtgttagcccaggtcatcagcagggcccaggctggtgagtttggggaccggctagcaggcagtgtcttaagcctccttttggatgctggtttcctcttcctactgcgcttctccttggatgacagagtggatggggtcattgcaaccgccatccgtgctcttcgggctctgctggtggctcctggagatgaggagctcctcgacagcaccttctcttggtaccatggagctttgacgttccctctgatgcccagccaggaggacaaggaggatgaggacgaggatgaagaatgcccagcaggaaaagcaaaaaggaaaagccctgaagaagaaagccggcctccacctgacctggcccgacatgatgtcatcaaggggctcctggctaccagcctgctgcctcggctgcgctacgtgctggaggtgacatacccaggacctgcggtggtccttgacatcctggctgtgctcatccgcctggcccggcattccctggaatcagccacaagggtcctggagtgccctcggctgatagagactatagttcgagagttcttgcccaccagttggtctcctgtgggggcagggcctacccctagtctatacaaagtaccctgtgctactgccatgaaactacttcgtgtcctggcctcagctgggaggaatattgctgcccggctgttgagcagctttgatctccggagccgcctgtgccgcatcatagctgaggctccccaagaactggccttgcccccagaggaagctgagatgctgagcaccgaggccctccgtctgtgggctgtggctgcctcctatggccagggcggttacctttacagggagctctacccagtgctgatgcgggccttgcaggtggtgccgcgggagctcagcacccacccacctcaacccctgtccatgcagcggatagcctcactgctcactctcctcacccagctaaccctggcagccggcagtacccctgctgaaaccatcagtgattctgctgaggccagcctctcggccaccccttccttagtcacttggacacaggtgtctgggctccagcctcttgttgagccgtgtctaaggcagaccttgaagttgctgtccagacctgagatgtggagagccgtgggcccagtgcccgttgcctgcctgttgttcctgggagcctactaccaggcctggagccagcaaccaagctcatgcccggaggattggctccaggacatgcagcgcctgtcagaggagctgctgctgccactgctgagtcagcccacactgggcagcctgtgggattcccttaggcactgctcccttctctgcaacccgctgtcctgtgtgccagcccttgaagctccccccagcctcgtgtcactgggctgctcgggaggctgcccccgtctcagtctggctggctcagcctcacccttcccattcctcactgccctcctctctcttcttaataccctggcccagatccacaaggggctgtgtggccagctggctgccatattggctgccccgggactccagaattacttcctccagtgtgtggctcctggggctgccccacacctcacacctttctctgcatgggccctgcgccatgagtaccacctgcagtacctggcactcgctctggcccagaaagcggcagcgctgcagccactgccagccacccatgctgccctctatcatggtatggccttggccctgctgagccggctgctgcccggaagtgagtacctcacccatgagctgctgctgagctgtgtattccggctggagttcctcccggaaagaacatcagggggtccagaggcagccgacttctctgaccagctgtcgttaggaagcagcagggtccctcggtgtgggcaagggactctgctggctcaggcctgccaggacctccccagcatccgcaactgctacctgactcattgctcgccagcccgagccagtctgctggcctcccaggctctgcaccgaggggagctacagcgagtcccaaccctgctactgcccatgcctacggagccgctgctgcccaccgactggcccttcctgccactgattcgcctctaccaccgggcttcagacaccccctcgggactctctcccacagacaccatgggcacagccatgcgggtcctgcagtgggtgctagttttggagagctggcgcccccaggctctctgggctgtgccccctgctgcccgcctggcacggctcatgtgtgtgttcctggtggacagtgagctgttccgggagtccccagtacagcatctggtggcagccctcctcgcccagctctgtcagcctcaagtcttgccaaacctcaacctggactgccgactccctggcctgacgtctttccctgacctctatgccaacttcctggatcattttgaggctgtctcttttggggaccacctctttggggccctggtcctcctgcccctgcagcgtcggttcagtgtcaccttgcgccttgccctctttggggaacacgtgggagccttgcgagctctgagcctgcctctgacccagttgcctgtgtccctggagtgttacacagtgcctcctgaagacaacctggccctccttcagctctacttccggaccctggttactggtgcgctccgcccacgttggtgccccgtgctctatgctgtggctgtggctcatgtcaatagcttcatcttctctcaggacccacagagctcagatgaggtcaaagctgcccgcaggagtatgctgcagaaaacatggctgctggcagatgagggtctccggcagcacctcctgcactataagcttcccaattccacgctcccagagggctttgagctctattctcagttgccccctctgcgtcagcactacctccagagactgacttcaacagtgctccaaaatggggtatcagagacctaggatagttgatatagatggaaagatgggtacgttgtcctgtatccagcctttcaacagatgtctggccagacgaagaacattgtgtcctaatggtaggcaggagaccaaggagcagaaggcttgccttcctgggagcaggttgtttgagctgttttagagcagtgagccctaccattacatcctgatatctggggcttctgaaggtctgtgctgggagtgaagagtggcttagctatttacccgctctttggggacagggcaaactaaatgcatcccttcttacctaactcccaacccctgccctgggctgaggcatatgaatgctatagttgtgcattaaaataaatgttttttatctcctggaaaaaaaaaaaaaaaaaaaaaaaaaaaaa

SEQ ID NO: 4069 - DNA, 4812 bp, Homo Sapiens
  NM_015541
gcgctccagacaagatggcgcggccggtccggggagggctcggggccccgcgccgctcgccttgccttctccttctctggctgcttttgcttcggctggagccggtgaccgccgcggccggcccgcgggcgccctgcgcggccgcctgcacttgcgctggggactcgctggactgcggtgggcgcgggctggctgcgttgcccggggacctgccctcctggacgcggagcctaaacctgagttacaacaaactctctgagattgaccctgctggttttgaggacttgccgaacctacaggaagtgtacctcaataataatgagttgacagcggtaccatccctgggcgctgcttcatcacatgtcgtctctctctttctgcagcacaacaagattcgcagcgtggaggggagccagctgaaggcctacctttccttagaagtgttagatctgagtttgaacaacatcacggaagtgcggaacacctgctttccacacggaccgcctataaaggagctcaacctggcaggcaatcggattggcaccctggagttgggagcatttgatggtctgtcacggtcgctgctaactcttcgcctgagcaaaaacaggatcacccagcttcctgtaagagcattcaagctacccaggctgacacaactggacctcaatcggaacaggattcggctgatagagggcctcaccttccaggggctcaacagcttggaggtgctgaagcttcagcgaaacaacatcagcaaactgacagatggggccttctggggactgtccaagatgcatgtgctgcacctggagtacaacagcctggtagaagtgaacagcggctcgctctacggcctcacggccctgcatcagctccacctcagcaacaattccatcgctcgcattcaccgcaagggctggagcttctgccagaagctgcatgagttggtcctgtccttcaacaacctgacacggctggacgaggagagcctggccgagctgagcagcctgagtgtcctgcgtctcagccacaattccatcagccacattgcggagggtgccttcaagggactcaggagcctgcgagtcttggatctggaccataacgagatttcgggcacaatagaggacacgagcggcgccttctcagggctcgacagcctcagcaagctgactctgtttggaaacaagatcaagtctgtggctaagagagcattctcggggctggaaggcctggagcacctgaaccttggagggaatgcgatcagatctgtccagtttgatgcctttgtgaagatgaagaatcttaaagagctccatatcagcagcgacagcttcctgtgtgactgccagctgaagtggctgcccccgtggctaattggcaggatgctgcaggcctttgtgacagccacctgtgcccacccagaatcactgaagggtcagagcattttctctgtgccaccagagagtttcgtgtgcgatgacttcctgaagccacagatcatcacccagccagaaaccaccatggctatggtgggcaaggacatccggtttacatgctcagcagccagcagcagcagctcccccatgacctttgcctggaagaaagacaatgaagtcctgaccaatgcagacatggagaactttgtccacgtccacgcgcaggacggggaagtgatggagtacaccaccatcctgcacctccgtcaggtcactttcgggcacgagggccgctaccaatgtgtcatcaccaaccactttggctccacctattcacataaggccaggctcaccgtgaatgtgttgccatcattcaccaaaacgccccacgacataaccatccggaccaccaccatggcccgcctcgaatgtgctgccacaggtcacccaaaccctcagattgcctggcagaaggatggaggcacggatttccccgctgcccgtgagcgacgcatgcatgtcatgccggatgacgacgtgtttttcatcactgatgtgaaaatagatgacgcaggggtttacagctgtactgctcagaactcagccggttctatttcagctaatgccaccctgactgtcctagagaccccatccttggtggtccccttggaagaccgtgtggtatctgtgggagaaacagtggccctccaatgcaaagccacggggaaccctccgccccgcatcacctggttcaagggggaccgcccgctgagcctcactgagcggcaccacttgacccctgacaaccagctcctggtggttcagaacgtggtggcagaggatgcgggccgatatacctgtgagatgtccaacaccctgggcacggagcgagctcacagccagctgagcgtcctgcccgcagcaggctgcaggaaggatgggaccacggtaggcatcttcaccattgctgtcgtgagcagcatcgtcctgacgtcactggtctgggtgtgcatcatctaccagaccaggaagaagagtgaagagtacagtgtcaccaacacagatgaaaccgtcgtgccaccagatgttccaagctacctctcttctcaggggaccctttctgaccgacaagaaaccgtggtcaggaccgagggtggccctcaggccaatgggcacattgagagcaatggtgtgtgtccaagagatgcaagccactttccagagcccgacactcacagcgttgcctgcaggcagccaaagctctgtgctgggtctgcgtatcacaaagagccgtggaaagcgatggagaaagctgaagggacacctgggccacataagatggaacacggtggccgggtcgtatgcagtgactgcaacaccgaagtggactgttactccaggggacaagccttccacccccagcctgtgtccagagacagcgcacagccaagtgcgccaaatggcccggagccgggtgggagtgaccaagagcattctccacatcaccagtgcagcaggactgccgctgggtcctgccccgagtgccaagggtcgctctaccccagtaaccacgatagaatgctgacggctgtgaagaaaaagccaatggcatctctagatgggaaaggggattcttcctggactttagcaaggttgtatcacccggactccacagagctacagcctgcatcttcattaacttcaggcagtccagagcgcgcggaagcccagtacttgcttgtttccaatggccacctccccaaagcatgtgacgccagtcccgagtccacgccactgacaggacagctccccgggaaacagagggtgccactgctgttggcaccaaaaagctaggttttgtctacctcagttcttgtcataccaatctctacgggaaagagaggtaggagaggctgcgaggaagcttgggttcaagcgtcactcatctgtacatagttgtaactcccatgtggagtatcagtcgctcacaggacttggatctgaagcacagtaaacgcaagaggggatttgtgtacaaaaggcaaaaaaagtatttgatatcattgtacataagagttttcagagatttcatatatatcttttacagaggctattttaatctttagtgcatggttaacagaaaaaaattatacaattttgacaatattatttttcgtatcaggttgctgtttaattttggagggggtggggaaatagttctggtgccttaacgcatggctggaatttatagaggctacaaccacatttgttcacaggagtttttggtgcggggtgggaaggatggaaggccttggatttatattgcacttcatagacccctaggctgctgtgcggtgggactccacatgcgccggaaggagcttcaggtgagcactgctcatgtgtggatgcccctgcaacaggcttccctgtctgtagagccaggggtgcaagtgccatccacacttgcagtgaatggcttttccttttaggtttaagtcctgtctgtctgtaaggcgtagaatctgtccgtctgtaaggcgtagaatgagggttgttaatccatcacaagcaaaaggtcagaacagttaaacactgcctttcctcctcctcttattttatgataaaagcaaatgtggccttctcagtatcattcgattgctatttgagacttttaaattaaggtaaaggctgctggtgttggtacctgtggatttttctatactgatgttttcgttttgccaatataatgagtattacattggccttgggggacagaaaggaggaagttctgacttttcagggctaccttatttctactaaggacccagagcaggcctgtccatgccattccttcgcacagatgaaactgagctgggactggaaaggacagcccttgacctgggttctgggtataatttgcacttttgagactggtagctaaccatcttatgagtgccaatgtgtcatttagtaaaacttaaatagaaacaaggtccttcaaatgttcctttggccaaaagctgaagggagttactgagaaaatagttaacaattactgtcaggtgtcatcactgttcaaaaggtaagcacatttagaattttgttcttgacagttaactgactaatcttacttccacaaaatatgtgaatttgctgcttctgagaggcaatgtgaaagagggagtattacttttatgtacaaagttatttatttatagaaattttggtacagtgtacattgaaaaccatgtaaaatattgaagtgtctaacaaatggcattgaagtgtctttaataaaggttcatttataaatgtcaaaaaaaaaaaaaaaaaaaaaaaaaaaaaaaaaaaaaaaaaaaaaaaaaaa

SEQ ID NO: 4070 - DNA, 5505 bp, Homo Sapiens
  NM_015545
ctcgccagaaacctgaaaccagccgcgtgagtcggcgacgcggattgcgcctgcgcgcttggggagagggggacccgaggaagagactggttcgccgcggggaccgggcagggctccccgtcggagtgcactgcgccggacacttcaagccctggagggacaggaaagccagaaatggacttcgtgagactcgctcgactgttcgccagggcccgccccatgggactgttcatcctgcaacacctggacccctgtagagccaggtgggcaggaggcagggaggggctgatgcggccaatgtgggcgcccttcagcagctcctcctctcagctgcccctcggccaggagcgtcaggaaaacacgggcagcctgggctctgacccgagccactccaactccacggccacgcaggaagaagacgaggaggaggaggagagttttgggaccctctctgacaaatactcctcccggagactattccgcaaatccgcagcccagttccataacctgcggtttggggaacggagagatgagcaaatggaaccggagcccaaattatggcgaggccggagaaacaccccgtactggtacttcttgcagtgcaaacacctgatcaaggaagggaagctggttgaagccctggacctgtttgagaggcagatgctgaaggaggagcgattgcagcccatggagagcaactacacggtgctgattgggggctgcgggcgggttggctacctgaagaaggccttcaacctctacaaccagatgaaaaagcgggacctggagccctcggacgccacctacacggccctgttcaacgtctgtgccgagtccccctggaaggactcagctctacagagcgccctgaagctccggcagcagctgcaggccaaaaacttcgagctcaacttgaaaacataccacgcgctgctgaagatggctgccaagtgcgcagaccttaggatgtgcctcgatgtgttcaaggaaatcatccacaaagggcacgtggtcacagaggagaccttcagtttcctgctcatgggctgcatccaagacaagaagacaggcttccggtacgccctccaggtgtggcggctgatgctgagtctagggctacagccgagccgggacagctacaacctgctgttggtggcagctcgggactgtggcctaggggacccccaggtggcctcagagctgcttctgaagcccagggaggaggcgactgtgcttcagcccccagtgagcaggcagcggccaaggaggacagcccaggccaaggcaggcaacctcatgtcagccatgctgcatgtggaggccctggagaggcagctgtttctggaaccttctcaggcacttgggcctccagagcctccggaagccagagtgcccggcaaggcccaaccagaggtggatactaaggcagagcccagccacacagcagccctcaccgcagtggccctgaagccacctcccgtggagctggaagtcaacctcctgacccccggggccgttccccctacagtggtctcctttggaacggtgaccaccccagctgaccggctggccttgatagggggcctggagggcttcctgagcaagatggcagagcacaggcagcagcccgacatcaggaccctcacgctactggccgaggtggtggagtccgggagtcctgcagagtccttgctgctggccctcctggatgagcaccaggtagaggccgacctgacattctttaacacgctggtgagaaagaagagcaagctgggagacctggagggggccaaggcgctgttgccggtcctggcaaagaggggcctcgtccccaacctgcagacattctgcaacctggccatcgggtgccacaggccgaaggacggtctacagcttctcacagacatgaagaagtcccaggtgacccccaacactcacatctacagtgccctcatcaacgcggccatcaggaagctgaactacacctatctcatcagcatcttgaaggacatgaagcagaacagggtcccggtgaacgaagtggtcatccgccagctggagtttgcagcccagtaccctcccacctttgaccggtaccaagggaagaacacctacctggagaagattgacggcttccgagcctattacaagcagtggctgacagtgatgcccgcagaggaaaccccgcacccctggcagaagttccggaccaagccccagggggaccaggacaccggcaaggaggctgatgacggatgtgcccttgggggcaggtgatgggagcacagctggaacaatgtgctcggcccccagtgctctgtgggagccccaggacaagtgagctggtgtcacctcctgcctgggggaagagccaggccctgaggaacagccgcagcgtgtcacaggtgttggtgaggacacacactaggcccaaggtgcctgtgctcccagcaggtccaagtgcagctccagccacctttgcgtgtcaccttcacgggacttccagctccagctacctttgtgtgtcacctcacacaccacaagggggctggggcatctggtccctggggcctgggccgccccgccgggttccataggccgatgctctgaaagaagagacgtggggctcgagagatttaaagattttatttttacaaatcacagctgatagacagcgaagccttccccatagagaccgtgctccaactcgggcctggggcactgctcgctgctcccaggaagggggtggcgtgacaggcaggaacctgcgaagtccagagtccagggtggagcgcgccagcctcagccagagcagccacgacagccacagtgtgtgcactcgatgatgcggccctgcaacggaggaggacagtgagacgatgccactgcgccacgctcgcccctgcacactcacatatgtggcaaccctcccacgaaggacctgccaccatgccatatagggacacacctcagaaacccttccttgacagctctggacagggaaaatttggctccctcatgaaggtagaaccagctgctgttgacaccgaggttacatctgtatgtctatttataatatgttctgcaaatccaacacacgtttgccaatcaagaaaaagaaatcggtgtgaatgagtctcgttattctgctaagtgagcatgacagaccctgcgatgagcagacgtggctctgctactgtttggggacttcaggggggcctctgggctggtacactctggtgggggaagagggcaggagactatgcacttgagtcacacccttctggcccagagccccccagaaagaagggtcttgtcccccaggcctggtgcggcccaacacttggccagccagaaagccctagaacagtggcttgtgtttattttactttttcaagttctttttttggaagaacaagaccatagtttaagtaaacaggatcctctggtgaaacccaggtaagtctacagcgggctgttttggccacagggctgaagcagcaccccagcccaccagcccctgacctggactccttgtggaatctgggcactcagaggaagggggcttctgccactctgccacctgtccctgcctccatcagaaaaccaacaccccagtcttccgtcggggaggcggcccttgctcgcccccactgctcagtacccaagtcctcagcatccagccacagctctccattgtcagtctcactgcagcataaaggggactcatgtgaagaggcccctgtgtggagctggggaaaagaaggccaggctggcagatgggcggtggggccaacaactgtgctgaggggctgcactgagcggccactgctgtgactctgcctcgggccacagctgcctttcagaggggcttggaaccggatggagctcagctcctgtccctcagcaccactcctgaggcgcctggcctaggagtggtacttggaacagaaagttctgaaagaagaaacacagtgggctgggcgcagtagctcatgcctgtaatcccggcactttgggaggctgaggcgggtggatcacctgaggtcgggagttcgagaccagcctgagcaacattgagaaaccccgtctctactaaaaatacaaaattagccaggcgtggtggtgcatgcctgtagtcccagctactcaggaggatgaggcaggagaaccgcttgaacccgggaggtggaggttgcagtgagccaagatggcatcactgcactccagcctgggcgacaaagcaagactccgtcttgggggggcgggaaagatagtgatggtaatgttaaagtatcactgtgaggactgaaagggacaggaactcactggttgtccttccctgatgtcaccctgccaccaccttgggattagggctccccaccaccatttcctaagtgaggaaaggggttcagtaatttgcccaaaagtggagttgagattgaccccagacctaacaaacacacagccacacgctgcctcacatggattcctgaatacagggacccactcccacgagggagagccagcaggacatccagggacaaaacgacattccagcccaaccaaataacataagatcccttgcagtcgactaaggcagaattttgagctgaaaacaacaccaagcttgagtgtcagacattaccacttccagcttgcttttgggcacgcggcagatgcagttcgtcccgaagttggtgtcccgtgtctgaatgcaccgcaggcagcacaagttctcatatccttgctttttccattttgcaatcaggtttttgtctgcatagccttctttaatacaatattcatagagttctgtcaaaaagatggggaaagagcatcaggccatggtctaaaaaccttccccacccttgatcaaaaaaagcattcaggccgggtgcagtggctcacacctgtaatcccagcactttgggaggccgaggcaggcggatcacctgaggtcaggagttcaggaccagcccggccaacatggtaaaaccccgtctctactaaaaatacaaaaattactcgggcgtggtagcagctgtaatcccagctacttaggaggctgaggcaggagaatcacttgaacccaggaggcggaggttgtagtgacctgaggtcgtgccactggactccagcctgggtgacagcgaaactccatctcaaaaaaaaaaaggcattcagtattgcaacgggacagtccttggaggaggaacaaaaaaaaaaagtacttaggccaggcaaggtgcctcacacctgtaatcccagcacttttggaagccaacgccagaggatcatttgagttaagaaaccagcctgggccaagggcccatctccacaaaaaatttaaaaattagctgggtgtggtggtgcacacctgtagtcacagctactcaggaggttgaggtgagaggatcccttgagcccagaaggttgaggctgcagtgagccatcattgcaccactgcactccagcctgtggaacagagcaagaccctgtttc

SEQ ID NO: 4071 - DNA, 4418 bp, Homo Sapiens
  NM_015549
gctcgacttcctgccgggcgctggcaagccgcgcgctgcctggggtctccgggggccgcgcttgcagctggccgagtccgggccagctgaggggctggcggtgggcgggagcggtcggcggcctcagccccttcagagagcgactttcaaactcgcgcccgcgtcgcggcagcacctgggcagccccgcacgccgtgcgcgtcccgagcccgcggggcagctaccgctcgaatctccctggggtgccctccccaggcagcaatgccaggatgcctgtgtccacctccctccaccaggatggcagccaggagcggccggtgagcctgacctctaccacctcctcgtcgggctcctcctgtgacagtcgcagtgccatggaggagcccagcagctccgaggctcccgccaagaatggggcaggctccctgagaagccggcatctgcccaacagcaacaacaactccagcagctggttgaacgtgaaggggcccctctccccgttcaacagccgggcagcggcagggcctgcacaccacaagctcagctacctgggccgagtggtgcgggagatcgtggagacagagcgcatgtacgtacaggacctgcgcagcatcgtggagagccaagagtttgatatctacactcagtattgcaacaattaccccaactccgtggccgccctgacggaatgcatgcgggacaagcagcaggccaagttctttcgggaccggcaggagctgctacagcactcgctgcccttgggctcctacctgctgaagccagtccagcgcatcctcaagtaccacctgctgctccaggaaattgccaagcattttgatgaagaagaggatggctttgaggtggtggaggatgccattgacaccatgacctgtgtggcctggtacatcaacgacatgaagaggaggcatgagcacgcggtccggctccaggagattcagtcactcctcatcaactggaaggggcccgacctgaccacctacggggagcttgtcctggagggcacattccgcgtgcatcgcgtgcgcaatgaaaggacctttttcctctttgacaaaacactgcttatcaccaagaagcggggcgatcactttgtctacaagggcaacatcccgtgctcctccctgatgctgatcgaaagcaccagagactccctgtgcttcactgtcacccactacaagcacagcaagcagcagtacagcatccaggccaagacagtggaggagaaacggaactggactcaccacatcaagaggctcatcctagagaaccaccatgccaccattccccagaaggccaaggaagccatcttggaaatggattcctattatcccaatcggtaccgctgcagcccagagcggctgaagaaggcttggtcctcccaggatgaggtgtccaccaatgtgcgccaggggcgccggcaatctgagccaaccaaacacctgctcaggcaactcaacgagaaagcccgagcagcaggaatgaagggaaaggggcgcagggagtctgaaagctccaggagcagcagaaggcccagtggccggtctccaaccagtactgagaagcgcatgagcttcgagtccatttcttccctgccagaggttgagccggaccctgaggctgggagtgagcaagaggtattttctgctgtggaagggcccagtgccgaggagacgccttcagacacagaatctccagaagtcctggagacacagcttgatgcccaccagggccttctggggatggaccccccaggtgacatggtggacttcgtggcagctgagagcactgaggaccttaaggccctgagcagcgaggaggaagaagaaatgggaggtgccgcccaggagcctgagagccttctgccaccctctgtgctggaccaggccagcgtcattgcggagcgatttgtcagcagcttctctcggcggagcagcgtggcacaggaggacagcaagtccagtggctttgggagcccgcggctggtcagccggagcagcagcgtgctcagcctggagggcagcgagaagggcctggcccggcatggcagtgccacagactccctcagctgtcagctctccccagaagtggacatcagtgtgggggtggccacagaggacagcccttctgtcaatgggatggagcccccaagcccaggctgcccagtggagcctgaccggtcttcctgcaagaagaaggaatcagcactctccacccgagaccggctgttgctagacaagattaagagctattatgaaaatgcagaacaccatgatgcaggcttcagcgtccgtcgccgggagagcctctcctacatccccaaaggactggtaagaaactccatctccaggttcaacagccttccccggccagacccagagccagtacctccagtggggagcaagagacaggtgggctcccggccgacttcgtgggccctgtttgagctcccaggaccaagccaggcagtcaaaggggacccacctcccatctcagatgctgagttccgcccatcttcagaaattgtgaagatctgggagggaatggagtcttccggagggagccctgggaaggggccaggccagggccaggccaatggctttgacctgcatgagccactcttcatcctggaggagcatgagctgggagccatcacagaggagtcggccactgcctccccggaaagctcctctcccactgaggggcgcagcccggcccacctggcccgggagctgaaagagctggtgaaggagctgagcagcagtacccagggggagctggtggccccactgcacccccgcatcgtgcagctctcccacgtaatggacagccacgtgagcgagcgcgtcaagaacaaggtctaccagctggcccgccagtacagcctccggatcaagagcaacaagccagtgatggccaggccaccactgcagtgggaaaaggtggcccctgagagggatgggaagagccccactgtgccctgtctacaggaagaggctggagagccattaggtggcaaaggtaagaggaagccggtgctgtctctatttgactatgagcagctgatggcccaggagcacagccctcccaagccctcctcggctggggagatgtcaccacagcgtttcttcttcaacccgtctgctgtcagccagaggaccacctcgcctgggggccggccctccgcccggagccccctcagccccacagagaccttcagctggcccgacgtccgtgagctctgctccaagtatgcctcccgcgatgaggcacgccgagcagggggcggccggccccgcggcccacccgtcaacaggagccactcggtgccggagaacatggtagagccacctctgtcgggcagggtgggccgctgccgcagcctgagcaccaagaggggccggggaggcggagaggctgcccaatcccctgggcctctgccccagagcaagccggatggaggcgagaccctgtatgtcactgcagacctcaccctggaggacaaccggcgggtgattgtcatggagaagggaccccttcccagccccactgcagggctggaggagagcagtggccagggaccaagctcaccggtggccctgctggggcaggttcaggacttccagcagtctgcagagtgccagccgaaggaagagggttccagggacccggcagacccgagccagcagggcagagtgagaaaccttagagagaagttccaggccttgaactctgtcggttgatgctgactcctgggggagggaggagtcatgttggaggttggggaagaacctgggcatccttcccctcaagcctgggctcatggagcccctgcccagggccctcaggtgggcggaaagtccatcccctccgcccttcaggaaggatgctcccgtgtgcaggggtctcctgcctgtgccatccactggggctcgagacaatttcccactcacctgtgaggccggtgtggctgcttcccttgtaaatagttgttctctggtaagaagccaaatatttaagctcacttcttcccagagagaggaagctctgctcaggcctccagcgttggctggccatggccacagccagatggaggagcccatccccaggagactcaggcagtggcctggagaggctttgttctgtaacggtgccttttcttagggtccaggcaggaatgaagccaataatttattgctttccattctgtggtatgatgtgcgtgtgcgtgagtgtgtggcccctgtttattcccctcctgtcaagaatgaagtggattcagttcaggtacttttgagggttgttgtgctgaccctgtggttgtcgctgatgtacacacatttcattatttgccaatggtgcaataaccactgctgaccaacaaaaaaaaaaaaaaaaaa

SEQ ID NO: 4072 - DNA, 6815 bp, Homo Sapiens
  NM_015553
tttaagtagaatcctcaagcttggcctcagagtactatgaggcttctgaatccaggaataagactgctcttggatttactctctttgtattgcatgtcaaaggcaacagaactggaccaagaaaattcataactttttgcttttgtttctactaagatgacatcatacatggctattgatggcagtgctcttgttcccttgcgtcagaagcccaggaggaaaactcaaggttttctcacgatgagtcggaggaggatatcgtgtaaagatctgggccatgctgactgccaagggtggctgtataagaaaaaggaaaagggaagtttcctaagcaacaaatggaaaaagttctgggtgatactgaaggggtcgtcactgtactggtatagcaatcaaatggcagagaaagctgatggatttgtcaacctgcctgatttcactgtggaaagagcatctgaatgcaagaaaaagcatgcttttaagatcagccatccacagatcaagaccttttattttgcagctgagaatgtgcaggaaatgaacgtgtggttaaataaacttggatcggctgtaatccatcaggaatccactacaaaggatgaagaatgttacagtgaaagtgaacaggaagatccagaaatagctgcggagacaccaccccctcctcacgcttcccagactcagtctttgactgcacagcaggcatcttcatcctcacccagcctgagtggaacgtcgtattctttctcttccctggaaaatacagtgaagacacccagcagttttccttcctccttatctaaagagagacaatccttgcctgacacagttaacagtttgtctgctgctgaagatgagggacaaccaataacgtttgctgtgcaagttcattcacctgtaccctcagaggcaggcatccacaaggccctggaaaacagttttgtcacatcagaaagtggatttttgaactctttatctagtgatgatacttcttcattgagtagcaatcatgaccatcttactgtcccagataagcctgctggatcaaagatcatggacaaagaagagacaaaagtgtctgaagatgatgaaatggagaagctgtacaaatcattagagcaagctagtctatctcctcttggggaccgacgaccttcgactaaaaaggagttgagaaaatcctttgttaagcggtgtaaaaatccatctataaacgagaaactccacaaaatccgaacattgaatagcacattaaagtgtaaagaacatgatctggccatgattaaccagttgctggatgacccgaagctgacagccaggaaatacagagagtggaaagtcatgaacaccctgctgatccaggacatctatcagcagcagcgggcttcgcctgcccctgatgacactgatgacaccccccaggaactcaagaaatcaccttcttctccctctgttgaaaattccatttgagacaaagtcagggttttctcctcttatattttatcacaagcaactcttcaagatgttgcaaaagcttacatttttccttaaaaggaaaactgaaacccagtccttcaagcatcagcttcccatctaaagatgcacgttagatgaagataatcaccgaatacaccagggctcctcatttcagtcgtaacgcatccattgagattggaatgattgagttcagttgaaaggcgttttttgtgttcctactgggagctcacggtgatgtggggctctaggggggatgtgagaaatgtctcttctgttcattgctctccagagaatgctatggacaagaatcaaattttaccaggagtaattgcccatggaaacattctgtttttcaaaagaagaatgtacatattccacttgactgggaagctgtgtggcccaaatcactgtttgagtggaggaatgttttctagagcagtgactggaaggacaaacgtggtgttgcagaacaaaaattccttgcctttggtatggaatggtggtgccttttccatgtgatgagaaatgcttcatagacagtggcatgtgggagagctgaaggaggaggcgtgttccatattccactcattcaaaggacagcttggtgttttcacactttatgcaggttaggggatctgattaatgtttcctttccttacaacagctagagaaaacatctcatcacaattggagacctctacttcctttgagctttcctactcaatggtaggagataggaatatgttccgcaaagaatgtctactgctcttgtccttggctgtgatccctatacatagtgtgaatttatatccaggtttcccaggatcaatattgacaagacgactttggcatctgaattgttttaatatctttactcaaaaaaacaaaaaaacaaaaacccatggaagcaacaaaagagttaaacatgagggatttatttttgtatgtttatatgtcacttgtgtgctatgtgaatagctatgtttgttatttaaatatatttatagaagttcaaattactagtgtttaaaagatgatatactattatatattgtgcttagtatatatttgatgagtctatactttttgcttgagaaaaatagaaatactattgattcactggtgttatgatgttgcactgtgtctgaggaatgctcaggaaatcttgtgggaaaaaaatggggcatgcattcataatttttcattttcttccccaccccaacccccatgagctcttaaatttagatttctatctcttgtaagtcactcttttaaccagcaaaggactttcatcttagattatcctttctattaaataaactttaagctttgtgccatttatgcctgcaaaccttagaccaaaggcaacacaactaatgtcatcttttcattaaagactaatagaaatttagaaatcattgtgttaaagagagctatagagaaacaatatgaaagtcttcccttactaatcaccatgaatatttctcaccataggaataaccacaacccaccaagtacccatgttggccctgcctacccgtaacaaattgttcacacaacctattttgttttatagcttcaaagtgtggcttgacattcaaatggaaggaaccacctgaattatatctgcaaacaaaatggaaatagttgttgaatagttccccaagctttactaagaagccttaatactctgtaaacaaacaaacaaacaaaaaacaaccttagcattaagaaataaaaacaaaaaacaagaagcaagttgtactgctagaaacttctctaagataagaggccaggccagtcagtttggcccagcaaacatgtgggtacttctccacctagggaagccactgaagatgagtttgacctgtggtgacctgacagagagaacattcagatcctcagattgcaccctgatgccctggtttaggaaagcagtgctttaaccttttgcccctggaaattactgattctttctgtgattagcagataccagaagggaaattatttaggattggcaatgtaaagagtattgaaggaacaacaaataacaatagcagaaataacagtgtgacataaagtgcccttccacctatttttctttggtttgcaacaccagcctgtagacttccagtttttcttaaattgaagagctccagacacttttgagcagggtttgtgaatagctttgaatgctttcctttggcttttcgtgaagacatatttccccagcctttcaactgtaaactcctttagtaccattgaaacttaaggcaaaaaagatccctgggattacttagccaaggcttaaatttatttttcaaagtcaagaacattagcctagaagtttttgctttgctagttaaagcttactttgcagagcttcccaaagtgaaagggaaactgaacttcacaattttgcacctggctttctggagccccattgcctgctcattcgtgtttttccccctgtaaattattttgcttttgaccaggttgtgctagaaagtagggctgcttctgtgagttctcagcctaggctgtggccactaagacgtgggtggggggatagacaggagtgagagggagagtgggtgacactttccgtgacacttaatgtaggaagacatgggcttctctctcttggcctcaagccacttttctggtccaaagaatattgggaaaactggattactttcagtatatttcttgagaccgggtcatctctgaaatgcatttggggtagtttcctggggtccaagggccaattcctatacccagtcctgcagtgtctgtgagctgtggaatgagagagaaaaccatggctgctcaggaaggaagtggagaatctctcagcacacgtagatccaaatctgtggcacctgctaaagattaggatttggagaggactcctctttggggttgtgaagaggaccttttccctctgttgttagcctgtagatccagaacggagcctgatgtgatgccttcactggttgatatattgcaaatagacactctgagccctgcattgcaagggcgtcttttgctttaaagaattcttagttttgccacaacagctcaaatctcagaataggatcaaaggcctagaaagactcctaaagtataggattacaaagactccaggaagcgtaagaaagagattgtgtttggagtcagatttcaatgtgaaacccatgccttacatttacacagcactttgtagtttgcaaattggtgtgttttcagccccctcccgctgccccatgctctgagatgattgtggattattacagtgaagtgcctggcccggagcccccagtgatgaagcaggaacttgagtctcaggactcccagcggctctctgcccatttcctcctctccgccccccacctcgcttcacctgttaccttgtgaagttgctgttggcacatagcccactaggaaaccaagaagtttgactgggagcgtgtgtttcattgcactgggcttagcatacggctggccctggtggctgtttggctaaattctccatttgaaacctaaagggccctctctgtgcttgagcacagtctcctcctagtggtcctgcctcaacctgctggcgggctgtctatggattggggtttcacctaatcatgctgtgtttcctttcttttctttctgtacattagactacttgggaggtgctgtgtgatccttggatgaaaaacatatatttaaagaaatggagagtgtttattttgtttgctttttgaggcatgtgctgtcaaatgttagagaccaaacttagtgattagaggttggtcctttgaccttcttctcttaattgcttttcatgtaatcatgataatttactcaggtagcactccagtcacaaacaatgtcacagagatgaaacagattcaaagaaaaaatatttttaagtcttttgaaaagaagtgctattcaaatttaagacatgtttaaattcataggtacattatctcttagtaagaaatacttttttttttctttttttagacagagtcttgctctgttgcccaggctggagtgcagtggcacgattttagctcactgcaacctctgcctccctggttgaagtgattctcctgcctcagcctcccgagtagctgggactacgcccggctaatttttatatttttagtagagaccggggtttaccatgttgcccaggctggtttcaaactcctgacctcaggtgatctgcctgcctctgcctcccagagtgctgggattacaggtgtgagccaccacacctggccgaaagacagtattttgatatagccacatacatgatttaatgagtaatgttaagtacagaaaagctgccatatccacatagttttagggggcatttcttcttcagtctaacaagaatatgatatccaattgtggttttccaatttatttctcttccaatttcttttgtatacctcacaggagaaattgaatcctagaactgggagatgactgccctgcccagggttttgtaatacataattgaaaataaaagtccctgaaactaaatgtttgcagcctgtatgaaatggactgtggaagggggataatttctctcctcacagaaagccactcgtctccttgaatgaggcattgagcagacacacgtttctctgtgtcgtggggcaggaagcaattcccttgcctcttcagcacatctcagttctttcccacatgaccccagaaccacatagaaaacattgaaaataatggattcttcattgtatttgaattttttttttttaacctttagcccaaaagggaagtgtgcctcgtggaaagagcaaatgccgtaaaatagaaaccaggagttttaatcgccatatattttaatgtgcttgcatgatgggaatgtgacttttagcactgcatggtgtttgggggcaagatattaatgtggaaatcttagcttaagttttactgtgctctcatcctgtgtcagctacccctctaaactgaaaaagaggcatggctcatttctctcctgctttatgtttttgaggttgacttgtaagataaaaataaaaataagaaaaaaatatatctaggcaaatgacatgaaaaaaaagttgaaatatactactggtgttcatttttgtcctgcagtgttgctttctcaaagaaataaacatgtggctggaagtgtttaatggctgcgttttgatcgtctacaacaaggttacagtgccctctggtggcagtcatcaaaatcgcttctagacttgtttttatttttaaataaaagatctaattatattggaaatctgtttcaacaa

SEQ ID NO: 4073 - DNA, 9899 bp, Homo Sapiens
  NM_015559
ggttaagtggagctagagagctacattgtaacctagttggatttttttggggggggaatgtatcagaatctaacgtgtcgttaatagaaagaagaacaggcaagaagtggtccagccggcgaagttgcagatctgatctcttctgaacacctcatcgtgtctccatccctgggaatctgaccctagcaactggaccactttgttcttggaattttgggtgtcctcttttctcacctttcccttttcccttttccccttccccctcctgagaactccggaagactgtagagattgtcatggagtccagggaaaccttaagcagctcccggcaaagagggggcgagtcagacttcctgccggtctcctcagccaagcccccagctgctcctggctgtgcaggagaacctttgctctccactccaggacctgggaaggggatcccggtgggcggagagcgcatggagccagaggaggaggatgaactaggctcagggcgggatgtggattccaactccaacgcggacagtgagaaatgggtggcaggagatggtttggaagagcaggaattttctatcaaggaggcaaacttcacagagggaagtctgaagctaaagattcagaccacaaagcgggctaagaaacccccaaagaatttggagaactatatatgtccacctgagatcaagatcaccatcaagcagtctggggaccagaaggtgtcccgtgctggaaaaaatagcaaagccacgaaggaggaagaaagaagccactccaaaaagaagctcctcacagccagtgaccttgcagccagtgacctcaaaggatttcagccacaggcttacgagaggccccagaaacattcaactctccattatgacacgggcctcccacaggacttcaccggtgacaccttaaaaccaaagcaccagcaaaaaagcagcagccagaaccacatggactggtccaccaactctgacagcggacccgtcactcagaattgcttcatcagtccagagtctggcagagaaactgcaagcaccagcaagatccccgctcttgagcccgtggcttcctttgcaaaggcccagggtaagaaaggcagtgcagggaacacgtggagtcagttgtctaacaataacaaagatctgctcttgggaggtgtggctccatccccaagcagccacagctcaccagccccacccagcagctctgctgagtgcaacgggcttcagcccttggtggatcaagatggaggaggtacaaaggagcccccagaaccacctacggtgggcagcaagaaaaagtccagtaaaaaagatgtgataagtcagaccataccaaacccagacctggattgggtcaagaatgcccagaaagcatttgacaatacagaagggaaaagggaaggttattccgcagatagtgcccaagaggcatcaccagccaggcagaacgtgagttctgccagtaatcctgaaaatgactcaagtcatgtccggattactatccccatcaaggcaccctctctggatccaaccaaccataagaggaaaaaaagacagtccattaaagcggtggtggaaaagatcatgccagagaaagccttggcttctggaatcaccatgagcagtgaagtagttaacaggatactttccaactctgaggggaataagaaggatccccgtgtccctaagttgagtaaaatgatagagaatgagtccccctcagttggccttgaaactggtggaaatgctgagaaagttatcccaggaggtgtgtctaagccgcggaagccacccatggtcatgacacctccaacgtgcacagatcactctccatccagaaagctgccagaaatccagcatccaaaatttgctgcaaaacgaaggtggacttgcagcaaaccaaaacctagcaccatgcttcgagaggcagttatggccacctctgataaactgatgctggagcccccgtctgcatatcccatcaccccatccagccctctctacaccaacacagacagtcttactgtgatcactccagtcaaaaagaagcggggacgaccaaagaagcagcctttgctcacagtcgagacgattcatgagggaacttccaccagccccgtcagtcccatcagccgagagtttcctggcactaagaaaagaaagcgacgacgcaatttagcgaagttggcccagctagtgccgggagaggacaaacccatgagcgagatgaaatttcacaagaaagttggaaagctcggcgtgttggataagaagaccatcaaaactatcaataagatgaagacactcaagaggaaaaacatcttgaatcagatcttgtcctgttccagcagcgttgctctgaaggcaaaagctcccccagagaccagccctggggcagcagccattgaaagcaaactgggcaagcagattaatgtcagcaagaggggaaccatctacattggcaagaagcggggcaggaagccaagagcagagctgccacccccatccgaagaacccaaaacagccatcaagcaccccaggcctgtttctagccagccggatgttccagccgtgccttccaactttcagtcacttgtggcgtcttcaccagcagctatgcacccactttcaacacagttaggtgggtccaatggcaacctgagccctgccagcactgaaaccaatttttcagagttgaaaactatgccaaatctccagcccatcagtgctcttccaaccaaaacccaaaagggaatacacagtggaacctggaagctgtctccacccagactgatggccaactccccttcacacctgtgcgagattggctccctaaaggaaatcacgctgtcccctgtgagcgagtcccacagtgaggagacgatccccagcgacagcggcattgggacagacaacaacagcacttctgaccaagcggagaagagctcagaatcccgaaggaggtactcttttgatttctgctccctggacaacccggaggccattccgtccgacaccagcacaaagaaccggcatggccaccggcaaaagcatctcattgtggacaactttctggcccacgaaagcctcaagaagccaaagcacaagaggaaacggaaaagcctgcaaaaccgcgatgacctccagtttctggcagacctggaggagctaatcaccaagttccaagtgttcagaatctcccaccggagttacaccttctaccacgagaatccatatcccagcatttttcggattaattttgatcactattacccggtgccatatatccagtatgacccgttgctctatcttcgtaggacttcagacttgaagtcaaagaagaagcgtggtaggcctgcaaaaaccaatgacaccatgacaaaggtgccttttttacaagggttcagctaccctattcccagtggaagttactatgcaccctatggaatgccttacacatcaatgcctatgatgaaccttggttattacggtcagtacccagctcctttgtacctatcgcacacgcttggagcagcttccccattcatgaggccaacagtgccaccacctcagttccacacaaactcccacgtaaagatgtccggtgcagctaagcataaagccaagcatggagtacacctgcagggacctgttagcatgggccttggtgacatgcagccttctctgaaccctcccaaggtaggcagtgccagtctgtccagtggtcggctccataagaggaaacacaaacacaagcataagcacaaggaagaccggatcctagggacccatgacaacctgagtggtctttttgcaggcaaagccacaggcttctccagccacatcctgagcgagcggctgagtagcgcagacaaagagctcccgctggtgagtgagaagaacaagcataaggagaaacagaagcaccagcacagcgaagccggccacaaagcttctaagaacaactttgaggtggacaccctgtctacactgtcactttccgacgcccagcattggacacaggccaaggaaaaaggagacttgagcagtgagcctgtggactcatgcacgaaaagatactctggcagtggcggggatggtggcagcacgagatcagagaacctggacgtgttcagtgaaatgaacccttcgaatgacaagtgggacagtgacgtgagtgggagtaaaaggaggagctatgaaggctttggaacgtacagggaaaaggacatccaagccttcaagatgaaccgcaaggagagaagttcttatgactcctccatgtctccagggatgccaagtccccacttaaaagtggaccagacagcagtgcatagtaagaacgaaggctcagtgcccaccatgatgaccaggaagaagccagccgcagttgacagtgttacaattccaccagccccagtgttatctctccttgctgcatctgcagcaacgtcggatgcagtcggctcctccctgaagaagaggttcaagcggcgggagatcgaagccatccagtgcgaagtgcggaagatgtgcaactacaccaagatcctgtccaccaagaagaacctggaccacgtgaacaagatcctgaaggccaagcggctgcagagacaatcaaaaacaggcaacaacttcgtgaagaagaggcgcgggcgtcccaggaagcagcccacccagttcgatgaggactccagagaccaaatgccggtgctggaaaaatgcatcgacctgcccagcaaaagaggccagaagcccagcctgagcccgctggtgctggagcccgccgccagccaagacaccatcatggccaccatcgaggcggtcatccacatggcccgggaggcgccgcccctgcccccgccaccgccgccgcccctgccgccaccgccgccaccacccctgcccccgccaccccctctacccaagaccccccgaggcggaaagaggaaacacaaaccgcaggcccccgctcagcccccacagcagtcgcccccgcagcagccccttccccaggaagaggaggtgaaagccaaaaggcagaggaagtcccgagggagtgagagcgaggtccttccctagggcgggtctgggcgtctgcacctggggcctagggaactgacacgtgggaagcgcagtgagccggggcgggggcggaatcccccgctgcagggacacccacgcccttctctccagaagccgggcaggcagaatccggccagacgacggggctgagccatcaggagctcttgggaaagcaaagcagggagacaccttcagaagaagcttgtctgagcttcaccgcagctcccaccacgcggcgcttcagtacggctggatcctccgcaggcgagcggaaggcccccaggaggagcaggctggtggcactctcctgacctcacgctgccaaggtgcgccctcgactcccgatttcatttgctggccaggaaaatcgaaagggaaacaccctcaattaggaaacattccaaggggagaaaagctgcaaattgctcaactggcattgctgtaacccgttccatttaattggtttttatttcttttgattttcaagctctgctaagctttggggtaccaacgtcatcttcaggtgacctgaatctttcccttaaccgtacagtttctcgatggaattgtgtgatcagaaggtggaattctagtgataggcgacctcagacccgcattcatgttctgtgtgcctcttctattgcacatacactgatttttagcattgtctattcctatttttcctttgcccattgtacttccatatatcttttcattaacttacttgctgccttttttttttcttggtacacatttaaataaagtaatccttaacctgtgctgtaaagttcacccttggcatgctgttccaagaacctgggtttgaatcccaatcgttgtgaaacatactcagtattgataaaacctttttaataagtgatgcagagcagccaaggatatgttgacccagatgtcaaccaggctatttttatacttaaaacatgtcagcagagcataggcagaataaaatggtttaaataccccacagcaaatagagtaactgacaaaccaccaaaaactgaaaccccagacccaccagaaagacaagtgtctagcaatgccttggtacctgatctttttcattcaaataattgtcataggttgttcaaaaaaaaaaaaaaaaaggaaacaaaaacacaatagaagtccattatcccttgataattatttcttaaaagcaaatgggagtaagtgttcttatctggaaaaataaataaataaaatgctcaaagggtatcaccacttcaattttatcaagccaccttggacaaagtatccaaattgtggttgccttaataaactaaaacattattgtacataatgtaattataaatctatcagtctgcatggatgcaaactgtgtgtgacaaatcgtcttttaaatggtcaatttcagctgtacatttctcatccaagttgtactctagccattggtttagcgtggacagatactccatctctattatccatttccacagcccaaataaaatatgttaagcaggctcagaatgaatatgaagaattccatttccgtagatgttttctaaaagtcagattgtggaaatttcaaataagtattttcaatttcctccctcactccctcttaccttccccaagacatcaaacacctggcatggtagattatagaaagagacactgagagagagaattaaattttctaatgggaattagaatatctggtttacctccaaattaagtttctttacaggaagttgggaccagctggaaattgtattatcatttcggaacacaatattacttccttagagagagatggatttttgttggcaacataaaagaataagtgatggggtatctatgtgagtaaatttttaaattccaagttaatatgcttgcaaacattactgctgcgttatggcaccaagagttggttgaaattacccacgtagtcatactcctgtgctctgtcaccatggacttcacatcatttgctgcccactagttcaatcgcatttaatcctagcaatatgtaagtttaaaggactgcattcccctctactttaaagcttatatcctagatactcagtttgtgaccttggttgacctttggcatttcacgcaagttgaacagcaaaatcaaagcagccatttttaattcgtcattcccaagccctatctgagtggttccaaagtcacctgagaggaaggtttaaattagtccctctcaccccaccattgctataaaacagcaacgttttcattccaattcagccataaagaggtttctcttcttactgggttttgaaatcatttccttttttctttcgtttgcccttcttccttcctgtgttgtactatctctccaaccacgtctataagcagactcaatcttcttgcagaggaagatgagctggcactctgcaaacttctttaataaggacccaaagtttacttgacattaacctctagtaggtgagaaattccaaaaaagctttggggtacattagaatttccaaagctctgaaagatatttcaggagatttaacagcagagttgcaacttacacgtgaattctggtctatagtggtcatgtgagttaaattcgaatcctctacttgtatgaccctaggaatagattggaatactgcagaggaccaaagctgaggcatgctaaacagctgcttggaggtggaagcaagttcagtcacctactcagcttcctctctccaccacccagttcctccctcagtatcacattatttttttcttctgcttttcattaacctaactcatctcatcagtacaaccattttcttattctctaactacccccaattcctttagcctctccccacctgtccaaactcagctcagccgtgggccaatgcagcttacagacggttgcagagctaggaagaaaacccagctctcccaaccctgatcgtggaggtctctggccccccaacactgccttctgggggctgcattttttttttttttttgagaagaggtcttttgggatgcatggtgctccacatacagcttcacaaaatatttcattataagagaaaccccttgatttttatttctttttcttttgttttctggattacctgccttcagtaagcagatgcagacccacttgtaaggagtctggttagtgatgagaaaaggatgaaatctagatacaaaagtcaccttgaaggtgatgatggatctttaatccacttgactaagtgtctggaagagctacttgctcttccacccctcatctcaaatgagaggagcagaagtttaacttcctcaaatagcccagctctggctaaaacccaaagaagaaaggtcaaaggaagggaaagcatgtcaggggctggtttgtgacttggcaggaccaggaaacagcagccactgacagcccagagaaggtgactaagggctggcagaagattagaatgttaatttggctgctgtccggactaggaggccatgttcaatggcagtcagaatttgtgttctgcgcattgctgggtctataaatatgataagcaagtggtgacagaattatagtataaggtgatgtactacatgcagatcataaaggctttggttttaagacttaagtagaaaatccctctcctagcttattacccaacaatattcagataatgagcttttggagaatatctttttcctatcactagaaagatttacctgggaactgtctaaagtctacacacatatttccaaagcctttaaataccaactgcagcatggagagagaggggtggcagaagctgaaatgcctcaaaagccatttaagtgttacgttgcaggattttcagtccttctcgttatgtaaaagtagataaatatagacgttattctcaacactaccctatagtatcacagtggtccaaatgccagagcttacagataatgtcatcacagtgcctagaaactcgaactgtaatatatcgtagcattttcttggtgtttcttaaagtttctttccacaatacaaggtcctctctgcctcttgtttcttggagagttcaccccactgatgagtcttccttccctgttggactcagtcatttggggaacagtcttagaagcacatatcaaccaaggaagaaacttcctggatatctattgcccacttgcccaggtctaataaacactaaaggggggaaattgaaaggagctgccaactggtcaacgtggaagggcggttccaccctagattggtgtctttctttttcttcctttttttaaaaaaaatctatttcttaaataataataaatgcacatgatgtgttaaatatgtacatatatatttcaaaagaaaaaatggggcacaagattgtcttacaagtcgtgctggctaatttttagtttgtattcataagtggtttttaaaagccttttttaaagtgtaatttgcatgttctactttgattgtatgtaaacatattttagaacaaaaaatgtatttgtattttattgaatatagaggcaagaaaattgtacattgtttgaaatgttctttttgtaacagtttttattcataaagcatttttgtacatttaaaatgaacatggacttgctgttatttgaggcgtagatacatctagcatgcttactgtcatgctcctccatggtcttagatgttgggttttaaacatttttttctaaaagaaagctcagtcttttccgctaccagatcaggttagcacagtatagagcacttaactattaaaaaaaaaaagttaatcctattcatatgttattcattgtgtgaaattaaagacattcaattcagtctaa

SEQ ID NO: 4074 - DNA, 6251 bp, Homo Sapiens
  NM_015568
ctctgtcgccgctggagcagctgcggctcggggacccacagacacagccggggtcgggagccgcccggggcagggctcgggagagcgggccacaccatgaggccccagccccaccagaggccccgcgctgccctggcccccggtgcaccgtgctagcccccagccagggcgttggggagggcggtggccatggccagtcacgtggacctgctgacggagctgcagctgctggagaaggtgcccacgctggagcggctgcgggctgcccagaagcgccgggcccagcagctgaagaaatgggcacagtacgagcaggacttgcagcaccgcaagcgaaagcatgagcggaagcgcagcacgggcggccgccgcaagaaagtgtccttcgaggccagcgtggccctgctggaggcctcgctgaggaacgacgccgaggaagtacgctacttcctgaagaataaggtcagccctgatttgtgcaatgaggacggactcacagccctacaccagtgctgcatcgacaactttgaggaaattgtgaagctgctcctctcccatggtgccaatgtgaacgccaaggacaacgagctgtggacacctctccatgctgcagccacctgcggccacatcaacctggtgaagatcctcgttcagtatggggccgacttgcttgctgtcaactcggatgggaacatgccatatgacctctgcgaggatgaacccaccctggatgtcatcgagacctgcatggcataccagggcatcacccaagagaaaatcaacgagatgcgggtggctcctgagcagcagatgattgcggacatccactgcatgatcgcagcgggccaggacctggactggatagatgcccagggtgccacactgctgcacatagctggagccaatggatacctgcgggcagctgagctcctcctggaccatggagtgcgtgtggatgtgaaggactgggatggctgggagcccctgcatgcagctgccttctggggacagatgcagatggcagagctattggtgtcccatggagctagtctcagtgcaaggacatccatggatgagatgccaatagacctgtgcgaggaggaagagttcaaggtcctgctgctggagctaaaacacaagcatgatgtgatcatgaagtcacagctgaggcacaagtcatccttgagccggaggacctccagcgcaggcagccgtgggaaggtggtgcggcgagccagcctgtcggacaggaccaacctgtataggaaggagtatgagggagaggccatcctgtggcagcggagtgcagctgaggatcagcggacctccacctacaacggggacatcagggagaccaggacagaccaagagaataaggaccctaaccccaggctggagaagcccgtgctactctccgaatttcctaccaagatcccacgaggtgaactggacatgcctgttgagaatggcctccgggctccggtcagtgcctaccagtatgcgctggccaacggggatgtctggaaggtgcatgaggtgcctgactacagcatggcctatggcaaccctggcgtggccgacgccaccccgccctggagcagctacaaggaacagagccctcagacgcttctggagctgaagcggcagcgggctgcagccaagctgctcagccaccccttccttagcacacacctgggcagcagcatggccaggacgggcgagagtagcagtgaaggcaaggcccccttgatcggaggcagaacttcaccgtacagcagcaatgggacctcggtatattacacggtcaccagcggagatcccccactcttaaagttcaaggcccccatagaggagatggaggagaaggtgcatggctgttgccgtatctcctagtctccgtgtgatggaggagggagatgcctggggaggggctcctggaatccaggccagcccaacagccctggctggggaggtgtcagggcagctggggagaggtgggctctgcttttcagaggaactcagaccccagccctcagctggctgcccatagcatcccatgtcccacgtcccgtggttctgcttcctgctgcatcgtctgccatctgacacaaggcctgtcgtggcctcctggttcactctgctgtctgatcttgggagggtgggcttgagatcccagctctattcttggtataaaggcttctccggatcagtacatgcatgtcacattaacacacacacacacacacatatacacacacacacaagctcgatcagtgtgtgtaggaatgacatacctgggctcaggggaagcaagggggcttagaatttgtggggtattcccaaaaggatggaagttaagactcagagtctcattaccactgccaatgtggttttagcaggggaggggacctgctaagctgagacccatagtcctgctcagagttatcccaaagtctgagccaccagccacacctgacaggggtgagaagtcctcgctgtgttcagagggagccaggaatctacatgggtagatgagatagacacagacctgctccccgcagccttgttgagagccacacttctgcccatgccaggagccagctgtgtgaccatccaggggtggagggggaaaaccaggcaatttcgttcctggaatcaaccaaatcatgttttcctcttggatggaagtgtcaaaggcagaagggtgtgggagggggacaaggtcagtatttaccaaagtgtatctgattttaaaaattcctttagtctgtaaaactcctagagggagggaggtaactgaattcacttctttttgtggatcgtatcaaggtcactgggttttactggctggtgctgggaaaatgaagctaagtgaggagcttccattggaatgcttttccagggagagaggccagttaatttaaaaaaaacagtcgctagttaacagcgacagagcccagcaccctggggtctttgtgaatatccagactgtttcagcccagcccatctcagccaaccctccttagactgagctgtcagagcaagcaattaggggccagcctgcctccacctcccacccccttccacctccatcagtcatgtgtgcagagtcagtgctcgggatcccgggcccagcttttgcctttttggggatgcttggtgagacagatttgccagtcagcccttttgagttcccgcctcacccaggggctcccagcctgcacttgcaggagtggtgatgccccaagtctgcgaatccagggtgcacgtggtcaatatcccctcctgcattcaggagagccatggtagggctagagttgggtcttgcccagccctgcagtttcatagtcccagccttcctggtgctggggagggaggactgtgaatggctgttctcccctcactgctgagtctcccaggaccccctttggagatgcccatggcatgggcactgcccacaggctcagccagaacctcttggtgtacccgataagctgcaggttatcccttgctctgtgcgccttttatttgtccttaaactacctccttagagctctgaaggggtctcctagttccagattttaatttggggaacagatctgggttctttttaaccctcttctttctcagtctatgagaaacttgccctgaggggcacctgggctaggggcttgggactggaagaccatccccgccttgtgccacaactttggtcatgggatctgctctttgtcattcttagccccctactgtggcccccatagccccataacccagagagggagctggacttcagggagcctgagtgatgctttcccaggagcagggcagctggctggaccagaaagtagagggcccatgggagtgactgcacccttggtggctgctggaaggggagaggttctcagcatcaggccacctccaccccaatgccaggatagatgtattctagagtaggggtggaggcggcccaggaggctgaagacaggtgcacagatgcttcccacgaccttgccatttggggtgggctcttcaacatctcaggctgtggctggaacaggacaggatgatctaaaacacacgtaccattggctgtaaaacagtatgagcccagactgacgctgaaatccctcatgagccaaccttagctacaaggtagggagttctgagggaagccgcgtgctcctcaggagagagctgtttaggttttccgatctttttgctcaggggccaaacactgaaggcacgtactgcccaacccactgagcgcctgaggccattccctccttttccgcatgcctcctgcctcctgggctattcctctccacccagaaggctgggaatcccagctgattccctgacaggagccgacttcacacacaggtgactctcaggcattggctcatgttttcagccagggataaaccatcccttcttggggctttaagtccctggggagctttccctgtaggtctcctgggtgttgagagacaagttggagaccaacctccaatgaatgagccgcggtcattcattaattcactcacgtaatttactgagtagctgcaacatgccagcctctacgttaggttctgcggataaaggaggaataagacagagtcaggagaactgttccttgtggtttccgtcccttggggaccacaggcatcagcagtcccattcaagtcacctgaggcaaagtgtctgcatcttcgtccagcgaccctttgcttttcggctcctagaatccttagagtctgaattcctttagctgggaacagctgtcatggtcacccctggataacatttgccaccaagtatagatgctggatcttgggttccaggcagacatcatccaggtccatctggaactttcagtgatagctgccttcagccagcatctttgggggactctataatagcagcttgagatcagtgtctagaagactgttctgcaatttgctgccaaatgcatctcaggtttttaaagtcattgtttcttgctcatggtggctcatttattacatagtcccctcaccccactaatggataatgggaggaaaagttgctgcttccttcagcatcaaagcctttccttgggaatctgcctccctccatggcaggggtggattcgggagctgggagtaaccaggcaaagtcaaccagatgcctagctcctgctgagacccaggtcctatggcagctcctcattagattaaaggagaccacttccaaagcaggtgctgcatggctcaccatcatatgccccaaacaactgaaagttggcggttatcaccagactgtgagtttctggcaagtagcttggggaagctgaataaactctaggcccagggctactaaagacttcaggatagaattctccatcaaatatacagcataagtaaaactgctctgcactgtttaatccatttccaaggggcttagaaaagctaacaagggtgtgtcccctgtcctgccccaccggtttgctggctttgtaataacataagaccattgtggttgttggtgtcagataccttcccatcctgagctctctcacctacctgctctctctcctagagcaggatactggggtacttttaagaagggtgctccttttaagatgcccagaaaagctgtatttaactcttgctatttgtaacttggggatggtctcccctgccccagggcacataagagcaaaggctccaatggtcagtggatgactctgcaaaagtgaccccctgtgccagaagctatagccctctccccaacaggtctctcttgttggccagagggcctgcttcccatgggcattgcaagtgccaccgtgcggggcctggctctgcacacccaggaaaagtctgcagacccccagccctccgcaataattcaccagaccagaagccactggtgtacagagaacacttaaaaaaatgtattttatgtgaaaaaaaattaaaactctgtatactgtatcagcagctttgtgtaaaaatggcaatcaagagagtctaatatatttaaaacttttttaaaaaaaatcttcgcagatctttgatatcgtactgaggtaacttccacgtagccccttgccacgcggcaccggtgggccttgggtccaaaactgtggctcagccacatcccaaagggggcacatgtccctggagttgcttccagctgccaaggcctgtgacagaattcgctgttaagagtttttaattaaaattattaaattccttttaataaca

SEQ ID NO: 4075 - DNA, 6426 bp, Homo Sapiens
  NM_015570
gggagctgcgctcgcagtttcgccctctcttccgctaatgattgcattattatgctcccctctctggggggtctcgcccctcttgggtcgctccggagccccggcctcccctggctgcatttcttaaaaatttgggagcctgggagtgagttttctccgaggcgtgtgtgagaggcggcgggggtgttttcctgcgcgaggggcgggtgaagttcattgcccccacttttcccgcgacctttttcggacccgattttggatcgagttgaggggggcgcgggcgttttcggggggcggggggcgcggcggagaatggccgcggggagggctccccggagcctcccagtctcttgatcaaagcattccgctattctgatttattgcttgcttggtgagttatttttttttcctctaaaggagacctgtgtgttcagccattactttgctcggcgctgctcccaggcatctccgaccctcggtgctgtggggagccccacacttgggctcctcgcctctcgccctcgctccccgtccctcctcccctctctccgccccttcccccttttctttctcctctctttcttcccctctctcccttctttcggccgccgtctcccccgcgccctcctcggggcggagggaagccgtgaagggggagggagggctcggtgtcaatttttttttgtgtggctgcggccgtagcctgtggcgggcaagcggggagaccccggcgcagcagaaccatggatggcccgacgcggggccatggactccgcaaaaagcggcggtcgcggtcgcagcgagaccgggagaggcgctcccggggcgggctgggggccggcgcggccggcggcggcggggctggccggacccgggcgctctcactcgcctcgtcgtcgggctccgacaaggaagacaatgggaagcccccgtcctccgccccgtcccggcccagacccccgcggaggaagcggagagagtccacctcggcagaagaggacatcattgatggatttgccatgaccagctttgtcacttttgaagcgctggagaaagatgtagcacttaagcctcaggaacgtgtggagaaacgccagacgcccctgaccaagaagaaacgagaagcacttaccaatggcttgtcctttcattcaaagaagagcagactcagccacccacaccactacagctcagatcgagaaaatgaccgcaatctctgccagcaccttgggaagagaaagaaaatgccgaaggcactcagacagctcaagccaggacagaacagctgcagggacagtgacagtgaaagtgccagtggagaatccaagggcttccaccggagcagctctcgggaaaggctcagtgatagttcagctccttccagcttgggaacaggctacttctgtgacagtgacagtgaccaggaagagaaggcatcagatgccagctctgaaaaactcttcaacactgttattgtaaacaaagatccggagttaggtgttggcacgctaccagaacatgacagccaggatgcagggccgattgtccccaagatatcgggtctagagagaagccaggagaagagccaggactgttgcaaagagccaatctttgagcctgtggtgcttaaagacccctgccctcaggtcgcacagccaataccccagccgcagacggagccccaactccgagctccttctccggaccctgacttggtgcagcgcacagaggccccacctcaacccccacctctgagtacacagccaccacagggccctcctgaggcccagctccagcctgccccgcagcctcaggtgcagaggccacccaggccacagtcccccacccagctgctccatcagaacctcccacctgtgcaggcccacccctctgctcagagcctctcccagccattgtcagcctacaacagcagtagcttaagcctcaacagtttaagcagcagcagaagcagcactccagcgaagactcagcccgccccacctcacatctcccaccacccctctgcctccccgttccccctctccctgcccaaccacagccccctgcacagcttcacacccaccctccagccccccgcacactcacatcaccccaatatgtttgcccctcccactgctctgcctcctccaccaccactgacatcaggaagtctgcaggtggccggacacccggccgggagcacttactcagagcaagacatcttgcgacaggaactgaacactcgttttttggcctctcagagtgctgaccgcggggcttccctgggccctccgccctacctgcggaccgagttccatcagcaccagcaccagcaccagcacacccaccagcacacgcaccagcacaccttcacgccgttcccccacgccatcccacccaccgccatcatgccgacgccagcacctcccatgtttgacaaataccctacaaaagttgacccattctaccggcacagtctcttccattcctatcctcctgcagtgtcgggcatcccccctatgatcccacccactggcccttttggttcactacaaggagcatttcagccgaagacatccaaccctatcgatgtcgctgctcggcctgggacagtcccacacactttactccaaaaggacccgaggttgacagatcctttcagacctatgttaaggaaaccagggaagtggtgtgctatgcatgttcacatcgcctggcagatttaccaccaccaacagaaagtcaagaaacagatgcagtcagacccacataagctggactttggactgaaacctgagttcctgagccgccctccaggccccagtctttttggagccatccaccacccccatgacctggcacggccttcaactttgttctctgccgctggtgctgcacacccaactgggaccccttttgggccacctcctcatcacagcaacttcctcaaccctgctgcccacctagagccttttaatcggccgtctacattcacaggcctagcagcagttggtggcaatgccttcgggggacttggaaatccttccgttacacccaactcaatgttcggccacaaggatggccccagtgtgcagaactttagcaaccctcacgaaccctggaaccggctgcaccgaacgcctccgtcgttcccgacccctccgccctggctgaagccaggggagctggagcgcagcgcgtccgctgcagctcatgacagagatagagatgtagataaacgagactcatctgttagtaaagatgacaaagaaagggaaagcgtcgagaagagacactccagccacccttcaccagcacctgtcctcccggtgaatgccctgggacatacccgcagctccactgaacagatccgggctcatctgaacactgaggctcgggagaaggacaaacccaaagagagggagagagaccactcggaatcccgcaaggacctggccgccgacgagcacaaggcgaaagagggccacctgcccgagaaggacgggcacggccacgaggggcgcgccgcgggcgaagaggccaagcagctggcccgggtgccgtctccctacgtgcggaccccggtggtggagagtgccaggcccaacagcacctcgagccgggaggccgagccgcgcaagggtgagccggcctacgagaaccccaagaagagctccgaggtcaaggtgaaggaggagcggaaggaagaccatgacctgcctccagaggccccgcagacccaccgggcctcggagccgccgcctcccaactcctcgtccagcgtgcacccggggcccctggcctcgatgcccatgacggtgggggtgacgggcattcaccccatgaacagcatcagcagcctggacaggactcgcatgatgacccccttcatgggcatcagccccctcccgggcggagagcgcttcccgtacccttctttccactgggaccccatccgggaccccttgagggatccttaccgagaacttgacattcaccggagagacccgctgggcagggacttcctgctaaggaacgacccgctccaccggctctcgactccccggctgtacgaagccgaccgctccttcagggaccgggagcctcacgactacagccaccaccaccaccaccaccaccacccgctgtctgtggaccctcggcgggagcacgagcggggaggccacctggacgagcgggagcgcttgcacatgctcagagaagactacgagcacacgcggctccactccgtgcaccccgcctccctcgacggacacctcccccaccccagcctcatcaccccgggactccccagcatgcactatccccgcatcagccccaccgcgggcaaccagaacggactcctcaacaagacccctccgacagcagcgctgagcgcacctcccccgctcatctccacgctggggggccgcccggtctctcccagaaggacgactcctctgtccgcagagataagggagaggcccccttcccacacgctgaaggatatcgaggcccgataagccgagaacaggagcaagaacgaggaagaagaaaccctaggcagacaccaggccaggcttgagagacagaactcctgcatggctcacacagactgggggggaaagccccaccccttccccttgtaaaaaatgtatagactcagtgcacattttgaaatgttttgtatattatatgttgagatttttcagatcttttagcccagtcatatgttctcacgtctcctactttttgtttctcgtataaaactttttgatttgaaccaaaacagtgaagatgacaacacacaccaattggatgataattgtagcgggggcggtgggggggagaagtccacgccatccatcatgcaaaattctttcagatgaggtgggaaggccgtgtacatagttatgtaaaaagagattgcttcatgagctaatggttcatatatgcaaaagggtaagatgaaagctttactttgtacaaatgtaaatagataaagtaacataatacattaatacttcttaaaatgtgctatttgcaaacttacttaatatcagtgaacacagtcggctaaagctgtgttcccatatattgttatagacagctaaacccttcaactatgcaatgaatgttcgggcttttcacaaaagcccgcctaactcaaaggagccttttcaaatccatttacagcatacttaaggtcatattttccctgaacaagcgcttacgtgatatgactctgttttccttgcttgttttttttcaaacggagaaacatcctgttttgcaaattggaccccaggctggaacttagcatctgaagttgccgcttgtgggctctgggggaaagtgtagccccggagaggtaactgaggacatgagcaaccagtgccagggagggtgggatttgccagatgccaaaatcaggggacgggtggtggtgtctgtcagacacacacaggtcgccagtgacttcacacacacctcatgtgagaaccatgccttttttagtgtgtcctatttcatacctgtacacacttcctcgttttgtaatgagatttacttacacccaaacagatcctgaaagaaagcttcaagttttctcagatgatggatatgttttcactgtattcaataactgacggatgtaaggtgcacgtttcctgatgtgacgcactgtattccagctggtgatcaagtctgggaacagccgtaacaggtcaaccttgtggagccatcgcgagttagagggtgaaagatggcagaaaaaaaagtcttgtgtgtgagtgtgttttttgagtttgcatcaatcttaatgtctcttcataatacttttataatacattaagcctcttgtctacatatttggagagaatatgactttactagcagagaaatacaatatatcttgtctactggactgtaaaatatatgtatgaaataaaattagttccatttggtcttctagtatattaaagtgctatctgacgttgttatcctgtttttgcaaaaaaaaaaaaaaaaaaaagttaactacagaccattgtttctaataagcagagagatctattttagtagtaaactgaaggtttagttgtgagcttcagattttgtgaactccagatgttgtgcggtgtttttttttttttttaagacaacaactaaaaaaaatgcaaggaatatgtacactggaactgtagtggtagctttcagtattgtaaagagattgttctatacggacctttttgctgtttatcctgtatgtaataaagtcctttctagatcctatgtgaaaagaaaagtgaagcaactgaatcttcagcatgttctcatcggcggagccttcttgtgtaatgtaaactgtgccatgttattaaaaaatgtgaactaagcttccagctgcttgtttgtgtgaggtga

SEQ ID NO: 4076 - DNA, 7959 bp, Homo Sapiens
  NM_015575
gtgacgtgcgtggcgacgtgtcggccatcttgtgttgttgaggctgaggactgactggggttctgagactccctgtcccggaccgcagattatagtgggaccagtctcattaggttgaatctacagcctatgttggtgttaacccaggtctcttagagcgttaaaaggatctgaacaaagtctgctcaaatctcctgctgtgaaccagcagaatttttgaacagagaccacgtctccacctcctgggctccaacgattctcccatcttggcctcccaaagcgctggatttacaggtttcttcacatataaaaatctattgtaaaaatacggaaaagaatggcagcggaaacgcagacactgaactttgggcctgaatggctccgagctctgtccagtggtgggagtattacatcccctcctctttctccagcattgccgaagtataaattagcagattatcgttacggcagagaagaaatgttagcacttttccttaaagacaacaagataccttcagaccttctggataaagaatttctgcctatcctccaggaggaaccccttccaccattggctctggtaccctttacagaagaagaacagagaaacttttccatgtctgtaaatagtgctgctgtcctgcgattgacaggacgaggaggaggaggaacagtggtgggggctcctagaggtcgaagttcttcaagagggcgaggcagaggcagaggtgaatgtggtttctaccaaagaagttttgatgaagtagagggtgtttttggtcgaggaggtggcagagaaatgcatagatcgcagagctgggaggaaaggggtgacagacgttttgaaaaaccaggacgaaaagatgtagggagaccaaattttgaggaaggtggaccaacatcagtagggagaaagcatgaatttatacgctcagaaagtgaaaattggcgcatctttagagaggaacaaaatggagaagatgaagatggaggttggcgactagctggatcaaggagggatggagagaggtggcgacctcacagtcctgatggccctcgttctgcaggctggcgggaacacatggaacgacgtcggaggtttgagtttgattttcgagatagagatgatgaacggggttaccgaagggttcgctctggcagtgggagcatagatgatgacagggatagcttgcccgaatggtgcttagaggatgctgaagaagaaatgggtacatttgactcatctggagcattcctttctctaaaaaaagtacagaaagagcctattccagaagagcaggagatggacttccggcctgtggacgaaggggaggagtgctctgactctgagggtagccataatgaagaggccaaagaacccgataagacaaataagaaagaaggagagaaaacagatagagtaggagttgaagctagtgaggaaactccccagacctcatcatcatctgctagaccaggtactccttcagaccatcagtctcaggaagcatcacagtttgagaggaaagatgaaccaaaaactgagcaaacggaaaaagctgaagaggagactcggatggaaaatagtctaccagccaaagtgcccagcagaggggatgaaatggttgctgatgtccagcagcccctgtcgcagattccttcagatacagcctctcctcttctcatacttccacctcctgttcccaatcctagtcctactctccggccagttgaaacaccagttgtaggtgctcctggtatgggcagtgtttccacagaacctgatgatgaagaaggtctcaaacatttggagcagcaagctgagaaaatggtggcttatctccaagacagtgcactagatgatgaaagattggcatcaaaactgcaagagcacagagctaaaggagtgtcgattccattgatgcatgaagcaatgcagaagtggtattacaaagatcctcagggagaaattcaaggtcccttcaataatcaggagatggcagaatggtttcaggcgggctattttactatgtctttattggtgaagagagcgtgtgatgaaagcttccaacctcttggcgatatcatgaaaatgtggggaagggttcccttttctccaggtccagctccccctcctcatatgggagagctggaccaggaacgactgaccaggcagcaagaactcacagccttataccagatgcagcacctgcagtaccagcagtttttaatacaacaacaatatgcacaggttttggcccaacagcagaaagcagcactgtcttcccagcagcagcagcagttggcacttcttcttcaacagtttcagaccttgaagatgagaatatctgatcagaacatcattccctcagtaactaggtctgtgtccgtgccagatactggctctatctgggagcttcagccaacagcttcacagcctacagtttgggaaggtggtagtgtatgggatcttcctctggacaccacgacaccaggccctgccctggaacagcttcagcagctagagaaggccaaagctgcaaagctagagcaagagagaagagaggcagaaatgagggcaaaacgggaagaggaagagcgaaagaggcaggaagaactccgaagacaacaggaggaaattcttcggcgacagcaggaagaagaaaggaaaaggcgagaggaagaagaacttgcccgaaggaaacaggaagaggctctgcgtcgccagcgggagcaagaaattgcattaaggcgacagcgagaagaggaagaaagacagcagcaagaagaagctcttagaagactggaagagaggagaagagaagaggaagaaaggcggaagcaggaagaattgttacgcaaacaggaagaggaggctgcaaaatgggcccgggaagaagaagaagcccagcgtcgattagaggagaaccggctgcggatggaagaggaggcagccagactccggcatgaggaagaagaacggaagagaaaggagctggaggtccagcggcagaaggagttaatgcgccagaggcagcagcagcaagaggctctccggaggttgcagcagcagcagcagcaacaacagctggcgcagatgaagcttccttcttcttcaacgtggggccagcagtccaatacaacagcatgtcagtcccaggccacgctgtcgttggctgaaatccaaaaactagaggaagaacgagaacggcagcttcgagaagagcaaaggcgccagcagagggagttgatgaaagctcttcagcagcagcagcaacagcaacagcagaaactctcaggttgggggaatgtcagcaaaccttcaggtaccacgaaatctcttctggagatccagcaggaagaggccaggcaaatgcaaaagcagcagcagcagcagcagcaacaccagcaaccaaacagagctcgtaacaatacgcattccaacctgcacaccagcattgggaattctgtttggggctctataaatactggtcctcctaaccagtgggcatctgacctagtcagtagtatttggagtaatgctgacactaaaaactccaacatgggattctgggatgatgcagtgaaagaggtgggacctaggaattcaacaaataaaaataaaaacaacgccagtctcagtaaatctgtaggtgtgtctaaccggcagaataagaaagtagaagaagaagaaaagttgctgaagctctttcagggagtaaataaagcccaagatggatttacgcagtggtgtgaacagatgcttcatgcccttaatacggcaaataacttggatgttcccacatttgtttctttcctgaaagaagtagaatctccttatgaggtccatgattatatcagggcctatttaggagatacttctgaggccaaggagtttgccaagcagttccttgagcgccgtgccaaacagaaagccaaccagcagcgtcagcagcagcagctgccacagcagcagcagcagcagccgccacagcagccgccacagcagccacaacagcaggactctgtgtgggggatgaaccacagtacactccattcagtatttcagaccaatcaaagcaacaaccaacaatccaattttgaggctgtgcagagtggcaagaagaagaaaaagcagaagatggtccgagcagatcccagtttattaggattttcagtcaatgcatcatcggagcgactcaacatgggtgaaatcgagacgttggatgactactgagcacctgccagtggactggccatccctctcctgtctgccgactatggagtctccacctttggacacaacacttactcaccatttactctttatcactctgcaacaaatcacagaaccgatcatctcaggctttttcttctggccctttgtgtccaagattctttaatccatttttgttggtgaacatctcagactatagataagtggactggaccctgtgtcttgggggtggcagttgggattactccccaacaaggctgattttaggcagcatgtgttcactgtgctgtgatttcatctactgtctcccagaaagtgtgttgggatcggccattagcagcttgctttctcttgtcactttttttcttctattttgttttttcttcttctttttccccccatcagggcaaatggtctaactggtgcaatcatgaagagagttaatggttaacagacattggccaataacaaaacaccccatggactgtgactcgagtatccaacaggcagtcagagctctcccggtctgaaagttgcattgccactgctaactttgggattgcatcagagaggccctgagtggggttgagatgaggttggtttggtttgatgttacacactcctcacctgttctttctgagtgtcctttctctgaaaggatttatgtttttcttcgttagatagtgacttctgagcaagctgatctcccctggcatgctccaacctgattggacaaaggaagctctatggcctgggagagagactattcttaatttttctttcttacaaaaactgatttttcccataaatatttttacttcagaggactaggaccattttgttttgggcccttctgctgaaaatttgtctcgtttaagaggcagctagaatctttaccatatgtatgaatttgtataatttcatttttggatagggataaacttttgcttctgataaaagcctggaatttcatctggtcctcagagcattgcgtgtgtgtcttgctgtagcccggaaaaggttttgtgtaaagattctgggatggcaagttgtttgccttttctgaaaagagaacatacagaacctgtccatctttaagaccttcatccatggaatctactatacaggaggatgcagtgggctggaggggatgggcgaaaatgggagcaggaagcctggcctggcttctggtcatggcctcctaaaaccttaaacttcaagtagaaatgtactcaagccctatttataaacaaatacttttcctgcctccaccaaacccctacagaacatcacctggaattgccactcacactgggttggagtcattgggcagctgtgcctgtgcgagaggtgctgtggtctgggcagcccctggaaaagcacctttgctgcctgtcattgttgcctgaagaaggctggagttgctctgagagcagtttgggtttggagtattatatttggcttctatttttattattttggatcaccattctccctatcccttcttgcctccctcccttctaaacatgtgtaataactatacagagactgctacaaaattgtatatagtttttggatcaaatagcatgaggggagaggaaaccattaaaagttggggctcctactctcctttgctttgtaaattcaaaagttgggggtgggtaagagggatagttaaaatgtttacaaaactttaggctccctcggaacttttgccagtgtggaggaaaataaaaaagaacttaaataaaatctgattgtattctatctgagtgcacctcttgtactcacctttatggaggctgagttctgcactaaactgttcctcttggtaccatggaaaagctccaagcacccaagacatggaggcagccatggcttctttctctgccagaccacgtagcactggctggttctgtatttgagaatgtagaggtcaaggcagatgtcggtaagtttgaccaaatatcttttctctttttgactctccctttctgctaacatgtggatcagctcctgccctcataccgcagacacacccactctgaacacacccctccagagcttgcccacaccttcccaactagactctgtgtgtgtattcaggaaaaatgaaaataaatttttaaaaattgggagtggaatgggcagattagggggaacaaagtcattttggtcatggaacatccatttgcttaaccaaggagacttgcttctatctgaggaatttcccacttagtagaaagaaacactcttccctgggaatgtttgtttctgtctctctcaatgctactctctttcatattctcatttgctcaccctttcacttagagccaccgttttctcatcccattctatgaacttatttccaaattctcctaactattcctgagttttgaagtatttgttttgtaccctctctgcttccggttttttgtttggttggcttttttggagatagggtcttgtgatgttgcccacactggtctcgagcccctgggctcaagtgatcctcccgcctcagcctcctaaatatctaggactacaggtgtgtgccaccatgcccagctccagttttgttggttgatttgtttaaattcagagatttaaaaacatcccagacaagacagtttgattatggagactgtccccaagcagattggtgtgctggtggctgctgtgcataacagattccctccagattggcttacaacagctacttcattctgtgggtcaggaatttggatagggctcagctgggtggtggttctcctggggtattctttggttgtggtcagatgtcttccagggcatcattcctatgaaggcttaatgaattaggcaagctgtccaagatggctcactcgtgtaatgacagttgacgttggctgtaggctgggaactcagctgggttgatgactggaggagcttatgtgtgtcgtctccggaatggcagcttcagaggagttgaacttaagtggtgattggcttcccccagagaaccaggcagaagctgtgttacctttttgagctcttagctcaggagtcacatagagtcacttctgtgacactgtgttgcatcaaagtagtcacaaacccactcagattcaagagaagggagcatggccctctccctgcaaccccctccccccccgccttgatgaaaggagtgacaaggtcacattggagaagagcttgtggggtgggagatattatagccatttttgggaaatatctgcataaaatgagtttatgcatacatgaaggactttattttcattggctttaagttgagggtttttgtttttgtttttgtattggagatgggttcttactatgttgcccaggctggtctcaaacccctgggctcaagtgatcctgttgcctcagcctcccaagtagctgggactacagctatgtgccagtgcacccagcttgttttttttaaattttaggatagataatggtacttctggctttatttaaataatttttttagggaaaccattgtatttatacatgcatatatttttatatatacaaatatgtatataaaagtatatgttttacattttcaatatatatataatatatacatatatgttatatacgtatatatattgcaccctactttaaaattgactgataacaaaattggtaattttgtataaaatgcccaactgtgcattattaataaaagtatgtgaatgactctaaaaaaa

SEQ ID NO: 4077 - DNA, 3824 bp, Homo Sapiens
  NM_015602
actgcctctctcacagccctcaagacacaccatgggcccagaggcaggtttgctacacagcagcgacgacgcaggcggcggccccagcgactcgcaactgcctccctgaccacagcggccaccgcccaacacccccgagaagccatcgccaccaccggcaggagaacctagggtccataaagccatcttcgcgatcgactaaagctacgtcaacaactatggcgggcgacgggcggcgggcagaggcggtgcgggaaggatggggtgtgtacgtcacccccagggcccccatccgagagggaaggggccggctcgcccctcaaaatggcggcagcagcgatgcgcctgcgtacagaactcctccgtcgcgccagggccggcgggaagtgaggttctcggacgagccgccagaagtgtacggcgacttcgagcccctggtggccaaagaaaggtccccggtgggaaaacgaacccggctagaagagttccggtccgattctgcgaaagaggaagtgagagaaagcgcgtactaccttcggtctaggcagcggaggcagccgcgaccccaggaaaccgaggaaatgaagacgcgaaggactacccgccttcagcagcagcactcagagcagcctccgctacagccgtctcctgttatgaccaggagagggctgcgggactctcattcctctgaagaggatgaagcatcttcccaaactgatttaagccaaacgatctcaaagaaaactgtcaggagcatacaagaggctccagtgagtgaagatcttgtaatcaggttacgtcgaccccctctaagatacccaagatatgaagccaccagtgtccaacagaaggtcaatttctctgaagaaggagaaactgaagaagatgatcaagacagctctcacagcagtgtcactactgttaaggccagatccagggattctgatgaatctggagataaaaccaccagatcatctagtcaatatatagaatcattttggcagtcatcacaaagtcaaaacttcacagctcatgataagcaaccttcagtgctaagctcaggatatcaaaaaactccccaggaatgggccccacaaactgcaagaataaggaccaggatgcaaaatgacagcattctgaaatcagagcttggaaaccagtcaccatcaacctccagccgacaagtgactggacaaccccaaaatgcatcttttgtcaagaggaaccggtggtggctacttcctctgatagctgctcttgcctctgggagtttttggttctttagtactcctgaggtagaaaccactgctgttcaagagttccagaaccagatgaatcaacttaagaataagtaccaaggtcaagatgagaagctgtggaaaaggagccaaacattcctggaaaaacatcttaatagctcccatcctcggtctcagcctgctatcttactgctcactgctgcccgagatgctgaagaagcacttaggtgtctgagtgaacaaattgctgatgcctattcttcttttcgtagtgtccgtgccatccggattgatgggacagataaagctactcaagacagtgatactgtcaaactagaggtagaccaagaactgagcaatggatttaagaatggccagaatgcagctgtggtacaccgctttgagtcatttcccgcaggctctactttgatcttctacaaatattgtgaccatgaaaacgcggccttcaaagatgtagccttagtcctgactgtcttattggaggaagagacacttggaacaagtctaggcctaaaggaagttgaagaaaaagtaagagattttcttaaagtcaagttcaccaattctaacacacccaactcctacaatcatatggacccagacaaactgaatggcctctggagccgtatttctcacttagttctgcctgtgcaacctgaaaatgccctgaaaaggggcatctgcttataagaagtgagagagaagaaaaatcatgtcccaagttctgagaattgttcacactttctaaccagagacagaattcagagctctttttgaaagaactagtttctttttaaagaagttaagtgcttacataaacatggaacatataaatcattcattcaacctaattatctgtgatatgagagaatcatttcagtttccattgagagctctgttaaaggtatcttaggagtgcagattatatgcagttccttagagaatctgttttgattctgggctgagttattacagttatggtatgaccagtgagagggatttgtgtcctttcttatgaaccttcctgattttttaacttagatttctcactaagtttcctgagttattagtaagattgctccctaaatgtaaccagggattttcccattatgttcccttttataccatttaggtgtgagttccttagcttctgcctataggaacataagtaatgaaaggtcatctaggtgtgtgtttggaatttttttcttttgttttttggaaaatggaaagaacaaggcaaggaaggaaaattaatggggaagctgaagggaggaaatgttacagtaatccactgagatgtagtttagtcaaacataggtatatgaactgttaatcttggtggattccgttgggatttgttttttacatctcctttttccttccttgaagaaaaattcttggctgtcccaaggattcttcatgtatattgcaaaatttaatatatttgttcacttgagtcttaagagtaggtcaggccaaggcaggtggatcacctgaggtcagaagttcaagaccagcctggccaacatggtgaaaccccgtctctactaaaaatacaaaaattagctgggcgtggtggtgcatgcctgaaatcccagctacttgggaggctgaggcaggagaattgcttgaacccgggaggcggaggttgcagtaagccgagaccatgcttattgccctccagtctgggcaacaaaaatgaaactccgtctcaaaaaaaaaaaagtaggtcaattcgtaacagtttattttggacacaccctgaagcttttgttttgaattaagaaatgagtttcaggaattgacaaaccatttgttaaccagctgtcctgggctattgaagaagatttcattttccgcgcatccacttgttgcagtccaagtcctctagtgcaacgccatagcaaatataaagatttactatgcacgtgatacattttatggagtgcctcaagccaagatagtgaatttatatgaagggtgtgaaatgtatttctttactactatagtagtttagttataactttgcatctataattgagctttctcatctgtcaaatgctatggttttcttaaaatgttacaattctagatctatccaccttgtttttttattgtctacaaaccattaaatgtaaatattgtttttagagtcagtcattggctttgtcatttaccctttgagagttccacaagtggtagtagagtggtttaacgtctttcctctagtactaccagtattcataaatgtataccccttactgtaatttgttcctcttagaagtcagatcatctgatttatagaggattatgaaaaccagagtttttgaaaaggcttattttatacatacgtattatatagagaaacaaatgtttttattaaatgtttcattgacccaagtaatttaaaagtaatatgttacctatgtctttcaggaaaaataattatagcagctgatctgtaaatgactttaaaagctattttagtaatttaaataaatttactttcttggtttatactctcaaaaaaaaaaaaaaaaa

SEQ ID NO: 4078 - DNA, 2568 bp, Homo Sapiens
  NM_015604
atgagatcgtccctattgacgtcgacagacagaagccgcgtccagtgagaaggaaagaacggccgctatagccctatcggctgctacaacaccaaaacgcatccacctaactggctgacgctacaccttggtctttccgggtccttgcacgcttcgctccaactcctgcagagctgagccggaggggaatccggaagggacacgctgaacaggaacagaaatgaataaaagtcgctggcagagtagaagacgacatgggagaagaagccaccagcagaacccttggttcagactccgtgattctgaagacaggtctgactcccgggcagcacagcccgctcacgattccggccacggtgatgacgagtctccgtcaacctcgtctggcacagctgggacctcctctgtgccagagctacctgggttttactttgaccctgaaaagaaacgctacttccgcttgctccctggacataacaactgcaaccccctgacgaaagagagcatccggcagaaggagatggagagcaagagactgcggctgctccaggaagaagacagacggaaaaagattgccaggatgggatttaatgcatcttccatgctacgaaaaagccagctgggttttctcaacgtcaccaattactgccatttagcccacgagctgcgtctcagctgcatggagaggaaaaaggtccagattcgaagcatggatccctccgccttggcaagcgaccgatttaacctcatactggcagataccaacagtgaccggctcttcacagtgaacgatgttaaagttggaggctccaagtatggtatcatcaacctgcaaagtctgaagacccctacgctcaaggtgttcatgcacgaaaacctctacttcaccaaccggaaggtgaattcggtgtgctgggcctcgctgaatcacttggattcccacattctgctatgcctcatgggactcgcagagactccaggctgtgccaccctgctcccagcatcactgttcgtcaatagtcacccaggaatagaccggcctggcatgctctgcagtttccggatccctggtgcctggtcctgtgcctggtccctgaatatccaagcaaataactgcttcagtacaggcttgtctcggcgggtcctgttgaccaacgtggtgacgggacaccggcagtcctttgggaccaacagtgatgtcttggcccagcagtttgctctcatggctcctctgctgtttaatggctgccgctctggggaaatctttgccattgatctgcgttgtggaaatcaaggcaagggatggaaggccacccgcctgtttcatgattcagcagtgacctctgtgcggatcctccaagatgagcaatacctgatggcttcagacatggctggaaagatcaagctgtgggacctgaggaccacgaagtgcgtaaggcagtacgaaggccacgtgaatgagtacgcctacctgcccctgcatgtgcacgaggaagaaggaatcctggtggcagtgggccaggactgctacacgagaatctggagcctccacgatgcccgcctactgagaaccataccctccccgtaccctgcctccaaggccgacattcccagtgtggccttctcgtcgcggctggggggctcccggggcgcgccggggctgctcatggctgtcgggcaggacctttactgttactcctacagctaattctgcagggcacagcccagagccatgtggatttgacttacgggagtaaagcgtaactttttactgcatctaatgagggtgttttaagtgacactcagtgtacacagatcccatcctctggctgctaggagagaagtgctgaatgttccgtgtggagatgctcaggaaagttatttgagttaaattgctggctgagagagcttggaagtccttttcataaaaggtacctctttccttttcttattgaattcttagaacttagttaaccctccctgccttttcttaacaaaaaggacttttctaaggactgaagattggcaaaaacgaaaagcttcttcctccaagagcccattgaagaagcccagtgatgagacggtgagatggtttgagtcctcggtgcctgggtagcaggaagaaagacctgcatcctgcatctgtacttggggaagccagcggagaggacggggaggttacttctctaagtttctgcagaaatattgaaggctggagtttggaatccttaaacttggccttctcaaactcagcagcagatctccgggattctgctgttattatccaaaggcgttggaaggaaagatggatcttcttacatgctagaagttttaaacggtccttaacatgcctttgttcaagcaccttccagaatgtaaggttcagcagctctggtttctattacggtgacttgaatgtcagattcaagggcccggcgtcaaaggaaattggttttgactttttgtaatctaggagcgacagttcgtgagatgtttattcagtgttaaagagcctgtttttctaccaaacaataaaaccaagagaagaatcaaaaaaaaaaaaaaaaa

SEQ ID NO: 4079 - DNA, 1293 bp, Homo Sapiens
  NM_015607
tcagacaagcactggacgtggcggccattttgttttggacaccgagcaggagctggcggccgctgcagacgaaaggcaggaaagggcaggccgggtgagcagacggatcggccgactagacagccaaccagcaacaacgaactgagctcgcatactaccgcttacgcatctaaccaaccgcccatctagctaacccgagcccctccaccgtcaactcaggttcggccggtccccggcccgcctgccggagccgtggtggcagccccgggaggagcactggcgtctgtttccttcgattctcgggattcgaagatggctgcacagtcagcgccgaaagttgtgctaaaaagcaccaccaagatgtctctaaatgagcgctttactaatatgctgaagaacaaacagccgacgccagtgaatattcgggcttcgatgcagcaacaacagcagctagccagtgccagaaacagaagactggcccagcagatggagaatagaccctctgtccaggcagcattaaaacttaagcagagcttaaagcagcgcctgggtaagagtaacatccaggcacggttaggccgacccataggggccctggccaggggagcaatcggaggacgaggcctacccataatccagagaggcttgcccagaggaggactacgtgggggacgtgccaccagaaccctacttaggggcgggatgtcactccgaggtcaaaacctgctccgaggtggacgagccgtagctccccgaatgggcttaagaagaggtggtgttcgaggtcgtggaggtcctgggagagggggcctagggcgtggagctatgggtcgtggcggaatcggtggtagaggtcggggtatgataggtcggggaagagggggctttggaggccgaggccgaggccgtggacgagggagaggtgcccttgctcgccctgtattgaccaaggagcagctggacaaccaattggatgcatatatgtcgaaaacaaaaggacacctggatgctgagttggatgcctacatggcgcagacagatcccgaaaccaatgattgaagcctgcccatcctcccatgagagactcttgttagtcaacacatctgtaaataaccttgagataacagatgagaagaaatctgattgatgctggatggacctatcacaataggctgtggacttacttgccaccagcttgtgcatttagtgtgttccttttactttttgatactgtgttgtatgaaacccttttgtcctttgatttggttttttgtttttgtttttttagggggg

SEQ ID NO: 4080 - DNA, 4596 bp, Homo Sapiens
  NM_015608
gcggagcctaggagtcagataccgcgagaagtagtctcccgaagaggttcggacaagcgcaggcgcactacaattcccgccctggccgcgaaggtggcacccgcagcgggaggcggggccgggccttcgggacaaagatcgcgagatttaatggcgagtcacagctacttcttcctggcagagaccggaagtgcggtccgcggagcgtctctggcgcttaccctgctttgggcctgcgttgctgctgctgctcctccgctcccccgtcgtatcgcctgccctggatcgaagtgatgggggatgccaaggaggccggagccgagggtccgccggccggggccgccgctcgaggagggctcagcctcctgtcccagggagaatccgaggaatcttctgcacagggatcagctttatttcttggaggcaatgaagtgaagagccgagctgtggtgaaatactcttctgcccctcctcgaacagcatttgcacgccttgaagagaaaacagacttgaaactcccacctgccaactggttacgagagagtgccaaactagggccagcaggaactaccattcttggcaacagcaagaaaagcaagccattttcaagctttggcatggcatatgactttattgattcagtgggaaatgatgtggatgttgtctctgactctgaaaacataaaaaaactcctgaaaattccctacagcaagtcgcacgtgagcatggcagtacaccgcataggaaggactctcttactagatgagctagatattcaagaactctttatgagatcgtctcagactggtgactggacatggttgaaagagttttatcaaagactcattgatcagaagtggcagaggaagaaaaagagcaaagagcactggtatcaaaaggcaattctttccaagtttttatattacagtatcaatggtgatggagccgctcagcctgtctcatccaccgcagaacagcaggaatcgtccagttcagatcagacaaatgattcggaaggggcttcatggcctgctcccttcgaaatgccttcttcagtttctgaagatcccagtgcttccagtcagggtcttaaaaatgattttgttcggaatattctatggacatttgaagatatccatatgttggtcggctccaacatgcccatatttggaggaggcagatacccagcagtcagcttacgtctcagggataacaacaaaccaattaatgtgctaactggaattgactattggttggacaacttgatatgcaatgtgccagagcttgtgatgtgttttcatgtaaatggaattgtacagaaatatgaaatgataaagacagaagaaattcccaatttggaaaattctaatttttctactaaagtcataaaagacattgcacagaatattttatcatttttgaaatctaattgtaccaaagaaggacatacctattggctctttaaagcaagtggcagcgatatagtgaagctctatgacctcactactctttgtgaagaaactgaagacaaataccaaaatccattcacaatgccggtagccattctcttgtacaaggttgcttgcaacatgatgatgaagaagaatcaaaataagaaacactatggaactattagaacattgcttcttaattgtctgaaattactggacaaaagtaggcatcctcaaattattgcttccgccaattacatgctttcagaactttttcaattggatgaacctaaaaaggaagaaaattcagaatctcctttaaatgagaattctgatgaaagttatagtgaagaggaggaagagatgcccgacagtgatgaaaatggatcctatagcaccagctctgatccatcagatgatagcaaagcagtagctataatcaagtctgttggagaactatcagtaccagaaaaatacaaatctattcatcaaatcagacccagttgtgcatttccagtttgccatgacacagaagagcgctgtagacttgtgcttagctatgttctagagggtttaaaatctgtcgatagcagcatcaaaaaagaaagcgaccttccagcagctgaccccagcactccaatcccgttaaaatatgaagatgaatcctcaagagggggtcccgaggggctagagaagcagatggccttgtttttggacaaaatgggctcccttcagaagggcaattattccagtcaatctggaatgatccctggctcttggcaacataaaatgaaacttcagctgattctcaagtcatcaaaggcctattatgttttgtccgatgctgccatgagtcttcagaaatacggaagagcattacgatacattaaattagctttgcaaagccatgatacttattgctgcctctgcaccaatatgctttccgaagtgctgttgtttctctctcaatatttgacactttgtggtgatatccaactaatgctggcccagaatgcaaataatagagcagcacaccttgaagagtttcattaccaaacaaaagaagaccaggagatcctgcatagccttcacagagagtccagttgccaaggatttgcatgggcaactgatttgtctacagacttagaaagtcaactctctgttagttgtaaatgttatgaggctgctaatgaaatcttgcagtttagtgacttgaaaagccaaaatccagaacactatgtacaagtattaaagagaatgggtaacattagaaatgaaattggtgtgttttacatgaatcaggctgctgcattacagagtgagagactagtgagcaaatctgtgtctgctgccgagcaacagttgtggaaaaaaagcttttcttgttttgaaaagggaattcacaactttgaatcaattgaggatgccaccaatgccgcccttttattatgtaacacgggaaggctcatgcggatttgtgcgcaggcccactgtggtgcaggggatgaactgaaacgtgaattttcaccagaagaaggcttgtattataataaggctattgattactatttgaaagcgctaaggtcattgggaacacgagacatacacccagctgtttgggattcagtgaactgggaattgtccactacttactttactatggcaactctacagcaagattatgctccgttatctagaaaagctcaggagcagattgagaaagaagtcagtgaggccatgatgaagtccctaaaatactgcgatgtggattcagtgtctgctcgacagcccctttgtcagtatcgagctgcaaccatccatcacaggctggcctccatgtaccacagctgtctgaggaatcaggttggtgatgaacaccttaggaaacaacaccgggtgctggcagatcttcattacagcaaggccgcaaagctgtttcagctgctgaaagatgctccctgcgaactgcttagagtacagctagagagagtagcatttgctgaatttcagatgaccagtcagaatagcaatgttggaaagttgaaaacactatctggggctcttgatataatggtgagaactgagcacgcattccagcttatccagaaggagcttatagaagaatttggccagcctaagagtggtgacgccgctgcagctgctgatgcttctcctagtctcaatcgagaagaagtgatgaaactcctcagtatatttgagtctcggttgtcatttcttctccttcagtccattaaactgctatcttcaactaaaaagaaaacaagcaataacatcgaagatgacacaattctcaaaaccaacaagcacatttactcccagcttttgagagcaactgcaaataaaaccgcgactcttctggaaagaatcaacgttatcgtccacctgctgggccagcttgccgccggcagtgcagcgagcagcaatgccgttcagtgactgcacagagccgtgtcccagacacgctgtcagtgccttcaacacggagccggtttgttcattcggtgctttgtttcattaaataatagggaaatatccatttaaaacaggtatatcagtggaaacacagagttattttaagtgacagacaaattacggttgagttctgtggcttcttcacttgaagtgctaacatcagaatcaaacttaaagcttccactatttatgtctttgagaagtatgtagtacctcggtattaacagacctgctgtgatgcagttacactttcacgtatttttgaagtatgtcaagctacacgggtctaagatatgattattttggataaaatgttactttggtcaagagaacttttatccagatgacattacaggttcaagtgggttaaggagacctcctgtacatctacagtgtttccttttaaattgtccagaaaaaaggtgtgttcttcataagcttcagtgcaggatttttcaaagacgagctgttgtgcaatttgctgtatttaatgcatgttctgaaaggattcacttttgactttatatgacagttgatcaagaacaggtactacccctttttttcatttcaaacttgaaactgtgaataaggtaagaaaactattttgaataaataaactatttatttaaaatgtcaaaaaaaaaaaaaaaaa

SEQ ID NO: 4081 - DNA, 2935 bp, Homo Sapiens
  NM_015627
ggagctggcgctgggaggggaggagcgcgcagcccgcgcgccgcagggccgggcggaaagtttttcctgacggagttttggctgcggcagcggcggcggcggccggagcgggccatggacgcgctcaagtcggcggggcgggcgctgatccggagccccagcttggccaagcagagctgggggggcggtggccggcaccgcaagctgcctgagaactggacagacacgcgggagacgctgctggaggggatgctgttcagcctcaagtacctgggcatgacgctagtggagcagcccaagggtgaggagctgtcggccgccgccatcaagaggatcgtggctacagctaaggccagtgggaagaagctgcagaaggtgactctgaaggtgtcgccacggggaattatcctgacagacaacctcaccaaccagctcattgagaacgtgtccatatacaggatctcctattgcacagcagacaagatgcacgacaaggtgtttgcatacatcgcccagagccagcacaaccagagcctcgagtgccacgccttcctctgcaccaagcggaagatggcacaggctgttaccctcaccgtagcccaggccttcaaagtcgcctttgagttttggcaggtgtccaaggaagagaaagagaagagggacaaagccagccaagagggaggggacgtcctgggggcccgccaagactgcaccccctccttgaagagcttggtcgccactgggaacctgctggacttagaggagacagctaaggccccgctgtccacggtcagcgccaacaccaccaacatggacgaggtgccgcggccacaagccttgagtggcagcagtgttgtctgggagctggatgatggcctggatgaagcgttttcgaggcttgcccagtctcggacaaaccctcaggtcctggacactggcctgacagcccaggacatgcattacgcccagtgcctctcgcctgtcgactgggacaagcctgacagcagcggcacagagcaggatgacctcttcagcttctgagggcccggggccagccggacacaagcggccctgacacgtgatggaccaaagccacctgctgcgggggagccagttctggggcccgcctgccacctctcccagccctcagcattgtcagcctgaagatcagagctgcagccagtcaggcaggggagagatttttcttttaagccctgctctttctctgagaaccaaaagatgccttgaatatttattcagtgacttctggcttatgctcagaagccagtctgcgtcaggcacgtctcctgctgcgtgacatgtgcagtgctgtaatcggctcccgcttgctctcctggagcaagctctgccctggctgtgggtatcaggactgtgaccaaagcatttctagtcccttctctctttctaaggacccaaatttccctgggggcatcctgcttcctgaaagctgttggatttcagtgatttttccccccaccccccagcacaggagagcacccacagccgcagaaggggaatgtgtcctcctgctctgcttcctcagggcccagcaggcgggggtttgagccctggaccccaggctcttagagactaaggggcagctcctgaccaaagacgatacagcttggcactttaaagcattaacagcaggtgtgaccctgagggctcctccatggtgctgcattgagtccagctttccttctgcccttcctccaggagaaggggcccaaggtccccgtggatggtctccacctgtgcttggaaccagtgtaactggctgctccctgctcccagggactgacacggggatcatctctgtgaccgccctccgtcgggcccctgcctgccttctcccctccacgcaaggctgtgctcttcctctggtttctgtgtgtccgtttgagtgtctgcgccccgcctccccatacttcctgggatgatgtgtgaaacctgacacctagatttatttggaaatattctatgaccactttacagatgaggaaacaggcctcaagcgtggaggggtagagtgaagagtagaacccaggtctgatgccaaagctgctttcttctctgcctcctcctcacgcaactcacacctccttttcttctagctttgttgtcctcccaggaaccaaaaaaccccagctattttctgaccaaaatgtgtttcataacaaaccatctggtgcctttccacacagaactggcaggagcctcgtgtcctgctagctgtctctcttgttgatttccgtgaaaatgcaagtgtttgaagtctgctcattccgagggtgaaacaaaatccaaccctgtcagaatcatgctgttctctttgctgacactgtgaccctgggtcgggacagaccagcagcaatctgtctttagaatcgctttccttcctccccttttgcccccgtggggctcccggcatcctgaaagccagcaaagcctccagcatcttttccatcctgaggtgcctcccagtggcctggcttgtcggagcaagtttcatcagccctagggaaaacacggccctcctgggaacctccttacctggagtaaccggacaccttagacggaggtgcctgagggtggggtgggatttgcagggtcattatcagaacatgaggataacttccttgcccctgctctgtagccacctccttggcaccggcctctatttgtcataaggcggcgtgggcgaggcctgacacaggccagccttggcacgaggggggccaggggttctgagaagcgctgccctgtgagagccacgctggccttcgtctccatctctggttgacgggctgtccgtgtgcctcctgtgtgtctgcagacaagtcttgctgtgctttatttgtgaaactttaatgaggaaaaaacaaataataaatgttctcgttttgaaactcaa

SEQ ID NO: 4082 - DNA, 2201 bp, Homo Sapiens
  NM_015629
tagtttcctgtttccggcttcgcttcggcccacccccacgtccaccccgaatccctgcttaaaggccttgctttcttgtctaacgccgcaaccagtcctctgagttgccaacgtctttcttcttgtctcgacgccccgtcgtccggccacagcgattctctgcttagcaggatcggtccacagcgggacgtgagtccctttcctcctcgcggcttaccgcctctctccgcctagtgccaggtgctaataaagttgttgtttcaaatgcggccaggaacatcgcgagcggggaccaatcagagagtagctttgcctctataacggcgcgagagtgagacgtcatcggtgagcgactaacgctagaaacagtggtgcgcggagaggagaggcctcgggatgtctctggcagatgagctcttagctgatctcgaagaggcagcagaagaggaggaaggaggaagctatggggaggaagaagaggagccagcgatcgaggatgtgcaggaggagacacagctggatctttccggggattcagtcaagaccatcgccaagctatgggatagtaagatgtttgctgagattatgatgaagattgaggagtatatcagcaagcaagccaaagcttcagaagtgatgggaccagtggaggccgcgcctgaataccgcgtcatcgtggatgccaacaacctgaccgtggagatcgaaaacgagctgaacatcatccataagttcatccgggataagtactcaaagagattccctgaactggagtccttggtccccaatgcactggattacatccgcacggtcaaggagctgggcaacagcctggacaagtgcaagaacaatgagaacctgcagcagatcctcaccaatgccaccatcatggtcgtcagcgtcaccgcctccaccacccaggggcagcagctgtcggaggaggagctggagcggctggaggaggcctgcgacatggcgctggagctgaacgcctccaagcaccgcatctacgagtatgtggagtcccggatgtccttcatcgcacccaacctgtccatcattatcggggcatccacggccgccaagatcatgggtgtggccggcggcctgaccaacctctccaagatgcccgcctgcaacatcatgctgctcggggcccagcgcaagacgctgtcgggcttctcgtctacctcagtgctgccccacaccggctacatctaccacagtgacatcgtgcagtccctgccaccggatctgcggcggaaagcggcccggctggtggccgccaagtgcacactggcagcccgtgtggacagtttccacgagagcacagaagggaaggtgggctacgaactgaaggatgagatcgagcgcaaattcgacaagtggcaggagccgccgcctgtgaagcaggtgaagccgctgcctgcgcccctggatggacagcggaagaagcgaggcggccgcaggtaccgcaagatgaaggagcggctggggctgacggagatccggaagcaggccaaccgtatgagcttcggagagatcgaggaggacgcctaccaggaggacctgggattcagcctgggccacctgggcaagtcgggcagtgggcgtgtgcggcagacacaggtaaacgaggccaccaaggccaggatctccaagacgctgcagcggaccctgcagaagcagagcgtcgtatatggcgggaagtccaccatccgcgaccgctcctcgggcacggcctccagcgtggccttcaccccactccagggcctggagattgtgaacccacaggcggcagagaagaaggtggctgaggccaaccagaagtatttctccagcatggctgagttcctcaaggtcaagggcgagaagagtggccttatgtccacctgaatgactgcgtgtgtccaaggtggcttcccactgaagggacacagaggtccagtccttctgaagggctaggatcgggttctggcagggagaacctgccctgccactggccccattgctgggactgcccagggaggaggccttggaagagtccggcctggcctcccccaggaccgagatcaccgcccagtatgggctagagcaggtcttcatcatgccttgtcttttttaactgagaaaggagattttttgaaaagagtacaattaaaaggacattgtcaagatctgtcaaaaaaaaaaaaaaaaaa

SEQ ID NO: 4083 - DNA, 3030 bp, Homo Sapiens
  NM_015633
agggacatagaagggccccgccctgccttctggggcaaagcggagagtggtcggttctgccccacagtaacgcgaggaaagaaatctcgcgaggctggagttctccgggagcgccggtcggaggcggtcggcggaggtgtctaccccgccggtgatggcgttgaacgccactggcttcccggccttccgtccgctgcctccgtccgattctgcgtctgcttgctgaggaggcggattaggggggcgcggagtctcttcccttgagtgcataggtcccggttggtagagggtttgagtccgcatcgccacagctgaaggctgcgagggactaagagcagaatatatctttagaaatgagttgcacaattgagaaggcacttgccgacgctaaagctcttgttgaaagattaagagatcatgacgatgcagcagaatctctgattgagcaaaccacagctctcaacaagcgagtagaagccatgaaacagtatcaggaagaaattcaagaacttaatgaagtcgcgagacatcggccacggtccacgttagttatgggaatccagcaagaaaacagacaaatcagagagttgcaacaagaaaacaaagaattacgtacatctctggaagaacatcagtcggccttggaacttataatgagcaagtaccgagaacaaatgtttagattgctaatggctagcaaaaaagatgatccgggtataataatgaagttaaaagagcagcactccaagattgacatggtacatcgtaacaagtccgaaggattcttccttgatgcatctcgacacatccttgaagcacctcaacatggactggagagaaggcacttggaagcaaatcagaatgaactgcaagcacatgttgaccagataactgaaatggcagcagtaatgaggaaagccattgaaattgacgagcaacagggttgcaaggaacaagaacgaatatttcaacttgaacaagaaaacaaaggcttgagagagatccttcaaataactcgagaatcatttttgaacctaaggaaagatgatgcgtcggaaagtacttctttgtcagcattagtgaccaacagtgatttgagtctgaggaagagctgaagagtttctgagtctgtgagcttcttacatggctccaaatggtcaaataagtgaatgaatgaatggacagaaaattcaatcctttatttttttctctgtaaatatgtacagtgcacgggctatgagatagcaacaaaaaatgcatagttaatggtcatagactttattccaaaacataattggaaaatagaaactgagccattgccaaatggtaaagaaatgaaaagttttcacagtgactactgaatataccaagagcttttggcagtactgctggctttctgggtgattaattaggtaaacttgaatattcccagtaaatgtttgagaatgcataaaattataccaatttaaaaatataaatttttgccactgttttgtgaacggaggatttgtacgctaaatttcatccttatttggcgtcaaagttgatgcaaagtttatgtaccatgagacttctagtgattgcctactttcacatttatttaaatttttgtgaaagaaaatacagttttaaaggctataggaatgtgttatatgtaccttaaacagataatttaattttagcaatttatcataactgatacttagctaacaattgtccataacttgtttaagtgtaagaaataccatttcaggaatgaaaaagaaggaatactactttctaagaaagaagatcttataatagacatatttagtaggttaaactactcctttgaaagaataagttttggttcaaagtcaataatgaagacgagatttgtttttctcttctctggctgatttttaaggatattatgtagttcatttagttaacagaattgaaatgtttgatatggcaagataggtatggtaatttcaaagtgaattgggaattcctctggctcatagaacccttttttttttcctttaagtattcttgagatacaaaaaaaaaaagtaaatacaatttcaaaaaaaaagttccggatctgtttttaagctccatctggtcctcataacctgcaagatttttcttaaaacctttcagctgaaagtgggggtaaaggtggagtaatctgtggatttgtttctgttgtcttttaaaatgtcaaatatataatatgtaatttttttaaaaaccaccagatacagaaatgtgctttaacatcagttgaaacctaaattttcttatgttgtggtgattgtattaaaaagggataaaagaagagtgtcaaacatggttaaatatattgtactcatttatgttgaatacgtattaaaattaagacaaatggaaaattatactttgagtatataatttgttaaatattactttatatggtaattttatgtataatttcatatattggtaaaattcaaaactacacttgagaatttttttatcttaagtttggggtgaatggggtggatgagactgattgaatagaaaagggctaatggcccaaacattatatagatttctttttttcagtcagaggccttatttgatattttataaataaatgacagtttttatttttaaactttttattgtttttgggaaagtattccttaatttaatgacacattcattcagatacttcttatccctgctaataaaggaaatctatttcaagctacaccattgagattaagtctgaggcagttcattgaggcagctctactataaaagcttacttgataaataattatttttgtaaacaagttgggttaacttattcttcgtctttttgcttggatatgaatttaaggtcttcatgtttaaagacatttactttgttatttagtgacacatttccatcctattttttttttttttttggttgttgttaaacagaaccttaagtttatgtttgaggtatgtactgcataggaacctattttattattaaagatgaatgattaaaattgg

SEQ ID NO: 4084 - DNA, 2548 bp, Homo Sapiens
  NM_015634
attccacagcggccgcaacgtgtcgagagccgtaagtaaagtgtcgcaaagcagaaggaaggcgggagtcccgactgcaaacattgaggaaagccaggcagtagaggccgctatggcgaacgttccgtgggcagaggtctgcgagaaattccaggcggcgctcgctctgtcgcgggtggaactgcataaaaatccggagaaggaaccatacaagtccaaatacagcgcccgggcgctactggaagaggtcaaggcgctgctcggccctgcgcctgaggacgaggatgagcggcctgaggccgaggacggcccgggtgccggtgaccacgccctggggctgccggctgaggtggtggagcccgaggggcccgtcgcccagcgagcggtgaggctggcagtcatcgagttccacctcggggtgaaccacatcgacacggaggagctgtcggcgggggaggagcacctggtgaaatgcctgcggctgctgcgcaggtaccggctctcgcacgactgcatctctctctgcatccaggcgcagaataacctgggtatcttgtggtctgaaagagaagaaattgaaactgcacaggcttacctagagtcatcagaagcactatataatcagtatatgaaagaggttgggagtcctcctcttgatcctactgagcgttttcttcctgaagaagagaaacttactgaacaagagagatcaaaaagatttgaaaaggtttatactcataacctatattacctagctcaagtctaccagcatctggaaatgtttgagaaggctgctcactattgccatagtacactaaaacgccagcttgagcacaatgcctaccatcctatagagtgggctatcaatgctgctaccttgtcacagttttacatcaataagctatgctttatggaggccaggcactgtttatcagctgctaatgtcatttttggtcaaactggaaagatctcagccacagaagacactcctgaagctgaaggagaagtgccagagctttatcatcaaagaaagggggaaatagcaaggtgctggatcaaatactgtttgactctcatgcagaatgcccaactctccatgcaggacaacataggagagcttgatcttgataaacagtctgaacttagagctttaaggaaaaaagaactagatgaggaggaaagcattcggaaaaaagctgtgcagtttggaaccggtgaactgtgtgatgccatctctgcagtagaagagaaagtgagctacttgagacctttagattttgaagaagccagagaacttttcttattgggtcagcactatgtctttgaggcaaaagagttctttcagattgatggttatgtcactgaccatattgaagttgtccaagaccacagtgctctgtttaaggtgcttgcattctttgaaactgacatggagagacggtgcaagatgcataaacgcagaatagccatgctagagcccctaactgtagacctgaatccacagtattatctgttggtcaacagacagatccagtttgaaattgcacatgcttactatgatatgatggatttgaaggttgccattgctgacaggctaagggatcctgattcacacattgtaaaaaaaataaataatcttaataagtcagcactgaagtactaccagctcttcttagactccctgagagacccaaataaagtattccctgagcatataggggaagatgttcttcgccctgccatgttagctaagtttcgagttgcccgtctctatggcaaaatcattactgcagatcccaagaaagagctggaaaatttggcaacatcattggaacattacaaatttattgttgattactgtgaaaagcatcctgaggccgcccaggaaatagaagttgagctagaacttagtaaagagatggttagtcttctcccaacaaaaatggagagattcagaaccaagatggccctgacttaatccttgtttttaaagaaaggaaatgtgcaatattgaagtgatctttttccctagtcagacaggcccaattccattgtgatgtttacctttatagccaggtgagtgcagtttgaacttgagatacagtcaactgagtgtttgctaggatcctaaggaacataaagttaattaaaaacttacacctaattatgtaaattgccttgttaaagacatgtgatttgtattttagatgcttgtttcctattaaaatacagacatttctaccctcagtttctaaatgtagactatttgttggctagtacttgatagattccttgtaagaaaaaatgctgggtaatgtacctggtaacaagcctgttaatatattaagattgaaaaagtaacttctatagttactccttctaaaatatttgacttcctaaattccccccacccaaaatctttcccttttgaaaatactaaaaactaagttatgttattataaagtgtaaaatggtttgtcttaattataggagaaaaaggccttgttagaaataaaataaactgacttatttcactaatgaaaacaaa

SEQ ID NO: 4085 - DNA, 1760 bp, Homo Sapiens
  NM_015636
gaaattgtagtccgattggggctgcgcgcttcgcttctgcggctcagcctccagcccaggtggcgctgtggaccctgcagccgcggagcgaggcagcggggcggctccgtgaccacggcgggcggagcctaggactgagggcgatggctgctgtggccgtggctgttcgcgaggactcgggatccgggatgaaggcggagcttccccctgggcctggggcagtggggagggaaatgaccaaagaagaaaagctgcagcttcggaaggaaaagaaacagcagaagaagaaacggaaggaagaaaagggggcagaaccagagactggctctgctgtatctgcagcccaatgtcaaggcccaaccagagaactgccagaatcgggcattcagttgggcactcctcgggagaaagttccagctggtcggagtaaggccgaacttcgggctgagcgtcgagccaagcaggaggccgagcgggccctgaaacaggcaagaaaaggggaacaaggaggaccacctcctaaggccagccccagcacagctggagaaaccccctcaggagtgaagcgtctccctgagtaccctcaggttgatgacctacttctgagaaggcttgttaaaaaaccagagcgtcaacaggttcctacacgaaaggattatggatccaaagtcagtctcttctctcacctaccccagtacagcagacaaaactctctgacccagtttatgagcatcccatcctctgtgatccacccagccatggtgcgactcggcctgcagtactcccagggcctggtcagtggctccaatgcccggtgtattgccctgcttcgtgccttgcagcaggtgattcaggattacacaacaccgcctaatgaagaactctccagggatctagtgaataaactaaaaccctacatgagcttcctgactcagtgccgtcccctgtcagcgagcatgcacaacgccatcaagttccttaacaaggaaatcaccagtgtgggcagttccaagcgggaagaggaggccaagtcagaacttcgagcagccattgatcggtatgtgcaagagaagattgtgctagcagctcaggcaatttcacgctttgcttaccagaagatcagtaatggagatgtgatcctggtatatggatgctcatctctggtatcacgaattcttcaggaggcttggacagagggccggcggtttcgggtggtagtggtggacagccggccatggctggaaggaaggcacacactacgttctctagtccatgctggtgtcccagcctcctacctgctgattcctgcagcctcctatgtgctcccagaggtttccaaggtgctattgggagctcatgcactcttggccaacgggtctgtgatgtcacgggtagggacagcacagttagccctggtggctcgagcccataatgtaccagtgctggtttgctgtgaaacatacaagttctgtgagcgtgtgcagactgatgcctttgtctctaatgagctagatgaccctgatgatctgcaatgtaagcggggagaacatgttgcgctggctaactggcagaaccacgcatccctacggttgttgaatctagtctatgatgtgactcccccagagcttgtggatctggtgatcacggagctggggatgatcccttgcagttctgtacctgttgttctacgagtcaagagcagtgaccagtgacgggggaaacacagggttaataaatgccatactccctaccctcagcaa

SEQ ID NO: 4086 - DNA, 2766 bp, Homo Sapiens
  NM_015641
ggccgcaggcccgctgcggcggactgggcggcggaagttcgacggcgccgggcgagtggctgttgagcggcgccgcgggagttccgcaggtttcccgtgttcgcagcggagccggaggccagctgaacccggccgtgggatcccggataggaggaggaggggacccataggacgcgttaacatggacctggaaaacaaagtgaagaagatgggcttaggtcacgagcaaggatttggagccccttgtttaaaatgcaaagaaaaatgtgaaggattcgaactgcacttctggagaaaaatatgtcgtaactgcaagtgtggccaagaagagcatgatgtcctcttgagcaatgaagaggatcgaaaagtgggaaaactttttgaagacaccaagtataccactctgattgcaaaactaaagtcagatggaattcccatgtataaacgcaatgttatgatattgacgaatccagttgctgccaagaagaatgtctccatcaatacagttacctatgagtgggctcctcctgtccagaatcaagcattggccaggcagtacatgcagatgctacccaaggaaaagcagccagtagcaggctcagagggggcacagtaccggaagaagcagctggcaaagcagctccctgcacatgaccaggacccttcaaagtgccatgagttgtctcccagagaggtgaaggagatggagcagtttgtgaagaaatataagagcgaagctctgggagtaggagatgtcaaacttccctgtgagatggatgcccaaggccccaaacaaatgaacattcctggaggggatagaagcaccccagcagcagtgggggccatggaggacaaatctgctgagcacaaaagaactcaatattcctgctattgctgcaaactgagtatgaaagaaggtgacccagccatctatgccgaaagggctggctatgataaactgtggcacccagcttgttttgtctgcagcacctgccatgaactcctggttgacatgatttatttttggaagaatgagaagctatactgtggcagacattactgtgacagcgagaaaccccgatgtgctggctgtgacgagctgatattcagcaatgagtatacccaggcagaaaaccagaattggcacctgaaacacttctgctgctttgactgtgatagcattctagctggggagatatacgtgatggtcaatgacaagcccgtgtgcaagccctgctatgtgaagaatcacgctgtggtgtgtcaaggatgccacaatgccatcgacccagaagtgcagcgggtgacctataacaatttcagctggcatgcatccacagagtgctttctgtgctcttgctgcagcaaatgcctcattgggcagaagttcatgccagtagaagggatggttttctgttcagtggaatgtaagaagaggatgtcttaggaggagggcacccagaagtatcgagccatagctatccaaagtggtctgcatttctactgtaaaatgcaatttgaaaaaaataaaacgcaaaaaaagaaactgtaaaggaaaccaagagattttgtttaatttttttggccattttttcttcatcaattttttttcggtctcaacttttaaacttggtttaagcatttgatttgtaaaacagtaaataattgtatctttccatagcttttcaaatgtgaaatcatttttggaagcttggatctcattaaacttcatgtctctattccatttgtgccacacacttaaaagttagtgtactgaatggaaagatgagcattcctagttctacacttcttttttccccctcatgtgtaaaatgaaaagaaaactaaatttgccctaataccaaggcgctacgtttattgcctcgtcttattcactgacctttgtaatgatacacagtgaattctttttgacaaagagaaatgcagtgtagtatgcagagctgctgttttaatgcctatgcatttactctttcctgatttaggcagaggtggcattttctttattgcatttctctatttttttaatgtaccctaccttcagtattctctttgtaagttggtgacttgcatctgtggccttgaatattttattatcacatgtggcataacagtatccacactttttagttctttatttttttttttttattttgagcaattctcctgcctcagcctcccaaatagctgggattacaggtgcatgccaccacacccagctaatttttgtatttttagtagagacaggttttcaccatgttagccaggctggtctcaaactcctgacctcagatgatccgcctgccttggcctcccaaagtgctgggattacaggtgtgggagccaccatgcctgacccacacactttttacttgtatagatgatttttggcttggacataaaagccaagccacccatttgcttttaatccaaagaacatgtatagtttttgtacccagagactatgatttatattgattgcacttgcctgccatgatttagataagattttttttgcatggtttttattctttcctaatggatcctgttttataatacttccaagcctgtccatggatatatcaaatgtcttcacttgtatattttcatggctaggtatttctaatgtttattcttccctgtgtacttctacacatagctatgcactatgaaaattaaatggaatgaatgatatgtatattactcaaaataaagtttctttcactttaaaaaaaaaaaaaaaaaaaa

SEQ ID NO: 4087 - DNA, 3541 bp, Homo Sapiens
  NM_015642
gaagaagtaggggcggggggaagtttaggagttgaggaaagaagattaaagagcgcgaggagacaaataaaaagaagtgttaagaattgcctttgggactctgaaggctgaagaattgatgaattgcaagtttgtgccccatagctgcacagactgcctgaagttacatttagagactgaaatcactgcaccttaaaaacaaaagattgagctgcactgtattcctaatgtttcatcattactaacaggatattcctcatgacattgctgtctgatctttgaccatcagtctgtgacctgccccttctctttacatgcagccgctctctgctccctgccccaatgaacatctgcactaggcccaagccttggagtaatttacctgaagagtgacaccattgattttgaaactactgaagaaacccaagacagctgaaaaccagaaggcatctgaggagaatgagattactcagccgggtggatccagcgccaagccgggccttccctgcctgaactttgaagctgttttgtctccagacccagccctcatccactcaacacattcactgacaaactctcacgctcacaccgggtcatctgattgtgacatcagttgcaaggggatgaccgagcgcattcacagcatcaaccttcacaacttcagcaattccgtgctcgagaccctcaacgagcagcgcaaccgtggccacttctgtgacgtaacggtgcgcatccacgggagcatgctgcgcgcacaccgctgcgtgctggcagccggcagccccttcttccaggacaaactgctgcttggctacagcgacatcgagatcccgtcggtggtgtcagtgcagtcagtgcaaaagctcattgacttcatgtacagcggcgtgctacgggtctcgcagtcggaagctctgcagatcctcacggccgccagcatcctgcagatcaaaacagtcatcgacgagtgcacgcgcatcgtgtcacagaacgtgggcgatgtgttcccggggatccaggactcgggccaggacacgccgcggggcactcccgagtcaggcacgtcaggccagagcagcgacacggagtcgggctacctgcagagccacccacagcacagcgtggacaggatctactcggcactctacgcgtgctccatgcagaatggcagcggcgagcgctctttttacagcggcgcagtggtcagccaccacgagactgcgctcggcctgccccgcgaccaccacatggaagaccccagctggatcacacgcatccatgagcgctcgcagcagatggagcgctacctgtccaccacccccgagaccacgcactgccgcaagcagccccggcctgtgcgcatccagaccctagtgggcaacatccacatcaagcaggagatggaggacgattacgactactacgggcagcaaagggtgcagatcctggaacgcaacgaatccgaggagtgcacggaagacacagaccaggccgagggcaccgagagtgagcccaaaggtgaaagcttcgactcgggcgtcagctcctccataggcaccgagcctgactcggtggagcagcagtttgggcctggggcggcgcgggacagccaggctgaacccacccaacccgagcaggctgcagaagcccccgctgagggtggtccgcagacaaaccagctagaaacaggtgcttcctctccggagagaagcaatgaagtggagatggacagcactgttatcactgtcagcaacagctccgacaagagcgtcctacaacagccttcggtcaacacgtccatcgggcagccattgccaagtacccagctctacttacgccagacagaaaccctcaccagcaacctgaggatgcctctgaccttgaccagcaacacgcaggtcattggcacagctggcaacacctacctgccagccctcttcactacccagcccgcgggcagtggccccaagcctttcctcttcagcctgccacagcccctggcaggccagcagacccagtttgtgacagtgtcccagcccggtctgtcgacctttactgcacagctgccagcgccacagcccctggcctcatccgcaggccacagcacagccagtgggcaaggcgaaaaaaagccttatgagtgcactctctgcaacaagactttcaccgccaaacagaactacgtcaagcacatgttcgtacacacaggtgagaagccccaccaatgcagcatctgttggcgctccttctccttaaaggattaccttatcaagcacatggtgacacacacaggagtgagggcataccagtgtagtatctgcaacaagcgcttcacccagaagagctccctcaacgtgcacatgcgcctccaccggggagagaagtcctacgagtgctacatctgcaaaaagaagttctctcacaagaccctcctggagcgacacgtggccctgcacagtgccagcaatgggaccccccctgcaggcacacccccaggtgcccgcgctggccccccaggcgtggtggcctgcacggaggggaccacttacgtctgctccgtctgcccagcaaagtttgaccaaatcgagcagttcaacgaccacatgaggatgcatgtgtctgacggataagtagtatctttctctctttcttatgaacaaaacaaaacaacaacaaaaaacaaacaaacaaaaaagctatggcactagaatttaagaaatgttttggtttcatttttactttctgtttttgtttttgtttcgtttcattttgtactacatgaagaactgttttttgcctgctggtacattacatttccggaggcttgggtgaataatagttttcccagtctccctcggatggtggccttaaggcctggtagtgcttcaagaggtccactggttggatctctagctactggcctctaaatacaacccttctttacaaaaaaatcttttaaaaaaaagtaaaaaaaaaaaaaaaatttccacttgtgaagagcactacaaaaaatatataacaaaatctaaaaggcctactgtctttaagtacaccgcttgcagtgtttcagtggacattttcacaattctggccgcttggacttcacagtaaccagttaaaactgtggaatatcacttctggttgaaaacccagaggaaaggccctgctgttttccacctaccacgttgtctgatttcataaaagggctgtgggggtgggaagggcagtgggttcggtggtgtgggaaagaaagacgaatggcaggcttcttccccagattctgcccgggtccacacaccctggcccaccttctccatatccccctcttgcagcagaagccaggaagacttggacaagcaacaagcaacagtggctatcgtatttattcagtgtcttcgctgagccacagcctcagcacaatcaagagggactttcatgaaaggcaggaatgcagataaaacaaagatatcagaaatttgcacctatgtttctaggtacaagagaaggattatttccaacaatctttgcaaaaaaaaaaaaa

SEQ ID NO: 4088 - DNA, 3454 bp, Homo Sapiens
  NM_015644
agtgctctcttccgccttcagtgccctgctcatcaagggtctgggtttcccggtcctctggcgaggatcctccaaggcgtctcacatgaaccggctcagaaacgccaaaatctacgtggagagagctgtcaagaagaagatctttacaatccaaggctgctacccggtgatccggtgtctcttgcgccggaggggctgggtggagaagaagatggtccatcgctcaggccccaccctgctgccaccccagaaggatctggatagctcagcgatgggtgacagtgacaccactgaggatgaggatgaagatgaggacgaggagttccagccatcacagctgttcgacttcgatgatttactgaaatttgatgacctagatggaacacatgctctgatgtcccgcatggtccagaatgagatcccctacttcatctggaccactcggcgggatgtgctcgactgtcgcttcctctccaaggatcagatgataaaccactacgcccgggctggctcctttaccacaaaggtgggtctatgtctcaatctccggaatttgccgtggtttgatgaggttgatgccaactccttcttcccacgctgctactgcctgggggctgaggatgacaaaaaagccttcatagaggacttctggctgactgctgcccgcaacgttctcaagctggtggtgaagtctgagtggaagtcataccctattcaggcagtagaggaagaggcctcaggagacaagcagcccaagaaacaggagaaaaacccagtgttggtgtccccagagtttgtggatgaagctctgtgtgcgtgcgaggagtaccttagcaacttggcccacatggacatcgacaaggacctggaggccccgctgtacctcacccccgagggctggtccctcttcctccagcgctactaccaagtggtccacgaaggggcagaactcaggcacctcgacactcaggtccagcgctgtgaggacatcctgcagcagctgcaggccgtggtaccccagatagacatggaaggggatcgcaacatctggatcgtgaagccaggagccaagtcccgcggacgaggcatcatgtgcatggaccacctggaggagatgctgaagctggtgaacggcaaccccgtggtgatgaaggacggcaagtgggtggtgcagaagtatattgagcggcccctcctcatctttggcaccaagtttgacctcagacagtggttcctggtaactgactggaacccacttaccgtgtggttctaccgcgacagctatatccgcttttccacgcagcccttctccctgaagaacctggacaactcagtgcacctgtgcaacaactccatccagaagcacctggagaactcatgccatcggcatccactgcttccgccagacaacatgtggtctagccagaggttccaggcccacctgcaggagatgggtgccccaaatgcttggtccaccatcatcgtgcctggcatgaaggatgctgtgatccacgcacttcagacctcccaggacaccgtgcagtgtcggaaggccagctttgagctctatggcgctgacttcgtgttcggggaggacttccagccctggctgattgagatcaacgccagccccacgatggcaccctccacagcagtcactgcccggctctgtgctggcgtgcaagctgacaccctgcgcgtggtcattgaccggatgctggaccgcaactgtgacacaggagcctttgagctcatctataagcagcccgtcaccacttccccagcctccacaccaaggcccagctgccttctccccatgtactccgacaccagggccaggtcctcagacgacagcacagcaagctggtgggcactaaggccctgtcgaccacaggcaaggccttgaggactctacccacggctaaggtcttcatttccctcccaccgaaccttgatttcaaggtggcacccagcatcctgaagccaagaaaggtgggcctcgacctgtgactcacacccagtggacagtgctgagcacggggtcagggctggagggcacaggcagagggcagctcccaggctggctggcaccccaagggaagagctggtctccctcagaagccccttcctccacagacttctgatcatctccctcttctcccctcctttcacaccgaggctcctgctctcctgtgcctccgaggcccccagctggaagtgccttgttgcctctgccctttgaagtcggaacaattcctagcacctgtcggaaggtcaaggccaaaggcaaattcaaggccagactgtgacaaacccagggctgaggcctgccccatgaagaggctgagccccctgaaacccctgccccttgttggtacattccagaggcgcaggggcctgggggatatgaagctagggaagcccctgcttcgattccccactgcccttgtcctggatccaacaccaaataaaaagaaacaagtgaagtatttggggcttgactccattgctgttggagggtcaagagtggatggggcgaggccgtgtaccccagggtccacagcaagagcctgaggccatcagcagctcctccgtgcagcgaggcccagaattcccacctaaggacagacatggggcttcctatttagggactcccccagcatctccgatccaggggtggggagcgtgagccttcactttacagatgaagaaactgagtctgaaagaggaggcatggcttacccaagatcacgtggcagtgagtcgacgcagggacatattgccagaactgccgagcactgggagccccccaaccccagagaacaagccaagctagcagaatgacacctaccgggcataggaacgttaatgccatgagacaggggaaggaattggccttgcctaaacctcagcccttctgcagagggcatgggtctatcccttcttcagcaaggggccaaggtcacctaaaaatgaaacatccaataagccacacccacctgaagaaaagtgtggcactgcttagttgtagtgggttgaactgtggtcccctgaaaagagatgtctacttggaccctgtgaatgtgaccttatgtgggaaaagagtctttgtagctgggtatggtggctcacacctgttatcccagcactttgagaggccaaggcaggagatcgcttgagcccgcaagttcaagaccagtctgggcaacatggtgaaaccgtttctacagaaaattagctgggtgtggtggcacacacctgtagtcctagctactcgggaggcctaggtgggaggattacctgagcctgggaagatcaaaactgtggtgagctgtgatcacgccactgcgctctgagcctgggagacagagtgaaaccctaaatcaaaaaaaaaaaaaaaggtctttgcagatgtaaataaatttaagatcttaaatgagaaaaaaaaaaaaaa

SEQ ID NO: 4089 - DNA, 4287 bp, Homo Sapiens
  NM_015651
gaaaaagatggcgccccgcgcccggggggccccttcctgagcgccccggcccctccctccgccgcctccccctcctccccgcggcgcccccgccccgccccgcccccgccgagaccccgaccccggccccacgggcggacactcggccgggcagccgcgggccgagcgcagccgcctccgccaccgatgcgcctggtggccagactccaagtgggaccggcggacacgcagcctcgcgtgtcaggggaagctgatggagaatcgagctctggatccagggactcgggactcctatggtgccaccagccacctccccaacaagggggccctggcgaaggtcaagaacaacttcaaagacttgatgtccaaactgacggagggccagtatgtgctgtgccggtggacagatggcctgtactacctcgggaagatcaagagggtcagcagctctaagcaaagctgcctcgtgactttcgaagataattccaaatactgggtcctatggaaggacatacagcatgccggtgttccaggagaggagcccaagtgcaacatctgcctagggaagacatcagggccgctgaatgagatcctcatctgcgggaagtgtggcctgggttaccaccagcagtgccacatccccatagcgggcagtgctgaccagcccctgctcacaccttggttctgccgacgctgcatcttcgcactggctgtgcggaaaggcggcgcgctgaagaagggcgccatcgccaggacgctgcaggccgtgaagatggtgctgtcctaccagcccgaggagctcgagtgggactcgccccatcgcaccaaccagcagcaatgctactgctactgcggcgggcccggagaatggtacctgcggatgctgcaatgttaccggtgcaggcagtggttccacgaggcctgcacccagtgcctcaatgagcccatgatgtttggagaccggttttacctgttcttctgctccgtgtgtaaccagggcccagagtacatcgagaggctgcccctgcgatgggtggatgtggttcacctggccctctataatctgggggtacagagcaagaagaagtactttgactttgaggagattctggcctttgtcaaccaccactgggagctcctgcagcttggcaagctcaccagcaccccagtgacagatcgaggaccacatctcctcaacgctctgaacagttataaaagccggttcctctgcggcaaggagatcaagaagaagaagtgcatcttccgcctgcgcatccgcgtcccacccaacccgccagggaagctgctgcctgacaaaggactgctgccaaatgagaacagcgcctcctctgagctgcgtaagagaggaaagagcaagcctggtttgttgcctcacgaattccagcagcagaaaaggcgagtttatagaagaaaaagatcaaagtttttgctggaagatgctattcccagtagtgacttcacctcagcctggagcaccaaccaccacctggctagcatatttgacttcacgctggatgaaattcaaagtttaaaaagtgccagctcaggccagaccttcttctcagatgtcgactccaccgacgctgccagcacctctggctctgcctccaccagcctctcctatgactccagatggacagtgggcagccgaaagaggaagctggcagccaaggcatacatgcccctgcgggcaaagcggtgggcagctgagctggatggacgctgcccctcggacagcagtgcagagggggcttcagtccccgagcggccagacgaaggcattgacagccacacatttgagagcatcagtgaagatgactcatccctgtcccacctcaagtcatctatcaccaactactttggtgcagctgggcggttggcctgtggggagaagtaccaggtgttggctcggagggtcacacctgagggcaaggttcagtacctggtggagtgggaagggaccaccccttactgactagcccccgggggtgccaggggtcctgaaaaccaaaggaggagcagcagaagccataggctccccagctttctccaggctggggtgggagaaggaagcaggacagagctgcaagtgcctggcagaatgccctgcctgcctgcctgccaggccaaggcctgcgtctctctgctgtaccagctctgttccagggcctcctcaggctcgttacccctgtgcctgtgtctctacacactccacaccccctcaaactctgtttatctgttctctgaccttgtgtcccctgcgctgggacccttcctcctgaggcccaggtctttgtccccagttgtgtgccttgacctctctcgcccctttctgggtgtgttcgcacatcctgtgtgtgcacagctgtccctccactggatccccttcacacgtgacccgtggggcagccagtcctcccagggactacataacaggcacctttgagagagcatgggagaaggtggataagaggatgctgctcagtgcttttctcttccactttcctgccactccccactaccctcggagagaggtggtgggatgggagagagcccctgtgaaagcctgtgaggatctgaagagtaaagggctgggtctgcctcagaaggcaccagcaccagggcccaggtattaaggctgagagtgaaggctgccaatgtcagctttggaggtcccagaagtcttctgttctctggcctcaccccctcagtcgccatagagctgggcctggccttgctggaatggaggcatccttccaaacctgggggacgggggtggggggtggtagtggtgggagggaaaccatgtcttgctaaacctgtttctggtgcctcccatccccagacccaccagacaccacacagcagacaatacacacccactcgcacaagcttccatccacatgtgttgtactttcagctctaggcatgcagacaaccccacacggccacaccaccacatgcccaagtgtacacacacagagccacaccgtccctctgggcctgctggctcctcccttggctttcccttggcccacttccagggcccaggtgctgcaactaaatgtgaaagctcagtggccgctccttctttcagcccatcaaccagcattggtcccatagggaagcacaggggactcaccctctttcatatcccttgccctgccctgaaatggacaatcactttttgggataggttgaaatttttaaagagcctgcatcatttggttccctcaaagggaagcccttgccagtgggggtttgaaagagaatttttggaaccaacattcaaattctgcctcatctggagggaaaccaaaattgggagggggaagaggacccctgatgttttgctgcttccagagatattagaaactgactcacttgattggaaaatggacaaaagtgccttgacgtggagggtgggcaccagatggggaccagccttgccaactgctgctgtggcctccagcttggctggttttgcaggccgccagcaggaaggcgaaggtggtagtacagcaagaggcactggcggggcagcaggcctgcaggagctgtttttccattgctaggcctgacccctctctacctgtgagcgttcagggggtccctgagatagtttagatgcccccccatcttagacctcagctcccacagtgccttttaagggggacctcacctcctgtgcacagcccacccactttcctctgcttccctggcacagcccaggcatagacgagctggcgttggacccagttcttcccccttttcagccccacagctgctgccacaggggccaactagggccaggtggaaggggagctgagaagccaacccctagcccaggggtgctgtgggaactgggatccaatttgtagcttcctgcctggcttcagagagcccagcaaccttctaggcctgctttccagacttctgagatagcctgggatgagcaatcctgttatagtacatctggaccttccctacctgggctctggggaggctgtgggcctggagagggaaaaggagggagggggtgtctgcaccacctgggaagatagcacaaggcctaatgaggtcaccctgactccccaccccagcatttcattcataccagataatagctgcattactgccaactgaccttataaccctctgcaccttcaaaaagattcatggtttttaattgctgcttttaataacatttgttaaagttataattaatgtgtctgatttatgatttaaaacctccctttgaacaat

SEQ ID NO: 4090 - DNA, 4565 bp, Homo Sapiens
  NM_015652
attgttcctcagtgaacttccaccacatccctaaaatcttggaggggcagaccactggacaagagcaagacacaaatgtgaacatatgtgaggatggtaaagaccatatgcagagttcagctttagtagaaagtctaattacagtaaaaatggcagctgagaatagtgaggaaggcaatacctgtattattcctcaaagaaatttgttcaaagctttatcagaagaggcttggaactcagggtttatggggaactcatctagaactgctgacaaagagaatactttacagtgtccaaaaacacctttgcgccaggatttagaggcaaatgaacaagatgcaaggccaaagcaagagaaccatcttcactctctgggaagaaataaggtgggttaccatttacatcccagtgataagggccagtttgatcattccaaagatggttggttaggccccggccctatgccagctgtacacaaagcggcaaatggacactcaagaaccaagatgatatcaacctccatcaagacagctcggaaaagtaaaagggcatcagggctgaggataaatgattatgataaccagtgtgatgttgtttatatcagtcaaccaataacagaatgccactttgagaatcaaaaatcaatattatcttctcggaaaacagccagaaagagtactcgaggatactttttcaatggtgactgttgtgagctgccaactgttcgtacactggccagaaatttacactcccaggaaaaagcaagctgctcagcattggcatcagaggcagttttcactcctaagcagacccttacaattccagcccctagacatacagtagatgtgcagcttcccagagaagacaaccctgaagaacctagcaaggaaatcacctctcacgaggaaggaggtggagacgtttcacctcgaaaagaacctcaagagcctgaggtttgccccacaaagattaagccgaacctgagcagctcccctaggtcagaggaaacgacagcctccagcctggtgtggcctctccctgctcaccttcctgaagaggacctgccagaaggtggctccacagtctcagctcccacagcaagtgggatgtcttctcctgaacacaaccaaccaccagttgcactgttggatacggaggagatgagtgtaccccaggactgtcacctccttccctccactgaaagcttttccgggggagtcagtgaagatgtcatttctaggcctcattctcctcctgaaatagtcagtagagaagaaagtcctcagtgctcagaaaatcagagttccccaatgggcttggagccccccatgagtctgggaaaggctgaggacaaccaaagcatcagtgctgaggttgagtctggagacacccaggagctaaatgtcgacccactcttgaaggaaagcagcacttttactgatgaaaaccccagtgaaactgaggaaagtgaggcagcaggtggtataggaaaattagagggagaggacggtgatgtaaaatgcctgtcagaaaaagacacgtatgatacaagcattgactcactcgaagagaatttggacaagaagaaaaaaggtaaaaaattccctgaggcctctgataggtgcctaagaagtcaactttcggattcttcctctgctgacagatgcctaagaaatcagagttcagattcttcctcagcttgtcttgaaatcaaagttcctaaaaatcctagtgcaaaacgttcaaaaaaagaagggcaccctggtgggacaacacctaagggccttctacctgacagtttccacacggaaactctggaggacacagaaaagccaagtgtcaatgaacgcccctctgagaaagatgctgagcaggagggcgaaggcggggggatcatcaccaggcagactttgaaaaacatgctggacaaagaagtcaaggagttacgaggagagattttccccagcagggaccccataaccacagctggacagccactgcctggagagagattggaaatctatgttcagtctaaaatggatgagaagaatgctcatatcccctcagaaagtattgcttgtaagagggacccagaacaggcaaaagaagagccagggcatattcccacacagcatgtggaggaggctgtgaatgaggtagacaacgaaaacacccagcagaaagatgatgagagtgatgccccatgcagctctcttgggttgtcgagtagtggaagtggtgatgctgctagggcaccaaaatcggtgccaaggcctaaaagattgacctcttcaacctacaacctaagacacgctcattctctgggctccttggatgcttcaaaagtgacttcagaaaaggaagctgcacaagtaaaccccataatgccaaaggaaaatggagcttcagagagtggagaccccctagatgaggacgatgttgacaccgtggtagatgaacagccaaagtttatggaatggtgtgctgaggaggagaaccaagagctcatcgccaacttcaatgcccagtacatgaaagttcagaagggctggatccagttggagaaagaaggacagccaacaccaagagcaaggaacaaatcagataaactgaaagagatttggaaaagcaagaaaaggtcacggaaatgtaggagttcattggagagtcagaagtgttctcctgttcagatgctctttatgacaaactttaaattatctaatgtttgtaaatggttcttagagacaactgaaacccggtctctagtcattgtgaagaagctcaatactcgccttccaggagacgttccccctgtcaagcatcctcttcagaaatacgctccttccagcctatatcccagttcactacaggctgagcgcttgaaaaagcacttgaagaaatttcctggagctacccctgctaagaataattggaaaatgcagaagctctgggccaaatttcgagagaatcctgatcaagtggagccagaagatggcagtgatgtcagccccggccctaattctgaagacagcatagaggaagtcaaggaagatagaaacagtcatcctccagcaaacctgcccactccagccagtacccggattcttagaaaatattccaatattcgaggaaagctcagagcccagcaacgtttaatcaagaatgagaaaatggaatgcccagatgctctggctgtggaaagtaagccaagtcgtaagagcgtatgcatcaaccctctgatgtcccccaagcttgccctgcaagtggatgcagatgggtttcctgttaagcccaagagtactgaaggaatgaagggaaggaaggggaagcaggtgtctgaaatcttgcctaaagcagaagttcagagtaaacgcaagagaacagaaggcagcagccctccagatagtaagaacaaggggcctacggtgaaagccagcaaagaaaagcatgctgatggagccaccaaaacccctgctgccaagaggccagctgcaagggacagaagcagccaaccccccaaaaagacgtctttgaaagagaataaagtgaagatccctaaaaagtccgctgggaagagctgccctccctccaggaaagaaaaagagaatacaaacaaaaggccttcccagtctattgcctcggaaacactgacgaaacctgcaaaacagaagggggccggtgaatcctcttcaaggcctcagaaagccacgaataggaagcagagtagtggaaagactcgggccagaccctcaacgaaaaccccagagagcagtgcagctcagagaaagcgaaagctgaaggcaaagctggactgttcgcacagcaaacggaggcggctggatgcaaagtgattggaaagatggtagccaagagtaaaactgttctatagaagtaaccttttattttgcattaactaaatctgcttttataagcttatcaagcctttcaaatttacagttaatggagaacaccgtaatttgagatgtcagaaaatgcatctcagatggagaagggaacttgcagagtccttctctgaggctaagggaagttatatattatattctggttgttccttgggttttaaacttggaaccaagcagttttcgtttttaaaagtacagtgccttatttatcctttttgtttttaaatttacaaaagctaaaaagctgatctatgtgattaaaggcttgtattttatacttgatgcacaagcacttgtactgtagccgagaagaccaccatcatgcacataaaaggagcttttcagcagccaccctgcagcatctgcccacgaacagatgcccttctttgcaaaccccagcagtgaacttccctctctgtcttgtttgtttgtttagatgatgtttgaaagctaaaccaaatcattttatggtatgcagaggatttataattataaaagattactatttctgttacccccttttaaaaaagatcatgttcattgttggtccctcctctcacctttgatgttttgtcatttgagagcatgtattctaaattatgtgcccatgggacaagagataaaaaaaaaaaaaaaaaaaaa

SEQ ID NO: 4091 - DNA, 1943 bp, Homo Sapiens
  NM_015654
gggaacgtggctggttggaggaggtagatcaccctttctgcgggggacgatttcgtcggtggtaggctgctaccatgaggttgaatcagaacaccttgctgctggggaagaaggtggtccttgtaccctacacctcggagcatgtgcccagcaggtaccacgagtggatgaaatcagaggagctgcagcgtttgacagcctcggagccgctgaccctggagcaggagtatgccatgcagtgcagctggcaggaagatgcagacaagtgtaccttcattgtgctggatgccgagaagtggcaggcccagccaggcgccaccgaagagagctgcatggtgggagatgtgaacctcttcctcacagatctagaagacctcaccttgggggagatcgaggtcatgattgcagagcccagctgcaggggtaagggccttggcactgaggccgttctcgcgatgctgtcttacggagtgaccacgctaggtctgaccaagtttgaggctaaaattgggcaaggaaatgaaccaagcatccggatgttccagaaacttcactttgagcaggtggctacgagcagtgtttttcaggaggtgaccctcagactgacagtgagtgagtccgagcatcagtggcttctggagcagaccagccacgtggaagagaagccttacagagatgggtcggcagagccctgctgatggctgggccttgtgggcagccactctgtgtgagcagggtgttgggcccatacacttcaaagaccagagccctgcactgggagagtgctcctggcccaggctgggaatcacctttcgaggcccttcagactctggcggggcttgctgtggcctccctccagctagtggtgtggctgagcagactccagggccagggccagttcccttctcccctcccggccaaacccagacccagactctaggaagctggaatggagggcagggatccatgggagatgtcgggatgaaggtgggagctggaggtgcagggggacctggaacatggatgggagtggacaggcctttctccttagaggccagaggtgctgccctggctgggagtgaagctccaggcactaccagctttcctgattttcccgtttggtccatgtgaagagctaccacgagccccagcctcacagtgtccactcaagggcagcttggtcctcttgtcctgcagaggcaggctggtgtgaccctgggaacttgacccgggaacaacaggtggtccagagtgagtgtggcctggcccctcaacctagtgtccgtcctcctctctcctggagccagtcttgagtttaaaggcattagtgttagatacagctccttgtggctggaaaacacccctctgctgataaagctcagggggcactgaggaagcagaggccccttgggggtgccctcctgaagagagcgtcaggccatcagctctgtccctctggtgctcccacgtctgttcctcaccctccatctctgggagcagctgcacctgactggccacgcgggggcagtggaggcacaggctcagggtggccgggctacctggcaccctatggcttacaaagtagagttggcccagtttccttccacctgaggggagcactctgactcctaacagtcttccttgccctgccatcatctggggtggctggctgtcaagaaaggccgggcatgctttctaaacacagccacaggaggcttgtagggcatcttccaggtggggaaacagtcttagataagtaaggtgacttgcctaaggcctcccagcacccttgatcttggagtctcacagcagactgcatgtgaacaactggaaccgaaaacatgcctcagtataaaacaaacattataaaacgaaaaaaaaaaaaaaaaaaaaaaaaaaaaaaaaaaaaaaaaaaaaaaaaaaaaaaaaaaaaaaaaaaaaaa

SEQ ID NO: 4092 - DNA, 3264 bp, Homo Sapiens
  NM_015655
gggcgtcagcgagccgtgagatgcgtggtccaccatcggtgacctcaccgcctcggttcgccctcagccgccccgattggccatctgcaagcttcccttctccgtggagagcaggaagacagtcatgggacctcagggagccaggagacaggctttcttggcatttggggatgtcactgtggatttcacccagaaggaatggaggctgctgagccctgctcagagggccctgtacagggaggtgacactggagaactacagccacctggtctcactaggaattctccattctaaaccagaactcatcaggcggctagagcaaggggaagtgccctggggagaagagagaagacgccggccaggcccctgtgcaggaatatatgcagaacatgtcctgcggcccaagaatcttggacttgcacatcagaggcaacagcaactacaattttctgatcaaagcttccagagtgacacagctgaaggtcaagagaaagaaaaaagcactaagcccatggcattttccagcccacccctaagacatgcagtaagctcaaggaggaggaacagtgtagtggaaatagagtctagtcaaggccagagggaaaatcctacagaaatagacaaagtattgaaaggaatagaaaattcaagatggggagcattcaagtgtgcagagcgtgggcaagacttcagccggaagatgatggtaatcatacacaaaaaagcacattccaggcagaaactttttacatgcagggagtgtcaccagggctttagagatgagtcagcattgctcttgcaccagaacacacacacaggagagaagtcctatgtgtgcagtgtgtgtgggcgaggcttcagcctcaaggccaacctcctcagacaccagaggacacactcaggagagaagccttttctgtgcaaggtgtgtggacgaggctataccagtaagtcatacctcactgtgcatgagagaacacacacaggagagaagccttatgaatgccaggagtgtgggcgaaggtttaacgataagtcctcatacaacaagcacttgaaggcgcattcaggggagaagccttttgtgtgcaaggagtgtgggcgaggctatactaataagtcatacttcgttgtgcacaagagaatacactcaggagagaagccttacagatgccaggagtgtggccgaggctttagcaataagtcacaccttatcacacaccagaggacacactcaggggagaagccctttgcgtgcaggcagtgtaagcaaagttttagcgtgaaaggaagtctcctcagacaccagagaacacactcaggggagaagccttttgtgtgcaaggattgtgagcgaagctttagccaaaagtcaactcttgtctaccaccagagaacacactcaggggagaaaccttttgtttgtagagaatgtgggcaaggatttattcagaagtcaacccttgtgaaacatcagatcacacactcagaggagaagccttttgtgtgcaaggactgtggacgaggctttatccaaaagtcaaccttcactttacaccagaggacacactcagaggagaagccttatggatgtcgggagtgtgggcgaaggtttcgggataagtcctcctataacaagcacctgagggcacacttgggtgagaaacgttttttctgcagggattgtgggcgaggctttaccttgaagccaaatctcaccatacatcagaggacacactcaggagagaagcccttcatgtgcaagcagtgtgagaaaagttttagtttgaaggcaaatcttcttagacatcagtggacacactcgggggaaaggccatttaattgcaaggattgcgggcgaggcttcatcctaaaatcaactctcctcttccaccagaagacacactcaggggagaagcctttcatctgtagtgaatgtgggcaaggatttatctggaagtcaaatcttgtgaaacaccagcttgcacattctggcaagcagccttttgtatgcaaggagtgtgggcgaggcttcaactggaagggaaatctcctcacacaccagaggacacactcaggggagaagcccttcgtgtgtaatgtgtgtgggcaaggcttcagctggaagagaagtctcaccagacaccactggcggatacactcaaaggagaagccttttgtttgccaggagtgtaagcgaggctataccagtaagtcagacctcactgtgcatgaaagaatacacacaggagagaggccttatgaatgccaagagtgtggacgaaagtttagcaataagtcatactacagtaagcacttaaagagacacttacgtgagaagcgtttttgtacagggagtgtgggtgaggcttcatcttgaagttatatctcaccatccatcagaggacacactcaggagagtaactttgctttgttacaagctttagttgaggctgcataacttgttcgtgaagatataacagaggcagacagaatccagagggctacagagaacctgaattcaacccatgtgtccccaagagattcagagaaaagaggtcaatgtttagggaacagagatgccagttgaggggagggcattacctgggctattggggaaatgtggtctctttcctactgagcacatattcttgttgtatttgtgccaggctgtgctttctaaggactgctcttagccagtgactgcagagcagggataccaaggcaggcctgttacactctccccaacctccttggactgcaaacaatctaggacacctccaccaaacctcctcttgcactttccctctggcttccctcccagccttccttggtttggatgttttgtcccctccttaatttatgttgaaactctacataaactgtttactgttgaaacagtgtaagtattaggaggtgggacctttgggaagtgattaagtcaagtcacgaagatagagctttgcgaatgggatcaggtgcccttatgaaaaggcttgatagagggagtttgtcctgtggcccttctattttctgctctgtgaggacacaatgctcctcccttccaaaagatgcagcatgaaggcatcatcttggaaacagacatgagccctcaacagacaactgcacctactgatgttttgatgttgaacttcccagcctccagaactctgggaaaataaagtcctctttatacaaaaaaaaaaaaaaaaaaaaaaaaaaaaaaaaaaaaaaaaaaaaaaaaaaaaaaaaaaaaaaaaaaaa

SEQ ID NO: 4093 - DNA, 5137 bp, Homo Sapiens
  NM_015659
ggcttgctcgcgcgtgcgcaccagaagccagcagtggggttgcacacgcgcctcttcacgaggtggaaacaagatggaggattcggcctcggcctcgctgtcttctgcagccgctactggaacctccacctcgactccagcggccccgacagcacggaagcagctggataaagaacaggttagaaaggcagtggacgctctcttgacgcattgcaagtccaggaaaaacaattatgggttgcttttgaatgagaatgaaagtttatttttaatggtggtattatggaaaattccaagtaaagaactgagggtcagattgaccttgcctcatagtattcgatcagattcagaagatatctgtttatttacgaaggatgaacccaattcaactcctgaaaagacagaacagttttatagaaagcttttaaacaagcatggaattaaaaccgtttctcagattatctccctccaaactctaaagaaggaatataaatcctatgaagccaagctccgccttctgagcagttttgatttcttccttactgatgccagaattaggcggctcttaccctcactcattgggagacatttctatcaaagaaagaaagttccagtatctgtaaaccttctgtccaagaatttatcaagagagatcaatgactgtataggtggaacagtcttaaacatttctaaaagtggttcttgcagtgctatacgtattggtcacgttggaatgcaaattgagcacatcattgaaaacattgttgctgtcaccaaaggactttcagaaaaattgccagagaagtgggagagcgtgaaactcctgtttgtgaaaactgagaaatcggctgcacttcccatcttttcctcgtttgtcagcaattgggatgaagccaccaaaagatctttgcttaataagaagaaaaaagaggcaaggagaaaacgaagagaaagaaattttgaaaaacaaaaggagaggaagaagaagaggcagcaggctaggaagactgcatcagttcttagtaaagatgatgtggcacctgaaagtggtgatactacagtgaagaaacctgaatcaaagaaggaacagaccccagagcatgggaagaaaaaacgtggcagaggaaaagcccaagttaaagcaacaaatgaatccgaagacgaaatcccacagctggtaccaataggaaagaagactccagctaatgaaaaagtagagattcaaaaacatgccacaggaaagaagtctccagcaaagagtcctaatcccagcacacctcgtgggaagaaaagaaaggctttgccagcatctgagaccccaaaagctgcagagtctgagaccccagggaaaagcccagagaagaagccaaaaatcaaagaagaggcagtgaaggaaaaaagtccttcgctggggaaaaaagatgcgagacagactccaaaaaagccagaggccaagtttttcaccactcctagtaaatctgtgagaaaagcttcccacacccccaaaaaatggcccaaaaaacccaaagtaccccagtcgacctaaagtcagtgattcaactggaaggaaacctcaatgctgcctccagagctttttggaaatactcagatcctggccgcctttgtaaccttctctaaacgtcaggcctggacttaaaagattttttaaaacctccataagtagtccaggggcggtggctcacgcctgtaatcccagcactttgggaggccgaggcaggcggatcacaaggtcaacgagatcgagaccatcctggccaacatggtgaaaccctgtctgtaccaaaaatacaaaaattaattgggcatggtggtggacacctgtaatcccagctactagggaggctgaggcaggagaattgcttgaacctgggaggcggaggttgcagtgagccactgcactccagcctgatgacagagcaagactcagtctcaaaaataaataaaaataataaaacctccataagtaatcctgacatatgttcctgggtataatctgtttctaaattgtccttctgtgtatttgctaatgtaatagagggaaaaatagagtgcttctctgtggttgttcagcactttaggtagccaaggtgagaggattgcttgaggccaggagtttgagactagcctgggcaacttggtaaaaccccatctctacaaaagaaaaaaaaaaattagtgtggcatggtggcatgcatctgtgctcccagctcctcacgaggctgaggtggaaggatcaagtgagcgcaagaggttgaggctccagtgagccacgatcaccccactgtgctgtagcctgggtgacagtgtgagattctgtctcagaaaaaacaaagtataacattgctttgcttctgagtatactgttggctttccaaatcagtgggtctgacttgaggtctgtgatgtgacccttttcctcacctgctcaaccattattcacatggactccatcatattcatttgtagtcattcccagagtggcccagtgagggtctcgctgtatgagagtcggctacggaatttaggagaaacagaagtttcttggctttcatgctgagcttgttggtctaagcttatgagtcactggattagcatccatatgggaagggaaattaacatggagtcatttatacagggactaaattgaatcctacctaccggaggcaagaacatgatttatcttccataagccttatcctcttcctccttattcctcagtccatatggatttgcttatgtatgacaactccaaggaatcttggaagagtagattgctaacgtttccacaattgtcaagtatattctgaggcagtaaacacctttttaggtacgtggcctttcactggttgtgaattggtatgcatccgtagtagtaagttcacagattcactgcagtgcaggaatgttcttgcatgccaaagactcaactgctttcaaagataatgtgggtgctagatgcagtggcttacatctgtaaccctgttagggtgaccagacccaacaccaggtcgtgggggtgacaaagtccagtggagtcaaaggattgagaaaaagacagtttgagagagaagtaggaccagcagaccatcgggatggtggaggctgtgaaggccgtgagctctgggagcccacactatttattggtaatccaacaaagaaacagatggtgagaatgtgaaggtcagaagggcaccttgcattaagcacatgatttacagctgtgatggtttagcatttgctctgctacttgagatgatggagagcaggttcttttaactcaagttacagtcgatcctgggagagcaaggagccagcaagtctagacattccagagccacaggccctggattttatccaagccacgagggattttatgccctgggcttagattatggtgcgtcagggcagccttccaccctttagcacagagcttggtgttccaaagaccacaaggggttttagacccttgaccctggacatattccaagactcttttacattatgtcagaatgcaagccctgcctcagcttctcccaacactcagcttttcgcaacataatcccagcactttggaacgctgggtggattgcttgaacccaggagttcgagaccatcctgggcaatatggcaaaaccccatctttaccaaaaataagctgggtgtggtggaacatgcctgtggtcccagcttcttgggaggctgaggtgggaggattgcttgaacccgggaggtagaggctgcaatgggccatgatcacgatcctgcactccagcctgggcaacagagagagacagtccctggcccactgcccccttccctggcccagtctcaaaaaaaatgaggctgggcgtggtggctcacatctgtaatcccagccaaggctggcagatcacttgaggccaggagttctgagaccagcctggcttacatggtgaaaccccatctctactaaaaatacaaaaactagccaggcatggtgggaggcacctgtaatcccagctacttgggaggctgaagcaggagaatcactttaacccgggaggtggaggttgcagtgagctgagatcacaccactgcactccagcctgggcggcagagcaaaactgaaaaaaagagaaaaaaaaaaacatctagctctccctgaaattagaggagtctagcctgcttttgctgtttttttggtagcgagagtagcgggcagtgggggagatggtcttactctgttccccaggctggagtgcactagtgtcatcacagctccagcctcaatttcctgggctcaaggcgatcttcccacctcagcctcccaagtagctcagactacaggggcatgccatcacagctggccagtttttacgtcttgcgtagagatgggttttccctgtgttccctaggctgggctcgaactcctgggctcaagtcctcctgcctcagcctcccaaaatgttcagattacaggcatgaggcagcatgccaatcctgtttttgcattttagtaacacaaattgtaatgttaactttttaaattatgaaagcatctaaaatataaaattatttgtaaccccactgtccttttgggcttctataaatgaatatacatctaaaatgtgggggtttagcttaattgattgttttccatagaaactaggttttatgggaagatggttggatagacttgtttcacttaaaggtctggtttgtgtaggacaaacccacatatgtaatcgtgccagtctgttctctgcatgacataattttccagcaatagctgtgtggtttttgtaatcctatcatctagtcagttcaagatcttgcaacactgtgtgattctttgctccgtagttcagtcttgttgaacatgacacaggtgtttactttcctgttcttgcatctagtttcattctaataatgttctctgttgaaaaagctggcttcaatttattgagcaagatgctggtgttatcatctaacataaaacctatcttataataaagtgttgacacatgtaatgagtactgtactgaaaaatggtggtatgtatatggtttgtactgattatgtatcgcttttataccatcaaaaagttgaaaaatcataaagttgaatcatcctaaaa

SEQ ID NO: 4094 - DNA, 5430 bp, Homo Sapiens
  NM_015662
aaccacgggagttgtcgctgtctaggagcatctgaaagacaggtgtgcgtcatgcacttgaagcacctgaggaccctgctgagccctcaggatggagctgcaaaggtgacctgcatggcttggtcccagaacaatgccaaatttgctgtctgcacagtggaccgagtggtcttgctgtatgatgaacatggagaacggagagataaattctccaccaaaccagctgacatgaagtatggcaggaagagctatatggtgaagggcatggctttttctcctgattccactaaaattgccataggacagactgacaacatcatctatgtctacaagattggagaagattggggtgacaagaaagtcatctgcaacaagttcatccagacgagtgctgtcacttgtctgcaatggccggcagaatacatcattgtctttggactggctgaagggaaggttcgtttagcaaacaccaaaactaataaatcatctaccatctatgggacagagtcttacgtggtgtccctgacaacaaattgctctgggaaaggaattctctctggtcatgcagatggtaccatcgttaggtatttctttgatgatgaaggctctggagagtcacaggggaagttggttaaccacccgtgtccaccctatgccttggcatgggcaaccaatagcatcgtggctgcaggctgtgatcggaaaattgtagcctatggaaaagaaggtcacatgctacaaacttttgattatagccgtgaccctcaggagcgggagttcaccacagctgtatcaagtcctgggggccagtctgttgtgctaggaagttatgacaggcttcgggtgttcaactggatccctcgaagaagcatctgggaagaggcaaagcccaaggagattaccaatttatacaccatcactgccttggcctggaagcgggatggctcacggctctgtgtgggcacactatgtggtggggtggaacagtttgactgctgcctccgaaggagtatttacaagaacaagtttgagttgacgtatgtgggacctagccaggtgattgtgaagaacctgtcatcaggaacccgagtggtgctcaagtcacactatggctatgaggtggaagaggtgaaaatcctaggaaaggaacgttacttggtggctcacacatcagaaacactgctgctgggggacctgaacactaatcggcttagtgagatagcctggcaaggatctggtggcaatgagaagtatttctttgaaaatgagaatgtatgcatgatcttcaatgccggagagctaaccctggtggaatatgggaataatgacaccctgggttctgtacgcactgaattcatgaacccccacctcatcagtgttcgtattaatgagaggtgtcagcgaggaacagaagataataagaaattggcttatcttattgatattaagactattgctatagtggatctgattggtggctacaacattggcaccgtcagccatgagagccgtgtggattggctggaacttaatgagactggacacaagctcctcttcagggaccggaaacttcgtttgcatctgtatgatattgaaagctgctctaagacaatgatcctcaacttctgctcctatatgcagtgggtcccaggaagtgacgtgctggtagctcagaaccgaaacagtctgtgtgtatggtacaacattgaggcacctgagagagtcaccatgttcactattaggggtgatgttataggtctggagcggggcgggggaaagaccgaggtgatggtgatggaaggtgtgactactgttgcctacacattggatgagggcctcatcgagtttggaacagccattgatgatggcaactacatccgggcaacagccttcttagagactctggaaatgaccccagaaacagaggcaatgtggaaaaccttgagtaaactggcactagaggcaaggcaactacacattgcggagaggtgcttttctgctttgggccaagtagcaaaagctcgattcctgcatgagaccaatgagattgcagatcaagtatcccgggaatatggcggagaaggaacagacttttatcaggtccgagcacgtctagccatgctggaaaagaactacaaactggctgaaatgatctttttggaacagaatgctgtggaggaggccatgggcatgtaccaggagctacaccgttgggatgagtgtatcgctgtggctgaagccaaggggcacccagccctggagaagctacgtcgtagttactaccagtggctgatggacacacagcaagaggagcgagcaggtgaactacaggagagccaaggggatgggctagcagccatcagcctctacctcaaagctgggctccctgccaaagctgctcggctggtgctgacccgagaggaactgctagccaacacagagctggtagaacacatcactgcagcccttatcaagggggaactctacgaaagggcaggtgatctctttgagaagattcacaatccacagaaggccctggagtgctaccgtaaaggcaacgcattcatgaaagcggtagagctggctcgattggccttcccagtggaggtggtgaaactagaggaggcatggggggaccacctggtgcagcagaagcagcttgatgcagccattaatcactacatcgaagccaggtgctccattaaggcaattgaggccgccctgggtgcccgccagtggaagaaggcaatttatatattagatctacaggaccggaacactgcatccaaatactatcctctcgtggcccaacactatgcatccctgcaggagtatgagattgctgaggagctctatactaagggagatcggacaaaagatgccatagacatgtacacccaggctggtcgttgggaacaagcccacaagctggcgatgaaatgcatgagaccagaagatgtgtcagtgctatacatcactcaggcccaggaaatggagaagcagggcaagtaccgtgaggctgaaaggctatatgtgacagtacaagagcctgatcttgccatcaccatgtacaaaaagcacaagttgtatgatgacatgatccgcctggtagggaagcaccatccagatctcctcagtgatacacacctacatctgggcaaggagctggaggctgaaggccgactacaggaggctgagtaccactacctcgaggcccaggaatggaaggcaacagtgaacatgtaccgggccagtgggctttgggaagaggcctacagggtggccagaactcaaggaggggctaatgcccacaaacacgtggcctatctgtgggcaaagagcctgggaggagaggctgcagttagactgcttaataagctgggactcctggaagctgctgttgaccacgctgcagacaattgctcctttgaatttgcgtttgaactctctcggctggccctcaagcacaaaacccccgaggttcatctcaaatatgctatgttcctggaggatgagggtaaattcgaagaggctgaagctgaattcatcagagctggtaaacccaaggaggcagtcctcatgtttgtccataaccaggattgggaggcagctcagcgtgtggctgaggctcacgaccctgacagtgtcgccgaggtgcttgtgggacaggcccggggggccttggaggagaaggactttcagaaagcagaagggctgctgctccgggcccagagaccaggcctggccctcaattattataaggaggctggattatggagtgacgctctgcgcatctgcaaggactatgtgcccagccagctggaggctctgcaggaagaatatgagcgggaagctactaagaagggggccaggggtgtggagggatttgtggaacaagctcgacactgggagcaggctggagagtacagccgtgccgtggactgctacctcaaagtgcgagactctggaaacagcggcctggcggagaagtgctggatgaaggcagctgaactctccatcaagtttctgcctccccaacgtaatatggaagtcgttctggctgtaggaccccagctgattggaattggaaagcacagtgcagctgcagagctctatctgaatctggaccttgtcaaggaagcaatcgatgctttcatcgagggtgaggagtggaacaaggcgaagcgtgtagctaaggagttagatcccaggtatgaagactatgtggaccagcattataaagagttcctcaagaatcagggcaaagtggactcgctggtgggtgtggatgtgatagctgctttggacctgtatgtggagcagggccagtgggacaagtgcattgaaacagctaccaagcagaactacaagattctgcacaagtatgtggctttgtatgcaactcacttgatccgggagggtagctctgcccaggcattggccctgtatgtacagcacggagcccctgctaacccacagaacttcaatatctacaaaaggatcttcactgacatggtgagctctcctggaaccaactgtgccgaggcctatcatagctgggctgatcttcgagatgtcctcttcaacctgtgtgaaaacctggtgaagtccagtgaggcaaactctccagcccatgaggagttcaagacgatgctgctgatcgctcattactatgccacgcgctctgcagcccagagtgtcaaacagctggaaaccgtggctgccaggctttctgtttcactcttgcgtcacacccagctactacctgtagacaaagccttctatgaagcaggcattgctgccaaggcagttggctgggataacatggcattcatcttcctcaatcgctttttggacctgaccgatgcaatcgaggaagggactctagatggccttgaccactctgattttcaggatacagacattccctttgaggtgccactcccagctaagcagcatgtaccggaggctgagagagaagaggttcgagactgggtgcttacagtctccatggaccagcggctggagcaggttctgcctcgggatgagcgtggcgcctacgaggcctccctagtggcagcgagcactggtgttcgagccctgccctgccttattacaggataccccattctgaggaacaaaattgaatttaagcggccagggaaggctgctaacaaggacaactggaataaattccttatggccatcaagacctcccacagcccagtgtgccaggacgtgctgaaattcatcagtcagtggtgtggagggctccccagcaccagcttttcctttcagtagttggtagagctgaggaagagttagggcctctccctcattaaagttttataaataattgaaaaaaaaaaaaaaaaaaaaaaaaaaaaaaaaaaaaaaaaaaaaaaaaaaaaaaaaaaaaaaaaaaaaaaa

SEQ ID NO: 4095 - DNA, 1854 bp, Homo Sapiens
  NM_015665
cccgttagtcttttcttcacttccgttgagttccgcctcgccgtttgtcccttgcggtacccgtccgcatacgaatctagcccgggaaccgagttgcgggagtgcggtctgtgccgttccggccaggagtttgccgactgcagacgtcctgcgaaccggcaagatgtgctctctggggttgttccctcctccaccgcctcggggtcaagtcaccctatatgagcacaataacgagctggtgacgggcagtagctatgagagcccgccccccgacttccggggccagtggatcaatcttcctgtcctacaactgacaaaggatcccctaaagacccctggaaggctggaccatggcacaagaactgccttcatccatcaccgggagcaagtgtggaagagatgcatcaacatttggcgtgatgtgggcctttttggggtgctaaatgaaattgcaaactcagaagaagaggtgtttgagtgggtgaagacggcatccggctgggccctggcactctgtcgatgggcctcttccctccatgggtccctgttcccccatctgtctctcaggagcgaagatctgatcgctgaatttgcccaagtcacaaattggtccagctgctgcttgcgtgtctttgcatggcacccccacaccaacaagtttgcagtggccctgctagatgactcagtccgtgtgtataatgccagcagcaccatagtcccctccctgaagcaccggctgcagcgaaatgtggcgtctctggcctggaagccccttagtgcctctgtcttggctgtggcctgccagagctgcattcttatctggaccctggaccctacctccttgtctacccgaccctcttctggctgtgcccaagtgctgtctcaccctgggcatacacctgttaccagcttggcctgggcccccagtggggggcggctgctctcagcttcacccgtggatgctgctatccgggtatgggatgtctcaacagagacctgtgtcccccttccctggttccgaggaggtggggtgaccaacctgctctggtccccagacggcagcaaaatcctggctaccactccttcagctgtctttcgagtctgggaggcccagatgtggacttgtgagaggtggcctactctatcagggcgctgtcagactggctgctggagcccagatggcagccgactgctgttcactgtattgggagagccactgatttactccctgtcttttccagaacgttgtggtgagggaaaggggtgcgttggaggtgcaaagtcagcaacgattgtggcagatctgtctgagacaacaatacagacaccagatggtgaggagaggcttgggggagaggctcactccatggtctgggaccccagtggggaacgtctggctgtgcttatgaaaggaaagccaagggtacaggatggtaaaccagtcatcctcctttttcgcactcgaaacagccctgtgtttgagctccttccctgtggcattatccagggggagccaggagcccagccccagctcatcactttccatccttccttcaacaaaggggccctgctcagtgtgggctggtccacaggccgaattgcccacatcccgctgtactttgtcaatgcccagtttccacgttttagcccagtgcttgggcgggcccaggaaccccctgctgggggtggaggctctattcatgacctgcccctctttactgagacatccccaacctctgccccttgggaccctctcccagggccaccacctgttctgccccactccccacattcccacctctaagaataaataagttttccttttgttttccactcaaaaaaaaaaaaaaaaaa

SEQ ID NO: 4096 - DNA, 1393 bp, Homo Sapiens
  NM_015675
tcagatcgccgaagcgtcggactaccgttggtttccgcaacttcctggattatcctcgccaaggactttgcaatatatttttccgccttttctggaaggatttcgctgcttcccgaaggtcttggacgagcgctctagctctgtgggaaggttttgggctctctggctcggattttgcaatttctccctggggactgccgtggagccgcatccactgtggattataattgcaacatgacgctggaagagctcgtggcgtgcgacaacgcggcgcagaagatgcagacggtgaccgccgcggtggaggagcttttggtggccgctcagcgccaggatcgcctcacagtgggggtgtacgagtcggccaagttgatgaatgtggacccagacagcgtggtcctctgcctcttggccattgacgaggaggaggaggatgacatcgccctgcaaatccacttcacgctcatccagtccttctgctgtgacaacgacatcaacatcgtgcgggtgtcgggcatgcagcgcctggcgcagctcctgggagagccggccgagacccagggcaccaccgaggcccgagacctgcattgtctcctggtcacgaaccctcacacggacgcctggaagagccacggcttggtggaggtggccagctactgcgaagaaagccggggcaacaaccagtgggtcccctacatctctcttcaggaacgctgaggcccttcccagcagcagaatctgttgagttgctgccacaaacaaaaaatacaataaatatttgaaccccctcccccccagcacaacccccccaaaacaacccaacccacgaggaccatcgggggcagagtcgttggagactgaagaggaagaggaggaggagaaggggagtgagcggccgcccccagggcggagatccaggagctggcggccgccgatccgatggagaaggggggacccaggccagcaggagacaggacccccgaagctgaggccttgggatggagcagaagccggagtggcggggcacgctgccgccttccccatcacggagggtccagactgtccactcgggggtggagtgagactgactgcaagccccaccctccttgagactggagctggcgtctgcatacgagagacttggttgaacttggttggtccttgtctgcaccctcgacaagaccacactttgggacttgggagctggggctgaagttgctctgtacccatgaactcccagtttgcgaattatagagacaatctattttgttacttgcacttgttattcgaaccactgagagcgagatgggaagcatagatatctatatttttatttctactatgagggccttgtaataaatttctaaagcctctgaaaaaaaaaaaaaaaaaa

SEQ ID NO: 4097 - DNA, 1805 bp, Homo Sapiens
  NM_015677
ggcctccttgtccgcggggcggggcagcgcgccttcctcttcctgggcagcctcgggacggggcgccgcggccgggcgggcagcatgaataaccctataccttccaatttgaaatcagaagcaaaaaaggctgccaaaatattaagagaattcacagaaataacttccagaaatggacctgataagatcattcctgctcacgtaattgcgaaggctaaaggccttgcaattctgtctgtgatcaaagccgggttcctggtgactgccagaggaggcagcgggattgtagtggcgcgccttccagatggaaaatggtctgcaccctcagccattgggatagctggccttggtggaggatttgaaataggaattgaggtatcagacttggtgataattctgaattatgaccgtgctgtagaagcttttgcaaaaggcggaaatctgaccctcggagggaacttgactgtggcggttgggcccttgggaaggaacttggaaggaaacgtggccctgagaagctccgctgccgtcttcacgtactgcaagtcaaggggactctttgcaggcgtgtctttagaagggagctgtttgattgaaaggaaagaaactaatagaaaattttattgtcaagatatccgagcttatgacattttatttggagatacaccgcggcctgctcaagccgaagatctttatgaaattcttgattcctttactgaaaagtatgaaaatgaaggacaacgaatcaatgcaagaaaagcagcaagggagcagaggaagtcttctgctaaagaattacctccaaagccattgtcaagaccacagcagtcatctgcaccagtccagctgaactctggctctcaaagtaacagaaatgaatataagctctatcctggactttccagctatcatgagagagttggcaatttgaatcaacccatagaagtgacagcgctgtattcatttgaaggacagcagcctggggatttgaattttcaagctggagacagaatcacagttatatcaaaaacagattcacattttgattggtgggaaggaaaacttcgaggtcaaactggcatttttccagccaactacgtaaccatgaattaaagcgtatactattttcttctttgagaattacaaaaaaattatttctacactgacaggatttactagttaagcaatgtttaatataaattttaaaaaacttctgttctacaaaatttccattccgtatgtaaaagattttgtttttctatataaaaagagctgactgacatatctttaaatactttgtactaactttatcacacttactgtgtcatagaatatcatacagtttatacgctcatagttctcttgtgaacacttcaaacatcgctaagcatttgatctggccatgtatatggtagctgtgttttaatttgagaatcttgagggtagagccacaaatttcaattcttacatttccatttgcaaagtgactagagaaaaagaaatcagcttaaatgaggtattaagtaatgtttagagtcgtaggtattaactagaatataaatccttagaaattgtctttataccttcaaaaattatactatgcatttatcatagaaatgtgattacaaagaagtctgactaccatgtctttaaacatatggcatctctcaacttttcttccttatggggctacatttgttcatttccagcagtagcataaacttacggtgacatggtagacttgtctctaaataaaatttttaaatgtttactaagttaatatttcaaaaaaaaaaaaaaaaaaa

SEQ ID NO: 4098 - DNA, 1439 bp, Homo Sapiens
  NM_015679
atcttcaagtatggggtctgctggcttgtcgcggctgcatgggcttttcgcggtctataagcccccggggctaaaatggaagcacctgcgggatacagtggagctacaacttctgaagggtctcaatgccaggaagcctcccgctcctaaacagcgtgttcgcttcttgctgggccccatggaaggcagcgaagagaaggagctgaccctcacagccaccagcgtaccctctttcatcaaccatccactggtatgtggaccagcattcgcccatctcaaggttggcgtgggacatcggttggatgcccaggcttctggagtacttgtgctcggcgtgggacatggatgcaggctcctcaccgatatgtacaatgctcatcttaccaaggattacacagtgcgtggcctcctgggcaaagctacagatgacttccgtgaggacgggaggctggtagagaagacaacctatgaccacgtgaccagagagaagctggaccgcattctggccgttatccaaggctcccatcagaaggccctggtgatgtactccaacctcgacctgaagacccaggaggcctatgagatggccgtgagaggcctgatccggcccatgaacaagtccccgatgctgataactggcatccgatgcctctactttgcacctccggaattcctcttagaggtgcagtgcatgcatgagacgcagaaagagctgcggaagttggttcatgaaatcggcctggaactaaagaccactgctgtctgcacccaagtgcggcgcacgcgcgacggcttcttcacgctagacagtgccctcctgaggacccagtgggacctaaccaacatccaggatgctatccgggctgctacccctcaggtagctgcagagctggagaagagcttgagcccggggctggacaccaagcagctccccagtccgggatggtcctgggactcccagggcccgagctctaccttggggctggagaggggtgcggggcagtgaatgcccaggcagctcctggggcagtggatggataaatagaagaactgctatgagctggacctgatagctgtgcagaaagtgagagcaggggcaccttttctacgtaagacacaaaactcaagctgtaacagaaaggtcaatggacttgacccaactgagaaggaaaaacttctgtatggaggaaaagacagtaaacatgacagactgatagaaagtattggcagaccaggcgtggtggcgggcacttgtaatcccagctactcccaaggctgaggcaggagaattgcttgagcccaggagtttaaggttgtagtgcgctagacggcgcctgtgaatagccactgcactctagtctggggaacatatgagacccctgccatctcaaaaaaaaaaaaattctcaataaactatgtgcccacgaaaattaaaaatt

SEQ ID NO: 4099 - DNA, 2518 bp, Homo Sapiens
  NM_015683
gggattttctgctccggttggtgagcgcgcctgcgcgttgacggcgattttgcgttctgaggctgcagcgtcggcatcttgagctgccggttcgcgagttcgaggccaggttccgcctgtcgtgggttcgcaccccggacgcgatgctattcgacaaggtgaaagcgttctcggtgcagttggacggcgcgaccgcgggcgtcgagcccgtgtttagcggcggccaggccgtggcgggccgggtgctgctggagctgtcaagcgccgcgcgtgtgggtgccctgaggctgcgcgcgcggggccgcgcccacgtgcactggaccgagtcgcgcagcgcgggctcgagcacggcttacacgcagagctacagtgaacgcgtggaggtcgtgagccaccgcgccacgctcctggcgccagataccggggagaccacgacgctgcctcctgggcgccatgagttcctgttcagcttccagctgcccccgaccctggtgacatccttcgagggcaaacacggtagtgtccgctactgtatcaaggccaccctgcaccggccctgggtcccagcacgccgggcaaggaaggtgttcactgtcatcgagcctgtggacatcaacacgccagccctgctggcacctcaagcgggggctcgggaaaaggttgcccgatcctggtactgtaaccgtggcctagtctccctttcggccaagatcgaccgcaagggctacaccccaggagaggtcatccctgtctttgccgagatcgacaacggctccacacgtcctgtgctgcctcgggcagccgtggtgcagacacagacgttcatggcccgaggcgcccgaaagcagaaacgggcagtggtggccagcctcgcgggcgagccggtgggccccgggcagcgggcgctgtggcagggccgggcactgcggatccccccagtgggtccttccatcctgcactgccgcgttctacacgtggactacgcactcaaggtctgtgtggatatcccaggaacgtccaagctgctgctggagctgccactggtgatcggcaccattcccttgcacccttttggcagccgttcctccagcgtgggcagccacgccagcttcctgctggactggaggctgggggccttgccggagcggcctgaggctcctcctgagtactcggaggtggtagccgacactgaggaggcagccttggggcagagccccttcccgcttccgcaggaccccgacatgagccttgaaggcccgttcttcgcctacatccaagagttccgctaccgcccgccacccctgtactctgaggaggatccaaacccactcttgggggacatgaggccgcgctgcatgacttgctgaacggcacagggacccctcgaggaacaaggttgcacaccagctttcagccaccatgactgtggggagtggctggaccaagggctgacctccccgactgcatcaaagttggggaaccaagtctcagagtgaggcgggggcctttcggatatcacatgggacagaggaagagcccggctggaatctgacttacctggaccgctgtccttgtgaggcattgaatgcccagtgcagtatccgagagactgtttaataacctgtcttcccagccaattggtggtgctggaatcccctaggagccttcagtctgggagaaacagagccagacatagacagttccagcatcacagaaccagaagaagagacctgcaactgtgagagtccagacaggaagcagagaaggcgtccttgcggaaagggcattttagctgaggctttggagtacgaataggagctcagcaggcagacgaatgaggaataaaggtcagagaaggtcagagctgagtgacgtttggaatccaccccgtttattgtagaactgggggttcagagggcaggtgcctcagagttgaggccacacagtgaggtctggtgggtgaaaggacccaggaacgaggcgttcaggaaagcaggttgtcagagctatgtggagtctgtgggtggcaggggcagccgctccagcctttgaagactttgaaagccagagattcctggcgcaggcttggacttcctgggagctcctccaagtacccaggggcatcagagctgcctgggtgttacatggcccagggaacccaggttcagggtaggacaggcaagaccagatacccaatgtgcaaagtgaaaacactgggctccctgttaaacgatgaagaattcaagacagtgacagcattacgtcacccctggggacagaggtcagcctaaggtgacacacggggactactgtgcttccggaggctccctgtgtcctggaggagaaaagcattagagggggcagctggacaagctcccaactgcagagtcccagccctggctggggcagggccccggcctgggactcagcatttctgatatgccttaagaattcattctgttttgtacaattattttttaaaagtaaacgtgtggagaaagaaaaaaaaaaaaaaaaa

SEQ ID NO: 4100 - DNA, 1359 bp, Homo Sapiens
  NM_015684
ggccagggtgccgcagacgcggggacgctggctcgctccctccctccctccctccgacgctgtgagtagagaagctaggccccgagccgggcgggactagggtggtggttgtgttctgccctcgcccgtcgccaacgctgggctgactgaaaacctggccctttgggtcgcgcgtcttcgaccttcaccgccatgcggacatggggccgtgggagaaactctgggcgggattacggtgaaaattcttgtttgggcgggccctgcggcttctttcttccggctcgccctcggccccgcccccgccccgcccccgctccagctccagccgggtcctcgctcggccccgcacgcggcccgcggtagacggagggcctgggcacccaccgtctccatcccggccccagcccagtcgagcgtccactagaagggcgctccctgtccggccctaatcctcgctcctcacggaggctctttgtcacagcgaagactgacagcccgcagtcttctggacttcttttatggggctcctggcggtgctattcattcagtcattgattcgtcttgtaaatatggagcgcctgctctgtactcgacccggcactgggtaccggaagaaccagacagctcggtttttgccaccatttataagtctgtgtccttttcttgagtactgaaccgagatacagttttaaatgtgctgtgcggtctctgagcagcgactcacctgtgcagatcaaatgatgccgtttggaaaaatttcccagcagttgtgtggcgtaaagaaactcccatggtcatgtgactccagatacttctggggctggttgaatgcagtgtttaataaggtggattatgatcgcatcagggatgttggccctgacagggcggcatccgagtggttgctgcgctgtggggccatggtgcgctaccatggccaggagaggtggcagaaggactacaaccaccttccaacaggccctctggacaaatacaagattcaggcgatcgacgccaccgactcttgtatcatgagcattggatttgatcacatgggtaactaccctatcgttttgctaatagaaaatgcagatgatttgcagtgaccattttgttgcagttgactcacgattatagtcataggtatgtcctttttgcccatttcattatagtcaagtttgtttcttcctgtgtttgatatttattttcaaattaaattgaggttacagacaccttcctctccttcctcctctcactaagcttgtttctgtatgtctctagtctttggtttattgacttaaaatccagggccttgtttgtcaaactatctttgtcaaacttctgtcattgagaagccctcaa

SEQ ID NO: 4101 - DNA, 4935 bp, Homo Sapiens
  NM_015690
gtgggcagctagcgtcgtttctaggcaaccgcagactccgggtccttagccgggcctgatggccctgaggcagttcggatgtgtcccaggaagtgcccatgtgtggtccgccgtccattccacacctctgagcgcctttgtcctctgaacttctcaccagttctagcgagtaaaattgcgtcccagatgttgtggaactgtccctggatctatagctcttcaccgtctctactttcttccttctaagagatcctgaaacctctgtcatggaaaagtaccacgtgttggagatgattggagaaggctcttttgggagggtgtacaagggtcgaagaaaatacagtgctcaggtcgtggccctgaagttcatcccaaaattggggcgctcagagaaggagctgaggaatttgcaacgagagattgaaataatgcggggtctgcggcatcccaacattgtgcatatgcttgacagctttgaaactgataaagaggtggtggtggtgacagactatgctgagggagagctctttcagatcctagaagatgacggaaaacttcctgaagaccaggttcaggccattgctgcccagttggtgtcagccctgtactatctgcattcccaccgcatcctacaccgagatatgaagcctcagaacatcctcctcgccaagggtggtggcatcaagctctgtgactttggatttgcccgggctatgagcaccaatacaatggtgctgacatccatcaaaggcacaccactctatatgtctccagagctggtggaggagcgaccatacgaccacacagcggacctctggtctgttggctgcatactatatgaactggcagtaggcacccctcccttctatgctacaagcatctttcagctggtcagcctcattctcaaggaccctgtgcgctggccctcaaccatcagtccctgctttaagaacttcctgcagggactgctcaccaaagacccacggcagcgactgtcctggccagacctcttatatcacccctttattgctggtcatgtcaccataataactgagccagcaggcccagatttggggaccccattcaccagccgcctacccccagaacttcaggtcctaaaggacgaacaggcccatcggttggcccccaagggtaatcagtctcgcatcttgactcaggcctataaacgcatggctgaggaggccatgcagaagaaacatcagaacacaggacctgcccttgagcaagaggacaagaccagcaaggtggctcctggcacagcccctctgcccagactcggggccactcctcaggaatcaagcctcctggccgggatcttagcctcagaattgaagagcagctgggctaaatcagggactggagaggtgccctctgcacctcgggaaaaccggaccaccccagattgtgaacgagcattcccagaggagaggccagaggtgctgggccagcggagcactgatgtagtggacctggaaaatgaggagccagacagtgacaatgagtggcagcacctgctagagaccactgagcctgtgcctattcaactgaaggctcctctcaccttgctgtgtaatcctgacttctgccagcgcatccagagtcagctgcatgaagctggagggcagatcctgaaaggcatcttggagggtgcttcccacatcctgcctgcattccgggtcctgagcagtcttctctccagctgcagtgattctgttgccttgtattccttctgccgggaggcagggcttcctgggctgctgctgagtctactcaggcacagtcaggagagcaacagcctccagcagcaatcttggtatgggaccttcttacaggacctgatggctgtgattcaggcctactttgcctgtaccttcaatctggagaggagccagacaagtgacagcctgcaggtgtttcaggaggctgccaacctttttctggacctgttggggaaactgctggcccaaccagatgactctgagcagactttgcggagggacagccttatgtgctttactgtcctgtgcgaagccatggatgggaacagccgggccatctccaaagccttttactccagcttgctgacgacacagcaggttgtcttggatgggctccttcatggcttgacagttccacagctccctgtccacactccccaaggagccccgcaagtgagccagccactgcgagagcagagtgaggatatacctggagccatttcctctgccctggcagccatatgcactgctcctgtgggactgcccgactgctgggatgccaaggagcaggtctgttggcatttggcaaatcagctaactgaagacagcagccagctcaggccatccctcatctctggcctgcagcatcccatcctgtgcctgcaccttctcaaggttctatactcctgctgccttgtcagtgagggcctgtgccgtcttctggggcaggagcccctggccttggaatccctgtttatgttgattcagggcaaggtaaaagtagtagattgggaagagtctactgaagtgacactctacttcctctcccttcttgtctttcggctccaaaacctgccttgtggaatggagaagctaggcagtgacgttgctactctctttacccattcgcatgtcgtctctcttgtgagtgcagcagcctgtctattgggacagcttggtcagcaaggggtgacctttgacctccagcccatggaatggatggctgcagccacacatgccttgtctgcccctgcagaggttcggttgactccaccaggtagttgtggattctatgatggcctccttatccttctgttgcagctcctcactgagcaggggaaggctagcctaatcagggatatgtccagttcagaaatgtggaccgttttgtggcaccgcttctccatggtcctgaggctccccgaggaggcatctgcacaggaaggggagctttcgctatccagtccaccaagccctgagccagactggacactgatttctccccagggcatggcagccctgctgagcctggccatggccacctttacccaggagccccagttatgcctgagctgcctgtcccagcatggaagtatcctcatgtccatcctgaagcatctgctttgccccagcttcctgaatcaactgcgccaggcgcctcatgggtctgagtttctccctgtcgtggtgctctctgtctgccagctcctttgcttcccctttgcgctggacatggatgctgacctccttataggtgtcttggccgacctcagggactcagaagttgcagcccatctgctgcaggtctgctgctaccatcttccgttgatgcaagtggagctgcccatcagccttctcacacgcctggccctcatggatcccacctctctcaaccagtttgtgaacacagtgtctgcctcccctagaaccatcgtctcgtttctctcagttgccctcctgagtgaccagccactgttgacctccgaccttctctctctgctggcccatactgccagggtcctgtctcccagccacttgtcctttatccaagagcttctggctggctctgatgaatcctatcggcccctgcgcagcctcctgggccacccagagaattctgtgcgggcacacacttataggctcctgggacacttgctccaacacagcatggccctgcgtggggcactgcagagccagtctggactgctcagccttctgctgcttgggcttggagacaaggatcctgttgtgcggtgcagtgccagctttgctgtgggcaatgcagcctaccaggctggtcctctgggacctgccctggcagctgcagtgcccagtatgacccagctgcttggagatcctcaggctggtatccggcgcaatgttgcatcagctctgggcaacttgggacctgaaggtttgggagaggagctgttacagtgcgaagtaccccagcggctcctagaaatggcatgtggagacccccagccaaatgtgaaggaggctgccctcattgccctccggagcctgcaacaggagcctggcatccatcaggtactggtgtccctgggtgccagtgagaaactatccttgctctctctggggaatcagtcactgccacacagcagtcctaggcctgcctctgccaaacactgcaggaaactcattcacctcctgaggccagcccatagcatgtgattccagattcctgcggtccagcctccaactttggttgccagctctttcttattctactacacaagccgccaactcaactgagagctaaagagactagaaaagagataagctgccaactcaactgagaacaagaaactagaagagatttatatataaagcttcttccttctcccagatgcaggatgttttcaaccagtaaattttattgctgttggtgccagagaagagtcctttcttctctacatccaggggccttttctccaataatgtgcctttaactctagggacctgcctcacggaccttagggaaaaacctcaacctgaaagatctcttcctttctggagctcctttaatcttcccagcaggtttttgccttagacgtgctggccccaggacagtgatgaagacagagcctgtctcagctctaggctgtggggatcaatgccatcagtccctgttattgagggattatcccttagccaacattcctatctgtgggtgggcgtggagagtgtatctttttttggggtgtgtgtgtatatgtgtgtgtgtatgtgtgtgtgtgtttaatagttctgtttgtaaactcttttaataaaagttgtgcctcaccatacttgaagctcccaggacaagggttgagaggctcaacccctctttcagcttctatgtggtgttggaggtgctggtatcgtgttcacacaagaaaaaaaaaaaaaa

SEQ ID NO: 4102 - DNA, 1246 bp, Homo Sapiens
  NM_015696
gtctttgccctcgcgacgccgccacctccggaacaagccatggtggcggcgacggtggcagcggcgtggctgctcctgtgggctgcggcctgcgcgcagcaggagcaggacttctacgacttcaaggcggtcaacatccggggcaaactggtgtcgctggagaagtaccgcggatcggtgtccctggtggtgaatgtggccagcgagtgcggcttcacagaccagcactaccgagccctgcagcagctgcagcgagacctgggcccccaccactttaacgtgctcgccttcccctgcaaccagtttggccaacaggagcctgacagcaacaaggagattgagagctttgcccgccgcacctacagtgtctcattccccatgtttagcaagattgcagtcaccggtactggtgcccatcctgccttcaagtacctggcccagacttctgggaaggagcccacctggaacttctggaagtacctagtagccccagatggaaaggtggtaggggcttgggacccaactgtgtcagtggaggaggtcagaccccagatcacagcgctcgtgaggaagctcatcctactgaagcgagaagacttataaccaccgcgtctcctcctccaccacctcatcccgcccacctgtgtggggctgaccaatgcaaactcaaatggtgcttcaaagggagagacccactgactctccttcctttactcttatgccattggtcccatcattcttgtgggggaaaaattctagtattttgattatttgaatcttacagcaacaaataggaactcctggccaatgagagctcttgaccagtgaatcaccagccgatacgaacgtcttgccaacaaaaatgtgtggcaaatagaagtatatcaagcaataatctcccacccaaggcttctgtaaactgggaccaatgattacctcatagggctgttgtgaggattaggatgaaatacctgtgaaagtgcctaggcagtgccagccaaataggaggcattcaatgaacattttttgcatataaaccaaaaaataacttgttatcaataaaaacttgcatccaacatgaatttccagccgatgataatccaggccaaaggtttagttgttgttatttcctctgtattattttcttcattacaaaagaaatgcaagttcattgtaacaatccaaacaatacctcacgatataaaataaaaatgaaagtatcctcctcaaaaaaaaaaaaaaaaaa

SEQ ID NO: 4103 - DNA, 1657 bp, Homo Sapiens
  NM_015697
atgaccccaatttcacaagtaaggatgaggaaaggttctgcccacaccgccgcccagcctggcagactaggattgcatcctgcgggtgccactgcgcatgcctgccggggaatgacgtcaatccgagctcgtcccggcctcaccagcgccatgctgggctcgcgagccgcggggttcgcgcggggcctgcgggctgtggcactggcgtggctgccgggctggcggggccgctccttcgccctggcgcgtgcggcaggcgcgccccacggtggtgacttgcagccccccgcctgtcccgagccgcgcgggcgccagctcagtttgtccgcggcggcggtggtggactctgcgccccgccccctgcagccgtacttgcgcctcatgcggttggacaagcccattggaacctggcttctgtatttaccatgtacctggagcattggtttggcagctgaaccaggttgttttccagattggtacatgctctccctctttggcactggagctattctgatgcgtggagcaggctgtactattaatgacatgtgggaccaggactatgataaaaaggttacaagaacagccaatcgtccaatagccgctggagacatttcaacttttcagtcctttgtttttcttgggggacagctaaccctggcactgggtgttcttctgtgtctaaattactacagtatagctctgggagcaggatccttacttcttgtcatcacctacccactaatgaaaagaatttcatactggcctcaactagccttgggcttgacatttaattggggagcgttacttggatggtctgctatcaagggttcctgtgatccatctgtttgcctgcctctttatttttctggagttatgtggacactaatatatgatactatttatgcccatcaggacaaaagagatgatgttttgattggtcttaagtcaacggctctgcggttcggagaaaataccaagccgtggctcagcggcttcagtgttgcaatgctgggggcactgagcctagtgggtgtgaacagtggacagactgctccctactacgctgccctgggtgctgtaggagcccatctgactcaccagatttacactctagacatccacagacctgaggattgttggaataaatttatctccaaccgaacactgggactaatagtttttttagggattgtccttgggaatttgtggaaagaaaagaagacagacaaaacaaagaagggtatagagaataaaatagaaaattaatgaatgaaatttatctaggaatttttaaaacattttttacaaaatataattagatttgaatacaaaatctgatacaatatgttaaagaattaagaacctgaagatgaagatttagagcatatttacctggattttacttatttgctagcaaaattcccccttgtcacagaaaccagggactcttcaggatttgagatggccttgagtattttagttgatacattcttctgcccattataattctcacctgaagttatggggattgcacgggttttggcactttagaaaaagcctgatgtgggtcttacataaatgaatgtctgtataagaaaatggactcttttttttagggaaaaataaaagcaactatgggaaaaaaaaaaaaaaaaaa

SEQ ID NO: 4104 - DNA, 1466 bp, Homo Sapiens
  NM_015702
gcgcgtgcgcatcatcgtttcgacgcgctcggaagcaacttcctttgcctgctcaccgccagcgtaggtgctaccaccgctgccgtcgccgccgccattttgatggcaggaagagtccggttctgggacagctggagacagtggtggtgactgaaataactttaccaaaggaaagctattttgcgaactatcttctccagcggagatggccaatgtgctttgtaacagagccagactggtttcctatctcccaggattttgctctttagttaaaagggttgtcaatcccaaagccttttcgactgcaggatcatcaggttcggatgagtctcatgtggctgctgcacctccagatatatgctctcgaacagtgtggcctgatgaaactatgggaccctttggacctcaagatcagaggttccagcttcctgggaacataggttttgattgtcacctcaatgggactgcttcacagaagaaaagcctggttcataaaactttgcctgatgttctagcagaacctttatcaagtgaaagacatgagtttgtgatggcacaatatgtgaatgaatttcagggtaatgatgcacctgttgaacaagaaattaacagtgcagaaacttactttgaaagtgccagagtagagtgtgcaatacagacatgtccagaattgctgcgaaaagattttgaatcactgtttccagaagtagctaatggcaaactaatgattctgactgtaacacaaaaaactaagaatgatatgactgtttggagtgaagaagtagaaattgaaagagaagtgctcttagaaaagttcatcaatggtgctaaggaaatttgctatgctcttcgagctgagggttattgggctgactttattgacccatcatctggtttggcattttttggaccatatacaaacaacactctttttgaaactgatgaacgctaccgacatttaggattctctgttgatgaccttggatgctgtaaagtgattcgtcatagtctctggggtacccatgtagttgtagggagtatcttcactaatgcaacaccagacagccatattatgaagaaattaagtggaaattagcagaaatatccattcatttgctgtactatttgtatgtaatatttgggttgatctataaacactgtcagactaaagtttttaaaatatatttatttctaagtatttatttcagcatttatgaatttacaacattggcaagtgatttgggattttaaaattgcaaatgttcatttattcatatcattgaatacacgttgaacacatccacattgtataggatgtggtaattagcttgtaaccagggtatgatctgctattgttatttctcctctttattggaaaaaggcctcagttttaattattttcttcccaaaataaatcacacatttggttacaataataaaaaaaaaaaaaaaaaaaaaaaaaaaaa

SEQ ID NO: 4105 - DNA, 5455 bp, Homo Sapiens
  NM_015703
gcaactcccggcggcccccgcgctcccgggtggcaagatggtggcgcgcaggaggaagtgcgccgcgcgggacccggaggaccgtatccccagcccactgggctacgcagctattccaatcaagttctctgaaaagcaacaggcttctcactacctctatgtgagagcacacggcgttcgacaaggcaccaagtccacctggcctcagaagaggactctttttgtcctcaatgtgcccccatactgcacagaggagagcctgtcccgcctcctgtccacctgtggcctcgtccagtctgtagagttgcaggagaagccggacctggctgagagcccaaaggagtcaaggtcgaagttttttcatcccaagccagttccgggtttccaggtagcctatgtggtgttccagaagccaagtggggtgtcagcggccttggccctgaagggccccctgctggtgtccacagagagccaccctgtgaagagtggcattcacaagtggatcagtgactacgcagactctgtgcccgaccctgaggccctgagggtggaagtggacacgttcatggaggcatatgaccagaagatcgctgaggaagaagctaaggccaaggaggaggagggggtccctgacgaggagggctgggtgaaggtgacccgccggggccggcggcctgtgctcccccggactgaggcagccagcttgcgggtgctggagagggagagacggaagcgcagccgaaaagagctgctcaacttctacgcctggcagcatcgagagagcaagatggagcatctagcgcagctgcgcaagaagttcgaggaggacaagcagaggatcgagctgctgcgggcccagcgcaaattccgaccgtactgagctgtgagagccgcagtgaatggctggaggtgcagggccaggaggaggcgaggcagggcctgcagcggtctctgagaggccgagctctggccaacgggccccaggttgaaggccaccgcgtccaacagccccatcagagtccacacaggccaggagggaaggaccaggccacccctcgggtcttgtgcttcagcagtcctggggacccaggcgtgccgagaggaggacttgtccttcctgcttcttgcctccacaccctcctctccaggaccctggatgaatccgttctgtgcttccttttccctcaatgcaaaagcccttgctggcaacgaaaaagcctcaaaagcagtgagaatacaagaaccttttattttccatccagttgggcagcagggaaaggctaggtgggcccagcccgcccttccttcctccagctggctggagattattagccaggagacagcagccctggaacccagactctgtctcccccttgaggtcacagatgttgaagttggaatctcgctccttcccctgactaccatcctaggctgggcctcaagactagtgaggcctgtccccaccatccctggccttgttgtggggctcaggaactcagagtcccagtgttgagtctgggagcactaggtcttcatagttccaggcccagagctacagctgggctgggagcgtgtgtgtgcactgtaagaaggagctgatgatactggccacgtgctggggttcgctcatgtggacacagtgattgcctgggacttccacaaactggaaccgctggagaggggagggggtgggtagtgagatgtggccagaggagcctagggagctccatgggccccggggtcagggccctcccacagcattccagctccctgcaggtcaggagcgcctcccacagtgagtttcccccacactcggctccttggagccccgacagtccatagcaccccaggagatgtctaaccttagggacttggaggcctcccaggggtctaggccagctgagttgtgaagttgcatggcagggacagggcagggccgaggccagggttgctgtgattgtatccgaagtagtcctcgtgagaaaagataatgagatgacgtgagcagcctgcagacttgtgtctgccttcaagaagccagacaggaaggccctgcctgccttggctctgacctggcggccagccagccagccacaggtgggcttcttccttttgtggtgacaacgccaagaaaactgcagaggccccagggtcaggtgtaagtgggtaggtgaccataaaacaccaggtgctcccaggaacccgggcaaaggccatccccacctacagccagcatgcccactggcgtgatgggtgcagagggatgaggcagccaggtgttctgctgtggtttgggagcctataaagtgagactaggctgggcatggtggctcccatctgcaaaaccagcactttgggaggccaaggtgggcggatcgcctgaggtcaggagtttgagaccagcctggccaacatggtgaacccccatctcttaaaaatataaaaattagctgggcatggtggcaggtgcctgtaatcccagctactcaggaggctgaggcacgagagtcgcttgaacccgggaggtggaggttacagtaagctgagatcttcccactgcactccagcctgagcgacagagtgagactccatctcaaaaaaaaaaaaaaagtgtgactattagctgggcatgatggcatgcgcctgtagtgccacctactcaggtggctgaggtgggaggatcatttgagcccaggagtttgaggctgcagtgagctatgactgagcctgagcaacagaatgagaccctgtctctcaaaaaatgtgggactgtctctggcagttgggtcacctaattgtgcctggccccaagaaggaggggtgggtacttgaggatggtaaagaacctccccaccaaaggtctctgtttcttaaattctgattacatgtgtccccaggcctctagggactgatcactggagcatgaggcctgatagatcctggtggtcacttgttgggcctgggggcagaccaggggtctttcccagtgcatgagaagagatgggtgaggtgggaccagagtgggcgacagtggctggacaccagctgcctgagccccgccttacctctttgagggtggatttcattgtgtctatcatgaacgacagggactccttgtcagagtaattctctcttggatcaaaatatccgtggactgctctggaaagtgaggagttgggggttgttggggttcatcttagaaccgcctcccagcggtgcccccatcctgccctgggttcaggcctctgaggagaaaccaaagcctgggctaccccaactcccacagctgggtcccttgaccctgggttggatttgaggctcagttaatctcagctcacgctcagctggcacaagccaggcgcaagcaagtgctgaaggcacagccttgctggggcgcagggagttcaggacttggtcacagtcagccctgaacagcagagctgggatctgaacaggcgctggagcccacacttgctctgagagagaatttatgtcttcacaatcctcccattgaaagtctacaatcctggccgggtatggtggctcacgcctgtaatcccagcactttgggaggctgaggcgggtggatcacgaggtcaggagatgagaccatcctggctaacatggtgaaaccctgtctgtactaaaaatacaaaaattagccgggcttggtggtgggtgcctgtagtcccagctactccggaggctgaggcaggagaatggcgtgaacccgggaggcggaccttgcagtgagctgagattgcaccactacactccagcctgggcgacagagccagactccatctcaaaaaaaaaaaaaaaaaagtctacaatcccgtggtttttaatacattgagttgtgagaccatcgtcacaattacattttcatcacccccaaagaaatcgcaaacctctgagcttacacacacacacacacaccccacccccccacccccaacaggcttccggtcctgagcaaccatgacctggctttgtctctgccgtgtgtcctatttggacttgaacgtgaatgcagccatacaacacgtagacggttgtgtctgacttcatccacttagtgcgatgttttcaaggctcatccatgctggagcccatgtcagtgcttcgtttctttttatggcttaaaaatcgtctatggtgggccacgcacggtggctctcgcctgtaatcccaacactgggaggccgaggcaggcggatcatgaggtcaggagatggagagcagcctggccaacatggcgaaacctcgtctctactaaaaatacaaaaataagccaggcgtggtggcgggcgcctgtagtcccagctactcgggaggctgaggcaggagaatcgtttgaatccaggaggcagaggttgcagtgagtcgagactgggctcactggttatggagccttacctgggcatgccccccgctgacacctgtggaaaggcatgggacagccccggcccatcccctgctgcctgagccctcccctcctctgaccttcctccttccatgaccctgctgccaggggggcttcccaaaaaagatcttgagtcttagcgatgtggtcgacacgcagagaacttggagcctcatgccagggccccctcccagagattcctggcgcccatgtctccttggggggtgactgaaggggatgggtccagactcacttgatcaacaggacatgggcctgcagcttcctgatggaatgcgcacacagctccctgctgacgaagtcaatgctgttctctgcctgcagagacaaaaacatggtgaattctcgtcacaaggcacaggcactctcgtgggcacgaaacccatctctgttggggtggctaagccctggcgagggcaccttagccacccaccctgggtctgagcccaggaccccacatcactgcctcatcgaaggctctttagcccctggtggccagagactcctgccctctccaagtctgttctcccctcttcctgggctcgtggctacccagcctgactccatttccaatactcctttgccaccaggtatggctgtgtgattaaagtcagagaagtgagttgggccacttttgggcctggattttaggacttaggtgtggcccttccacacccctttcccagtccataggctgcacctcacgctgtcccctgccagcctgggacaggcttcttgccaggagaaagaaacttgctgggaccacagtgcaggatgggcactccgtgatggccccagccagcctcctccgcggccctgcctgccctgtcttgtgactgttttacgtctggatggcggggatgtggccagcttgagtgagatgtgctgtaggtgtgacacgaagctggatttggaaaacagcatgcaaaataatgcaatcaagctttatgttgattacatcttaaatcacattgtggatgttaaataaaaatatgagaagaatttatagaa

SEQ ID NO: 4106 - DNA, 1523 bp, Homo Sapiens
  NM_015710
tggctgagttcttcctttgacaagatggcggcaggaggcagtggcgttggtgggaagcgcagctcgaaaagcgatgccgattctggtttcctggggctgcggcccacttcggtggacccagcgctgaggcggcggcggcgaggcccaagaaataagaagcggggctggcggcggcttgctcaggagccgctggggctggaggttgaccagttcctggaagacgtgcggctacaggagcgcacgagcggtggcttgttgtcagaggccccaaatgaaaaactcttcttcgtggacactggctccaaggaaaaagggctgacaaagaagagaaccaaagtccagaagaagtcactgcttctcaagaaaccccttcgggttgacctcatcctcgagaacacatccaaagtccctgcccccaaagacgtcctcgcccaccaggtccccaacgccaagaagctcaggcggaaggagcagctatgggagaagctggccaagcagggcgagctgccccgggaggtgcgcagggcccaggcccggctcctcaacccttctgcaacaagggccaagcccgggccccaggacaccgtagagcggcccttctacgacctctgggcctcagacaaccccctggacaggccgttggttggccaggatgagtttttcctggagcagaccaagaagaaaggagtgaagcggccagcacgcctgcacaccaagccgtcccaggcacccgccgtggaggtggcgcctgccggagcttcctacaatccatcctttgaagaccaccagaccctgctctcagcggcccacgaggtggagttgcagcggcagaaggaggcggagaagctggagcggcagctggccctgcccgccacggagcaggccgccacccaggagtccacattccaggagctgtgcgaggggctgctggaggagtcggatggtgagggggagccaggccagggcgaggggccggaggctggggatgccgaggtctgtcccacgcccgcccgcctggccaccacagagaagaagacggagcagcagcggcggcgggagaaggctgtgcacaggctgcgggtacagcaggccgcgttgcgggccgcccggctccggcaccaggagctgttccggctgcgcgggatcaaggcccaggtggccctgaggctggcggagctggcgcggcggcagaggcggcggcaggcgcggcgggaggctgaggctgacaagccccgaaggctggggcggctcaagtaccaggcacctgacatcgacgtgcagctgagctcggagctgacagactcgctcaggaccctgaagcccgagggcaacatccttcgagaccggttcaagagcttccagaggaggaatatgatcgagcctcgagagagagccaagttcaaacgcaagtacaaggtgaagctggtggagaagcgggcgttccgtgagatccagttgtagctgccatcagatgccggagactcgcccttcaataaaaaatctcttctagctgatcagtggga

SEQ ID NO: 4107 - DNA, 978 bp, Homo Sapiens
  NM_015714
tggctctgaccgcgctggcctgggccggagagcccaggaggcgtgtctcagagaaaagatataagcggcccccggacgctaaagcggtgccagcggcggagtctccaactgggagagctgcagctgccgagaggaggagaacgctgaggtcggtcggaccaacggacgcgctgaccgctgccaactgcagctcgcgctgcctcctgctcgcgccgtgccactaaggtcattcccgcctccgagagcccagagccgagatggaaacggtccaggagctgatccccctggccaaggagatgatggcccagaagcgcaaggggaagatggtgaagctgtacgtgctgggcagcgtgctggccctcttcggcgtggtgctcggcctgatggagactgtgtgcagccccttcacggccgccagacgtctgcgggaccaggaggcagccgtggcggagctgcaggccgccctggagcgacaggctctccagaagcaagccctgcaggagaaaggcaagcagcaggacacggtcctcggcggccgggccctgtccaaccggcagcacgcctcctaggaactgtgggagaccagcggagtgggagggagacgcagtagacagagacagaccgagagaggaatggagagacagagggggcgcgcgcacaggagcctgactccgctgggagagtgcaggagcacgtgctgttttttatttggacttaacttcagagaaaccgctgacatctagaactgacctaccacaagcatccaccaaaggagtttgggattgagttttgctgctgtgcagcactgcattgtcatgacatttccaacactgtgtgaattatctaaatgcgtctaccattttgcactagggaggaaggataaatgctttttatgttattattattaattattacaatgaccaccattttgcattttgaaataaaaaaactttttataccataaaaaaaaaaaaaaaa

SEQ ID NO: 4108 - DNA, 2171 bp, Homo Sapiens
  NM_015720
gctgcaggcggcgacggctacaccatgggccggctgctgcgggccgcccggctgccgccgctgctttcgccgctgctgcttctgctggttgggggagcgttcctgggtgcctgtgtggctgggtctgatgagcctggcccagagggcctcacctccacctccctgctagacctcctgctgcccactggcttggagccactggactcagaggagcctagtgagaccatgggcctgggagctgggctgggagcccctggctcaggcttccccagcgaagagaatgaagagtctcggattctgcagccaccacagtacttctgggaagaggaggaagagctgaatgactcaagtctggacctgggacccactgcagattatgtttttcctgacttaactgagaaggcaggttccattgaagacaccagccaggctcaagagctgccaaacctcccctctcccttgcccaagatgaatctggttgagcctccctggcatatgcctcccagagaggaggaagaagaggaagaggaagaggaggagagggagaaggaagaggtagagaaacaagaggaggaggaagaggaggagctgctccctgtgaatggatcccaagaagaagccaagcctcaggtccgtgacttttctctcaccagcagcagccagaccccaggggccaccaaaagcaggcatgaagactccggggaccaggcctcatcaggtgtggaggtggagagcagcatggggcccagcttgctgctgccttcagtcaccccaactacagtgactccgggggaccaggactccaccagccaagaggcagaggccacagtgctgccagctgcagggcttggggtagagttcgaggctcctcaggaagcaagcgaggaagccactgcaggagcagctggtttgtctggccagcacgaggaggtgccggccttgccttcattccctcaaaccacagctcccagtggggccgagcacccagatgaagatccccttggctctagaacctcagcctcttccccactggcccctggagacatggaactgacaccttcctctgctaccttgggacaagaagatctcaaccagcagctcctagaagggcaggcagctgaagctcaatccaggataccctgggattctacgcaggtgatctgcaaggactggagcaatctggctgggaaaaactacatcattctgaacatgacagagaacatagactgtgaggtgttccggcagcaccgggggccacagctcctggccctggtggaagaggtgctgccccgccatggcagtggccaccatggggcctggcacatctctctgagcaagcccagcgagaaggagcagcaccttctcatgacactggtgggcgagcagggggtggtgcccactcaagatgtcctttccatgctgggtgacatccgcaggagcctggaggagattggcatccagaactattccacaaccagcagctgccaggcgcgggccagccaggtgcgcagcgactacggcacgctcttcgtggtgctggtggtcattggggccatctgcatcatcatcattgcgcttggcctgctctacaactgctggcagcgccggctgcccaagctcaagcacgtgtcgcacggcgaggagctgcgcttcgtggagaacggctgccacgacaaccccacgctggacgtggccagcgacagccagtcggagatgcaggagaagcaccccagcctgaacggcggcggggccctcaacggcccggggagctggggggcgctcatggggggcaagcgggaccccgaggactcggacgtgttcgaggaggacacgcacctgtgagcgcagccgaggcgcaggccgagtgggccgccaggaccaagcgaggtggaccccgaaacggacggcccggagcccgcaccagccccgcgcctacccgggccgcccccgcggcctggccctcggcgcgggctccttcccgcttcccccgacttcacacggcggcttcggaccaactccctcactcccgcccgaggggcaggcctcaaagcccgccttggccccgctttcccgcccctgaaccccggccccgcgggcggcgggcggcgcttcctgcgccccgggactcaattaaacccgcccggagaccacgccgggcccagcgcgtctgc

SEQ ID NO: 4109 - DNA, 3757 bp, Homo Sapiens
  NM_015721
aggcctaagcgcggccgccgtggctcctgcgtctcccatcgtgccgtgcgtcccgcgccgcgttcgagttctcggaggggagggggcgttagccccgcgcagccgccggcgtcgccgccatggacctaggacccttgaacatctgtgaagaaatgactattctgcatggaggcttcttgctggccgagcagctgttccaccctaaggcactggcagaattaacaaagtctgactgggaacgtgttggacggcccatcgtggaggccttaagggagatctcctcggctgcagcacactcccagccctttgcctggaagaagaaagccctgatcatcatctgggccaaggttctgcagccgcaccccgtgaccccgtccgacacagagacacggtggcaggaagacctgttcttctcggtgggcaacatgatccccaccatcaaccacaccatcctcttcgagctgctcaaatccctggaagcttctggactctttatccagctcctgatggccctgcccaccaccatctgccatgcagaactagagcgctttctggaacatgtgaccgttgacacttctgccgaagacgtggccttcttcctggacgtctggtgggaggtgatgaagcacaagggtcacccgcaggaccccctgctctcccagtttagtgcaatggcccataagtacctgcctgccttagatgagttcccccatcctccaaagaggcttaggtcagacccagacgcgtgccccaccatgcccctgttggccatgctgctccgcgggctgacacagatccagagtcggatcctgggcccggggaggaagtgctgtgcgctggccaacctggctgacatgctgactgtgtttgcgctgacagaggacgacccccaggaggtgtctgcaaccgtgtatctggacaaactggccacggtgatctctgtgtggaactcggacacccagaatccctaccaccagcaggcgctggcagagaaggtgaaggaggcagaacgggatgtcagcctgacctcgctggccaaactccccagtgagaccattttcgtgggctgcgagttcctgcaccacctgctgcgggagtggggggaggagttgcaggccgtgctccgcagcagccaggggacaagttacgacagctaccggctgtgcgacagtctgacttccttcagccagaacgcgacgctctacctgaaccgcaccagcctgtccaaggaggacaggcaggtggtctctgagctggcggagtgtgtcagggacttcctgaggaaaacgagcacggtgctgaagaacagggccttggaggatatcacagcttccattgccatggccgtcatccagcagaagatggaccgccatatggaagtgtgctacatttttgcctctgagaagaagtgggccttctcggacgagtgggtagcctgcctggggagtaacagggccctcttccgacagccagacttggtgttgaggctgctggaaacagtgatagacgtcagcacagctgacagagccatccctgagtctcagatccggcaggtgatccacctgatcctggaatgttacgcagacctctccctgccaggtaaaaataaagtccttgcaggtatcctgcgttcctgggggcgaaagggcctctctgaaaagttgctggcttatgtggagggttttcaggaagacctcaatacaacttttaaccagctcactcagagtgcctccgaacagggcttggcaaaagctgtggcctccgtggcccgcctggtcatagtgcacccggaagtcacggtgaagaaaatgtgcagcctggctgtggtcaatctcggcacccacaagttcctggcccagattctcactgccttccctgcccttaggtttgtggaagagcagggtcccaattcatctgccactttcatggtgtcatgcctcaaagaaaccgtctggatgaagttctctacacccaaggaagaaaagcaatttttagagctcctgaactgcctgatgagtcccgtgaaaccccaagggattccagtggctgctcttcttgagccagacgaggtgctgaaggaatttgtcctgcctttcttgaggttagatgttgaagaggtagacctcagtctgaggatcttcatccagactctagaggcaaacgcgtgccgagaggaatactggctccagacctgctccccgtttccactcctcttcagcttgtgccagctcttggaccgcttcagcaaatactggcagcttcccaaggagaagcggtgcctctctttggataggaaggatctagcgatccatatcctggagctcctgtgtgagattgtatcagccaatgctgagaccttctccccggatgtctggatcaagtccctgtcctggctccaccgcaagttagaacagctagactggactgtgggcctgaggctgaagagcttcttcgaggggcacttcaagtgtgaagtgccagccacactttttgagatctgtaagctttcagaagacgagtggacctcccaggcccacccagggtacggggctggcacggggctcctggcctggatggagtgctgctgcgtctccagcggcatctcggagaggatgctgtctctcttggtggtggacgtgggcaatcctgaggaggtcagactgttcagcaaaggctttctggtggccctggtgcaagtcatgccttggtgcagccctcaggagtggcagcgccttcaccagctgaccaggagactgctggagaagcagctcctccatgtcccttatagcctggaatatattcagtttgttcccctgctcaacctgaagccctttgcccaggagttgcaactctccgtcctcttcctgaggactttccagtttctctgcagccatagctgtcgtgattggcttcctctggaaggctggaaccacgtggtcaaactcctctgtggcagtctgacccgcctcctggactcagtcagggcgatacaggcagctggcccttgggttcaaggaccagagcaggacctgacccaggaagccctgtttgtttacacccaggtgttctgccatgctctgcacatcatggccatgctccacccggaggtctgtgagccactctacgttttagccttggaaaccctcacctgctatgagactttgagcaagaccaacccttctgtcagctccttgctccagagggcacacgagcagcgcttcttaaagtccattgctgagggcatcggccctgaagaacggcgccaaaccctgttgcagaagatgagcagcttctgacttggcgtggggagctgggccccaacatggcgggtctgcagaagatcagcagcttcttacctgtgcgggagcgaaaaagctgggcttcaacatggcaggtctgtaggggtcagacccgagcagcctggactttacagttatgtgaaactgtccacaaaaagtcatggcaataatggtgtaaagaaaatagtttcttgggtatttgtaacgtacaaactatcataaaaattctcctctttcgcatctcactttgtctcttctaagtcggcctcagcaatagcccaggattaaatatgctctgaaattgggtttagtgtcttcaagatcaaatccagccaggaggaacatgttcataactggacttttccatcctagattttggcaaataagcccaaagttgaaaccatgtgagtggaaaaagcattacatggtacgtataacccccaaaaaaaaaaaaaaaa

SEQ ID NO: 4110 - DNA, 3548 bp, Homo Sapiens
  NM_015723
acttccgctgggggcggagcggggcggggctgagtgggtggcgacctagctgctgcgccagtgtttgtgttggaagctcagctgatgcaggccggttggagtggacgtcattgccgggaacgagcgagtcgccgctgcagccctagtgactgcggcctgcatcccgattgtcttctcctccaaggtctacatgattacctgaagtttaataattttgcctttctagagtgttatacagctggaatcatactgctatggtccgaatgtttgtgcctctcaaaattcatgtggaaatcataaccgctaaagtgatggtattaagaggtaagaccatgaattatggcatttcttaaatgaagcgttcaagaagtgagagaatgtcatagaaaataaatgatttttaagttatgtctattaatctgactgtagatatatatatttacctccttagtaatgcaagaagtgtttgtgggaagcagagaagcaagcaactgtatttcttgttctcacctaagcattactggaggataagccacatcagtctacaaagaggttttcatacaaacataataagatgtaaatggaccaaaagtgaagcacattcttgcagtaagcactgttactctccaagcaaccatggtttacatattgggattttgaaacttagcacttctgctcccaagggacttacaaaagtgaacatttgtatgtcccgtattaaaagtactttgaactctgtttcaaaggctgtttttggcaatcaaaatgaaatgatttcacgtttagctcaatttaagccaagttcccaaattttaagaaaagtatcggatagtggctggttaaaacagaaaaacatcaaacaagccatcaaatctctgaaaaaatatagtgacaaatcagcagaaaagagtccttttccagaagagaaaagtcacattatagacaaagaagaagatataggtaaacgcagtctttttcattacacaagttctataaccacaaaatttggagactcattctactttttatcaaatcatattaattcatatttcaaacgtaaggaaaaaatgtctcaacaaaaggaaaatgaacatttccgggacaaatcagaacttgaagataaaaaggtagaagaggggaaattaagatctccagatcctggcatcctggcttataagccaggctcagaatctgtacatacggtggacaagcctacaagtccttctgcgatacctgatgttcttcaagtttcaactaaacaaagtattgctaactttctttctcgtcccacggaaggtgtacaagctttagtaggtggttatattggtggacttgtccccaaattaaagtatgattcaaagagtcagtcagaagaacaggaagagcctgctaaaactgatcaggctgtcagcaaagacagaaatgcagaggagaaaaagcgtttatctcttcagcgagaaaagattatcgcaagggtgagtattgataacaggacccgggcattagttcaggcattaagaagaacaactgacccaaagctctgcattactagggttgaagaactgacttttcatcttctagaatttcctgaaggaaaaggagtggctgtcaaggaaagaattattccatatttattacgactgagacaaattaaggatgaaactcttcaggctgcagttagagaaattttggccctaattggctatgtggatccagtgaaagggagaggaatccgaattctctcaattgatggtggaggaacaaggggcgtggttgctctccagaccctacgaaaattagttgaacttactcagaagccagttcatcagctctttgattacatttgtggtgtaagcacaggtgccatattagctttcatgttggggttgtttcatatgcccttggatgaatgtgaggaactttatcgaaaattaggatcagatgtattttcacaaaatgtcattgttggaacagtaaaaatgagttggagccatgcattttatgacagtcaaacatgggaaaacattcttaaggataggatgggatctgcactgatgattgaaacagcaagaaaccccacatgtcctaaggtagctgctgtaagtaccatagtaaatagagggataacacccaaagcttttgtgttcagaaactatggtcattttcctggaatcaactctcattatttgggaggctgtcagtataaaatgtggcaggccattagagcctcatctgctgctccaggctactttgcagaatatgcattgggaaatgatcttcatcaagatggaggtttgcttctgaataacccttcggcattagctatgcatgagtgtaaatgtctttggccagatgtgccgttagagtgcatagtatccctgggcactggacgttatgagagtgatgtgagaaacacggtaacatacacaagcttgaaaactaaactttctaatgttatcaacagtgctacagatacagaagaagtccatataatgcttgatggcctgttacctcctgacacctattttagattcaatcctgtaatgtgtgaaaacatacctctagatgaaagtcgaaatgaaaagctggatcagctgcagttggaagggttgaaatacatagaaagaaatgaacaaaaaatgaaaaaagttgcaaaaatattaagtcaagaaaaaacaactctgcagaaaattaatgattggataaaattaaaaactgatatgtatgaaggacttccattcttttcaaaattgtgatgagtatatgcttatgttctcataaatgaaggtctgtttagaagatcaaccacattcaataaggaattgtggggttcgacatgagttaactttgaaatacgtatgaattctggagaatcctgaaaaagacggtgcttcaaccagcttgcatagcacagagaatattcttggttacagaattcatatgggaactaggcttttaagatgttaataattagctaagctttagtaacccttactgtgctagtagattttagtagatattggtgttatattgtttgatgtttgaaaatatattaatatatgtgccgaacaagaaaccgaaagctatattgtactgtgtatttttactttagtcctcataatcatgttgaatttatgtgatcattgattttatttcatatggaaaagctaatttcttcttaaatttacattacctaatattctcactagctatgttctccaatccacactgccttttattgtaatatcatctaaatagatgcagaaaaatggaattttctctattaaagtattttacatttgacataaaaaagaaccagatacagttttctattcagatatgtttattttaacattgtttggttaaaaaaggtgaagttccagtcaaccactttttacccctgaaatttcaagataatgctatattaacttttccagatctaacactagcttattcttccctgttataaaatggtttgaacttactgaggagatattcctatcattaacaaaaataaactatttaaataaccaaaaaaaaaaaaaaaa

SEQ ID NO: 4111 - DNA, 7044 bp, Homo Sapiens
  NM_015833
ctgaggcgctgaggcggccgtggcggcggcggcggcggcggcggcagcggcggccaagcggccaggttggcggccggggctccgggccgcgcgaggccacggccacgccgcgccgctgcgcacaaccaacgaggcagagcgccgcccggcgcgagactgcggccgaagcgtggggcgcgcgtgcggaggaccaggcgcggcgcggctgcggctgagagtggagcctttcaggctggcatggagagcttaaggggcaactgaaggagacacactggccaagcgcggagttctgcttacttcagtcctgctgagatactctctcagtccgctcgcaccgaaggaagctgccttgggatcagagcagacataaagctagaaaaatttcaagacagaaacagtctccgccagtcaagaaaccctcaaaagtattttgccatggatatagaagatgaagaaaacatgagttccagcagcactgatgtgaaggaaaaccgcaatctggacaacgtgtcccccaaggatggcagcacacctgggcctggcgagggctctcagctctccaatgggggtggtggtggccccggcagaaagcggcccctggaggagggcagcaatggccactccaagtaccgcctgaagaaaaggaggaaaacaccagggcccgtcctccccaagaacgccctgatgcagctgaatgagatcaagcctggtttgcagtacacactcctgtcccagactgggcccgtgcacgcgcctttgtttgtcatgtctgtggaggtgaatggccaggtttttgagggctctggtcccacaaagaaaaaggcaaaactccatgctgctgagaaggccttgaggtctttcgttcagtttcctaatgcctctgaggcccacctggccatggggaggaccctgtctgtcaacacggacttcacatctgaccaggccgacttccctgacacgctcttcaatggttttgaaactcctgacaaggcggagcctcccttttacgtgggctccaatggggatgactccttcagttccagcggggacctcagcttgtctgcttccccggtgcctgccagcctagcccagcctcctctccctgtcttaccaccattcccacccccgagtgggaagaatcccgtgatgatcttgaacgaactgcgcccaggactcaagtatgacttcctctccgagagcggggagagccatgccaagagcttcgtcatgtctgtggtcgtggatggtcagttctttgaaggctcggggagaaacaagaagcttgccaaggcccgggctgcgcagtctgccctggccgccatttttaacttgcacttggatcagacgccatctcgccagcctattcccagtgagggtcttcagctgcatttaccgcaggttttagctgacgctgtctcacgcctggtcctgggtaagtttggtgacctgaccgacaacttctcctcccctcacgctcgcagaaaagtgctggctggagtcgtcatgacaacaggcacagatgttaaagatgccaaggtgataagtgtttctacaggaacaaaatgtattaatggtgaatacatgagtgatcgtggccttgcattaaatgactgccatgcagaaataatatctcggagatccttgctcagatttctttatacacaacttgagctttacttaaataacaaagatgatcaaaaaagatccatctttcagaaatcagagcgaggggggtttaggctgaaggagaatgtccagtttcatctgtacatcagcacctctccctgtggagatgccagaatcttctcaccacatgagccaatcctggaagggtctcgctcttacacccaggctggagtgcagtggtgcaatcatggctcactgcagcctcgacctcctgggctcttaagcgatccttccacctcaaccttccaaggagctgggactacagaaccagcagatagacacccaaatcgtaaagcaagaggacagctacggaccaaaatagagtctggtgaggggacgattccagtgcgctccaatgcgagcatccaaacgtgggacggggtgctgcaaggggagcggctgctcaccatgtcctgcagtgacaagattgcacgctggaacgtggtgggcatccagggatccctgctcagcattttcgtggagcccatttacttctcgagcatcatcctgggcagcctttaccacggggaccacctttccagggccatgtaccagcggatctccaacatagaggacctgccacctctctacaccctcaacaagcctttgctcagtggcatcagcaatgcagaagcacggcagccagggaaggcccccaacttcagtgtcaactggacggtaggcgactccgctattgaggtcatcaacgccacgactgggaaggatgagctgggccgcgcgtcccgcctgtgtaagcacgcgttgtactgtcgctggatgcgtgtgcacggcaaggttccctcccacttactacgctccaagattaccaagcccaacgtgtaccatgagtccaagctggcggcaaaggagtaccaggccgccaaggcgcgtctgttcacagccttcatcaaggcggggctgggggcctgggtggagaagcccaccgagcaggaccagttctcactcacgccctgacccgggcagacatgatggggggtgcagggggctgtgggcatccagcgtcatcctccagaacctcacatctgaactgggggcaggtgcataccttggggagggagtagggggacacgggggaccaccaggtgtccacggttgtccccagcatctcacatcagacctggggcaggtgcgcagtgtggggaggggatggggtgcgtcagggcccagcatcgccgcctggcatctctctgccgcagcatttccccttctgaaccgtccagtgactgctttcaatctcggtttacgtttagaaattgagttctactgagtagggcttccttaagtttaggaaaatagaaattactttgtgtgaaattcttgaataaataatttattcagagctaggaatgtggtttataaaataggaagtaattgtgtcaggtcacttttatgccacattattttaattgcaaaaaagcatctatatatggaggagggtgggaaaatagaggtaggaaatagtagcctaaaggaaatcgccacacgtctgtctaaacttaggtctcttttctccgtaggtacctccctgggtagttccacacactaggttgtaacagtctctccctgaggagcagactcccagcatggtgtagcgtggccctgtcatgcacatggggtcccgcagcagtgactgtgtgtcctgcagaggcgtgacccaggcccctgtagccctcagcctcctctagaagcttctgtactccttgtaggatcagatcatggaaaacttttctcagtttacttctaagtaatcacagataatacatggccagtaatcccaggctggccattcattcaggttttttaaaggatatttaacttttatggactagaaggaatcacgagggctactgcacaatacatggcctaagttccctctgttccttcctctgaatcgaatggatgtgggtgaccgcccgaaggccttcacaggatggaagtagaatgatttcagtagatactcattcttggaaaatgccatagttttaaattattgtttccagctttatcaaagacatgtttgaaaaataaaaagcatccaagtgagagctggtgagaccacgtgctgctggcgtagtgtaggccagacattgacagtcctgacgggagctcagggctgcccagcgcccagcgtgcacgggacggccccacgacagagggagtcagcccgggaggtcaggagcgcggcgggcgagggccctgtgtggaccacctccaccaagctcagagatttgcaccaggtgccttgttgcctccgctcaggatgaaagaggagctgagagaagtgctctgcctgccagtgcagtgcccagctccaaggctctagagggtgttcaggtgggtctcctggggccatggggagagattggtgcagaccttaccccacagcatacacctgccacagcgaaatccagggtgttggcacctgtgtgtccgtgatgagcctaggaaaccagagcaggggcagaggggcgtcatcctcccaccggacgctgggagctcagaccccaaaactgaaacaccgtggcttcggcggggggtgtgcctcctgatgtcaggagccccatccacgtgtgtccacacagatctcgtcgcagcacggcaggaaggggtgctgcttagggctcattgttggggacatgaccgggttcagcggctagaacatctgccccacagcagcctcctcctccaccgaagagggtagttgtctccctgaagcagtcacagcaggcgtctctgccgctccgtcaccacagtggggttttgttcaggcagatcgcgctggggttctgcacctgcagaaggagaggggtctgttgtcgctggctttcccccaagcaggctcttgcacactctagaaaaaacaccttgtaagtctgtgcatttttattgtcttgataaattgtatttttttctaatggggattgggagatggacttcgtttttaaaaatatgtggattttggttaccaagtttagtgttaatatattccatatacatacaaaactacccggtatgtctggcttttcccttctgtcaggtaatagctaaagtcagcatgattgctccctgtaccaccccaaataagtgagtgcctcaccttgtggggcctgagcagctaccttgagaccatgtgaggtggcacctttccggggtggactcgtgcggccttgaggacaggcacagggcaccctatcccaagccgtccaggcaggaggaaggcagccaaggcaactgggttctgggagccctgggtggggcagctgtggggaggaactgggttcggggagccctgggcggggcggctgttggggggaactgggttcggggtgccctgggcagggggctactggggggcggctgtgaggaggagttgggttcagggagccctgggcggggtggctgtcagggggaactgggttccgggagccctgggccggggcagggggcggctgtaggaaggaactggtttcggggagccctgggcggggcggctgtggggaggaaggtgacgtgcaggggaccagaggctctgcactgctcctaggacagctcatctgtaatcagaaaaaaaataaacaaaatacagaacgctgactcctccgtgagacagatcggggaccttagcactttaatccctcccttctgagcgctcggtgtgcacttttagactatagctgtttcattgacgtgtcactctccatccagtgtccttgatgtggcttttagagacttagcagaaaattcgacacaagcaggaacttgattttttaagaaaaaatattacattttgaggacattttgacaagtaggggaagagagggcttctgttgttttgttttgttttgttttgttaactaaacctgaagtattaattccacaaagacactgtccctcaggaccactcaggtacagctctgccagggacagagtcctgctagtgggaggtctcaggtggggcggtgtgttctgtgccatgaggcagcgacaggtccagatggatgtcgtcaccaccttcctcagctctcatcacctggtcgtacgccaggcccacctcttcccagcaagggacgccaaagaactgcagtttttattctgagtcttaatttaacttttcatcatcttttcctattttggagaattttttgtaattaaaagcaattattttaaaatgtgcaagccagtatctcacaaggcatggatttctgtggaatttatttttattcaaataaccatatttatctccaggctgtggaatcgccactttctttgtgaagacagtgtctctccttgtaatctcacacaggtacactgaggaggggacggctccgtcttcacattgtgcacagatctgaggatgggattagcgaagctgtggagactgcacatccggacctgcccatgtctcaaaacaaacacatgtacagtggctctttttccttctcaaacactttaccccagaagcaggtggtctgccccaggcataaagaaggaaaattggccatctttcccacctctaaattctgtaaaattatagacttgctcaaaagattcctttttatcatccccacgctgtgtaagtggaaagggcattgtgttccgtgtgtgtccagtttacagcgtctctgccccctagcgtgttttgtgacaatctccctgggtgaggagtgggtgcacccagccccgaggccagtggttgctcggggccttccgtgtgagttctagtgttcacttgatgccggggaatagaattagagaaaactctgacctgccgggttccagggactggtggaggtggatggcaggtccgactcgaccatgacttagttgtaagggtgtgtcggctttttcagtctcatgtgaaaatcctcctgtctctggcagcactgtctgcactttcttgtttactgtttgaagggacgagtaccaagccacaagaacacttcttttggccacagcataagctgatggtatgtaaggaaccgatgggccattaaacatgaactgaacggttaaaagcacagtctatggaacgctaatggagtcagcccctaaagctgtttgctttttcaggctttggattacatgcttttaatttgattttagaatctggacactttctatgaatgtaattcggctgagaaacatgttgctgagatgcaatcctcagtgttctctgtatgtaaatctgtgtatacaccacacgttacaactgcatgagcttcctctcgcacaagaccagctggaactgagcatgagacgctgtcaaatacagacaaaggatttgagatgttctcaataaaaagaaaatgtttcactactcaaaaaaaaaaaaaaaaa

SEQ ID NO: 4112 - DNA, 3116 bp, Homo Sapiens
  NM_015844
aaagcgcatgcgccagctagatgggcagcgaggagagccgcaactgccagtccctcgaaggggttagctgtcgttgaacgtcagcacgcagatgcaactggctctcggcaggggggcgcgcgcaccgctgcggagcgccggcccgtaggcgcgggagcctccctattaagggcacgcgacatcgaggcaatagtgcgcaggtgcttagccagaggcggagcccgagaggcaggcagcggacttccggttccgggagcaacgaacagccgcggaggcgacagctaccgcttcagaggaggcggccgcggaggaggaggaaggggaggagggcgaggcgggaggtgcaggagggaccctcgccatgggtccacgggcctagagtggcggaagataccggcctggtgccaaactggctactgctgcttcctgtggcctccatggctgaggactggctggactgcccggccctgggccctggctggaagcgccgcgaagtctttcgcaagtcaggggccacctgtggacgctcagacacctattaccagagccccacaggagacaggatccgaagcaaagttgagctgactcgatacctgggccctgcgtgtgatctcaccctcttcgacttcaaacaaggcatcttgtgctatccagcccccaaggcccatcccgtggcggttgccagcaagaagcgaaagaagccttcaaggccagccaagactcggaaacgtcaggttggaccccagagtggtgaggtcaggaaggaggccccgagggatgagaccaaggctgacactgacacagccccagcttcattccctgctcctgggtgctgtgagaactgtggaatcagcttctcaggggatggcacccaaaggcagcggctcaaaacgttgtgcaaagactgtcgagcacagagaattgccttcaaccgggaacagagaatgtttaagcgtgtgggctgtggggagtgtgcagcctgccaggtaacagaagactgtggggcctgctccacctgcctcctgcagctgccccatgatgtggcatcggggctgttctgcaagtgtgaacggagacgctgcctccggattgtggaaaggagccgagggtgtggagtatgccggggctgtcagacccaagaggattgtggccattgccccatctgccttcgccctccccgccctggtctcaggcgccagtggaaatgtgtccagcgacgttgcctacggggtaaacatgcccgccgcaagggaggctgtgactccaagatggctgccaggcggcgccccggagcccagccactgcctccaccacccccatcacagtccccagagcccacagagccgcaccccagagccctggccccctcgccacctgccgagttcatctattactgtgtagacgaggacgagctaaagcggctgctgcccagtgtctggtcagagtctgaggatggggcaggatcgcccccaccttaccgtcgtcgaaagaggcccagctctgcccgacggcaccatcttggccctaccttgaagcccaccttggctacacgcacagcccaaccagaccatacccaggctccaacgaagcaggaagcaggtggtggctttgtgctgcccccgcctggcactgaccttgtgtttttacgggaaggcgcaagcagtcctgtgcaggtgccgggccctgttgcagcttccacagaagccctgttgcaggaggcccagtgctctggcctgagttgggttgtggccttaccccaggtgaagcaagagaaggcggatacccaggacgagtggacaccaggcacagctgtcctgacttctcccgtattggtgcctggctgccctagcaaggcagtagacccaggcctgccttctgtgaagcaagagccacctgacccagaggaggacaaggaggagaacaaggatgattctgcctccaaattggccccagaggaagaggcaggaggggctggcacacccgtgatcacggagattttcagcctgggtggaacccgcttccgagatacagcagtctggttgccaaggtccaaagaccttaaaaaacctggagctagaaagcagtagactggaggcttctacagactgtaggattcaagtctgcagggcaggcactcgggaagggaagatggatgtaaagtgtgggagaccgaggacacagtggagcccacgagcacgagctggaacccacgaggatggcctggaacccatgtcagtctctcaccacctccagcttcgatgatgtgggtgtcctgcagaagaagctggtgcccttcctcacagagttaaatatgcatctggcccaggaattagagaagctgaaaggatgatcctggggaaggtggagcagctgcaggcctggctgcaggcctgactactgcccacaccaacgaggtgatctagcagatacatggcaacgtgtgaactgcaacaacgcctggtgccccagcaccaaccttccaagtgtaaaaacaatgtgctgctgcttcacttccgccctccggttatcaagcaaaatgtctcttgtggcccatcttactggaagagagttccgggaaacatagcctcaccaaggtgacacattacaaagccaccctaccatgaatccgctcccaagggtctcactgctcacctgaggataactcaatataactatgtggctgaaaatgcaaagctgaagaccatggatttcatggtgattccagcaagtacagagattctatgaagcccacccagaaaaaacttgctggtcctggctatttttgtgtcatttattcaagtattgagaacctggcctgtggtaggcactgtacttaatactaggatacagaaatgcaaaagatacggcccatgcaattttattaaatgcatcaatatgtattacaaatggtgaatggatttccaactttatcatggaatttaatgctgaatatatagaattcagaaaattgttgggaggacagcccttttgtgaaccttgtttggggcacagtaggaattggaaataatttagtttctatctctaagctgttctattttaaaattatttttaaatttttattgtcccacttaaaaaaaaaaaaaaaaaaaaaaaaa

SEQ ID NO: 4113 - DNA, 3005 bp, Homo Sapiens
  NM_015845
aaagcgcatgcgccagctagatgggcagcgaggagagccgcaactgccagtccctcgaaggggttagctgtcgttgaacgtcagcacgcagatgcaactggctctcggcaggggggcgcgcgcaccgctgcggagcgccggcccgtaggcgcgggagcctccctattaagggcacgcgacatcgaggcaatagtgcgcaggtgcttagccagaggcggagcccgagaggcaggcagcggacttccggttccgggagcaacgaacagccgcggaggcgacagctaccgcttcagaggaggcggccgcggaggaggaggaaggggaggagggcgaggcgggaggtgcaggagggaccctcgccatgggtccacgggcctagagtggcggaagataccggcctggtgccaaactggctactgctgcttcctgtggcctccatggctgaggactggctggactgcccggccctgggccctggctggaagcgccgcgaagtctttcgcaagtcaggggccacctgtggacgctcagacacctattaccagagccccacaggagacaggatccgaagcaaagttgagctgactcgatacctgggccctgcgtgtgatctcaccctcttcgacttcaaacaaggcatcttgtgctatccagcccccaaggcccatcccgtggcggttgccagcaagaagcgaaagaagccttcaaggccagccaagactcggaaacgtcaggttggaccccagagtggtgaggtcaggaaggaggccccgagggatgagaccaaggctgacactgacacagccccagcttcattccctgctcctgggtgctgtgagaactgtggaatcagcttctcaggggatggcacccaaaggcagcggctcaaaacgttgtgcaaagactgtcgagcacagagaattgccttcaaccgggaacagagaatgtttaagcgtgtgggctgtggggagtgtgcagcctgccaggtaacagaagactgtggggcctgctccacctgcctcctgcagctgccccatgatgtggcatcggggctgttctgcaagtgtgaacggagacgctgcctccggattgtggaaaggagccgagggtgtggagtatgccggggctgtcagacccaagaggattgtggccattgccccatctgccttcgccctccccgccctggtctcaggcgccagtggaaatgtgtccagcgacgttgcctacggggtaaacatgcccgccgcaagggaggctgtgactccaagatggctgccaggcggcgccccggagcccagccactgcctccaccacccccatcacagtccccagagcccacagagccgcagccctacacgaaccgccggcagaaccgcaagtgcggggcctgtgcagcctgcctacggcggatggactgtggccgctgcgacttctgctgcgacaagcccaaattcgggggcagcaaccagaagcgccagaagtgtcgttggcgccaatgcctgcagtttgccatgaagcggctgctgcccagtgtctggtcagagtctgaggatggggcaggatcgcccccaccttaccgtcgtcgaaagaggcccagctctgcccgacggcaccatcttggccctaccttgaagcccaccttggctacacgcacagcccaaccagaccatacccaggctccaacgaagcaggaagcaggtggtggctttgtgctgcccccgcctggcactgaccttgtgtttttacgggaaggcgcaagcagtcctgtgcaggtgccgggccctgttgcagcttccacagaagccctgttgcaggcagtagacccaggcctgccttctgtgaagcaagagccacctgacccagaggaggacaaggaggagaacaaggatgattctgcctccaaattggccccagaggaagaggcaggaggggctggcacacccgtgatcacggagattttcagcctgggtggaacccgcttccgagatacagcagtctggttgccaagtctgcagggcaggcactcgggaagggaagatggatgtaaagtgtgggagaccgaggacacagtggagcccacgagcacgagctggaacccacgaggatggcctggaacccatgtcagtctctcaccacctccagcttcgatgatgtgggtgtcctgcagaagaagctggtgcccttcctcacagagttaaatatgcatctggcccaggaattagagaagctgaaaggatgatcctggggaaggtggagcagctgcaggcctggctgcaggcctgactactgcccacaccaacgaggtgatctagcagatacatggcaacgtgtgaactgcaacaacgcctggtgccccagcaccaaccttccaagtgtaaaaacaatgtgctgctgcttcacttccgccctccggttatcaagcaaaatgtctcttgtggcccatcttactggaagagagttccgggaaacatagcctcaccaaggtgacacattacaaagccaccctaccatgaatccgctcccaagggtctcactgctcacctgaggataactcaatataactatgtggctgaaaatgcaaagctgaagaccatggatttcatggtgattccagcaagtacagagattctatgaagcccacccagaaaaaacttgctggtcctggctatttttgtgtcatttattcaagtattgagaacctggcctgtggtaggcactgtacttaatactaggatacagaaatgcaaaagatacggcccatgcaattttattaaatgcatcaatatgtattacaaatggtgaatggatttccaactttatcatggaatttaatgctgaatatatagaattcagaaaattgttgggaggacagcccttttgtgaaccttgtttggggcacagtaggaattggaaataatttagtttctatctctaagctgttctattttaaaattatttttaaatttttattgtcccacttaaaaaaaaaaaaaaaaaaaaaaaaa

SEQ ID NO: 4114 - DNA, 1307 bp, Homo Sapiens
  NM_015853
ggctgctatagagccgggtgagagagcgagcgcccgtcggcgggtgtcgagggcgggttgcctcgcgctgacccttcccgccctccttctcgtcacacaccaggtccccgcggaagccgcggtgtcggcgccatggcggagctgacggctcttgagagtctcatcgagatgggcttccccaggggacgcgcggagaaggctctggccctcacagggaaccagggcatcgaggctgcgatggactggctgatggagcacgaagacgaccccgatgtggacgagcctttagagactccccttggacatatcctgggacgggagcccacttcctcagagcaaggcggccttgaaggatctggttctgctgccggagaaggcaaacccgctttgagtgaagaggaaagacaggaacaaactaagaggatgttggagctggtggcccagaagcagcgggagcgtgaagaaagagaggaacgggaggcattggaacgggaacggcagcgcaggagacaagggcaagagttgtcagcagcacgacagcggctacaggaagatgagatgcgccgggctgctgaggagaggcggagggaaaaggccgaggagttagcagccagacaaagagttagagaaaagatcgagagggacaaagcagagagagccaagaagtatggtggcagtgtgggctctcagccacccccagtggcaccagagccaggtcctgttccctcttctcccagccaggagcctcccaccaagcgggagtatgaccagtgtcgcatacaggtcaggctgccagatgggacctcactgacccagacgttccgggcccgggaacagctggcagctgtgaggctctatgtggagctccaccgtggggaggaactaggtgggggccaggaccctgtgcaattgctcagtggcttccccagacgggccttctcagaagctgacatggagcggcctctgcaggagctgggtatggctgcaagactagaaaccaggactagaaactgggggagtagggaggcatgcctaggaaaaggagggatgcaaagagaaggggctttgtgaacatggtgcaaggccaggaattttgggagcaaaaaccaagtatccttgtggttcaagcctgttttcttccatcttcaggactcgtgccttctgctgttctcattgtggccaagaaatgtcccagctgagggcctttgtcccattgtccctctgtgaccccttcatctttgataaagcactgacatctccttcctaataaatagaccctgagttctgtaaaaaaaaaaaaaaaaaaa

SEQ ID NO: 4115 - DNA, 3971 bp, Homo Sapiens
  NM_015865
acacagagcagagtggggctctgagtatataactgttaggtgcctccctccagcaccatctcctgagaagcactctcccttgtcgtggaggtgggcaaatctttatcagccactgccttctgctgccaggaagccagctagagtggtctttaaagaaaactgggcatctcctgctacttaaaatcaaaaactacctaaaataaagattatagagccagaggaagagatagccatggaggacagccccactatggttagagtggacagccccactatggttaggggtgaaaaccaggtttcgccatgtcaagggagaaggtgcttccccaaagctcttggctatgtcaccggtgacatgaaagaacttgccaaccagcttaaagacaaacccgtggtgctccagttcattgactggattctccggggcatatcccaagtggtgttcgtcaacaaccccgtcagtggaatcctgattctggtaggacttcttgttcagaacccctggtgggctctcactggctggctgggaacagtggtctccactctgatggccctcttgctcagccaggacaggtcattaatagcatctgggctctatggctacaatgccaccctggtgggagtactcatggctgtcttttcggacaagggagactatttctggtggctgttactccctgtatgtgctatgtccatgacttgcccaattttctcaagtgcattgaattccatgctcagcaaatgggacctccccgtcttcaccctccctttcaacatggcgttgtcaatgtacctttcagccacaggacattacaatccgttctttccagccaaactggtcatacctataactacagctccaaatatctcctggtctgacctcagtgccctggagttgttgaaatctataccagtgggagttggtcagatctatggctgtgataatccatggacagggggcattttcctgggagccatcctactctcctccccactcatgtgcctgcatgctgccataggatcattgctgggcatagcagcgggactcagtctttcagccccatttgagaacatctactttggactctggggtttcaacagctctctggcctgcattgcaatgggaggaatgttcatggcgctcacctggcaaacccacctcctggctcttggctgtgccctgttcacggcctatcttggagtcggcatggcaaactttatggctgaggttggattgccagcttgtacctggcccttctgtttggccacgctattgttcctcatcatgaccacaaaaaattccaacatctacaagatgcccctcagtaaagttacttatcctgaagaaaaccgcatcttctacctgcaagccaagaaaagaatggtggaaagccctttgtgagaacaagccccatttgcagccatggtcacgagtcatttctgcctgactgctccagctaacttccagggtctcagcaaactgctgtttttcacgagtatcaactttcatactgacgcgtctgtaatctgttcttatgctcattttgtattttcctttcaactccaggaatatccttgagcatatgagagtcacatccaggtgatgtgctctggtatggaatttgaaaccccaatggggccttggcactaagactggaatgtatataaagtcaaagtgctccaacagaaggaggaagtgaaaacaaactattagtatttattgatattcttggtgtttagctggctcgatgatgttaacagtattaaaaattaaaccccataaaccaactaagccttatggaattcacagtcacaaaatcgaagttaatccagaattctgtgataagcagcttggctttttttttaaatcaatgcaagttacacattatagccagaatctgtatcacagaggtgcaagctgacagcagagctcagtccccacttcctgcaaacaatggcctgcaccctatcccttgtgtgtgtgacattctctcatgggacaatgttggggtttttcagactgacaggactgcaagagggagaaaggaattttgtcaatcaaaattattctgtattgcaacttttctcagagattgcaaaggattttttaggtagagattatttttccttatgaaaaatgatctgttttaaatgagataaaataggagaagttcctggcttaacctgttcttacatattaaagaaaagttacttactgtatttatgaaatactcagcttaggcatttttactttaacccctaaattgattttgtaaatgccacaaatgcatagaattgttaccaacctccaaagggctctttaaaatcatattttttattcatttgaggatgtcttataaagactgaaggcaaaggtcagattgcttacgggtgttatttttataagttgttgaattccttaatttaaaaaagctcattattttttgcacactcacaatattctctctcagaaatcaatggcatttgaaccaccaaaaagaaataaagggctgagtgcggtggctcacgcctgtaatcccagcactttggggagcccaggcgggcagattgcttgaacccaggagttcaagaccagcctgggcagcatggtgaaaccctgtatctacaaaaaatacaaaaattagccaggcatggtggtgggtgcctgtagttccagctacttgggaggctgaggtgggaaaatgacttgagcccaggaggaggaggctgcagtgagctaagattgcaccactgcactccaacctgggcgacaagagtgaaactgtgtctctcaaaaaaaaaaaaaaacaaacaaaaacaaaaacaaaacaaaacaaaacaaaacaaaacaggtaaggattcccctgttttcctctctttaattttaaagttatcagttccgtaaagtctctgtaaccaaacatactgaagacagcaacagaagtcacgttcagggactggctcacacctgtaatcccagcactttgggagatggaggtaaaaggatctcttgagcccaggagttcaagaccagcttgggcaacatagcaagactccatctcttaaaaaataaaaatagtaacattagccaggtgtagcagcacacatctgcagcagctactcaggaggctgaggtggaaagatcgcttgtgcacagaagttcgaggctgcagtgagctatatgatcatgtcactgcactccagcctgtgtgaccgagcaagaccctatctcaaaaaaattaattaattaattaattaattaatttaaaaaggaagtcatgttcatttactttccacttcagtgtgtatcgtgtagtattttggaggttggaaagtgaaacgtaggaatcctgaagattttttccacttctagtttgcagtgctcagtgcacaatatacattttgctgaatgaataaacagaaatagggaagtaaacctacaaatattttagggagaagctcacttcttccttttctcaggaaaccaagcaagcaaacatatcgttccaattttaaaacccagtgaccaaagcctttggaactatgaatttgcaactgtcataggtttatggatattgctgtggagaagctcaattttcagtgtttgaactgaaccctttcttgttagggaacgtgtgaaagaagaattgtggggaaaaaaaagcaagcataaccaaagatcatcagcagtgaagaatctaggctgtggctgagagaaccagaggcctctaaaatggacccgagtcgatcttcagaacagggatctaccatgcaggagcttcttgtgctcacacaaatctgtaaatgggaacattgtacattgtcgaatttaaatgatattaattttctcaagctatttttgttactattttcctaaaattgaatatttgcagggagcacttatactttttcctaatgtctgtataacaaatttctatgcaagtacatgaataaattatgctcacagctca

SEQ ID NO: 4116 - DNA, 1820 bp, Homo Sapiens
  NM_015869
ttcaagtctttttcttttaacggattgatcttttgctagatagagacaaaatatcagtgtgaattacagcaaacccctattccatgctgttatgggtgaaactctgggagattctcctattgacccagaaagcgattccttcactgatacactgtctgcaaacatatcacaagaaatgaccatggttgacacagagatgccattctggcccaccaactttgggatcagctccgtggatctctccgtaatggaagaccactcccactcctttgatatcaagcccttcactactgttgacttctccagcatttctactccacattacgaagacattccattcacaagaacagatccagtggttgcagattacaagtatgacctgaaacttcaagagtaccaaagtgcaatcaaagtggagcctgcatctccaccttattattctgagaagactcagctctacaataagcctcatgaagagccttccaactccctcatggcaattgaatgtcgtgtctgtggagataaagcttctggatttcactatggagttcatgcttgtgaaggatgcaagggtttcttccggagaacaatcagattgaagcttatctatgacagatgtgatcttaactgtcggatccacaaaaaaagtagaaataaatgtcagtactgtcggtttcagaaatgccttgcagtggggatgtctcataatgccatcaggtttgggcggatgccacaggccgagaaggagaagctgttggcggagatctccagtgatatcgaccagctgaatccagagtccgctgacctccgggccctggcaaaacatttgtatgactcatacataaagtccttcccgctgaccaaagcaaaggcgagggcgatcttgacaggaaagacaacagacaaatcaccattcgttatctatgacatgaattccttaatgatgggagaagataaaatcaagttcaaacacatcacccccctgcaggagcagagcaaagaggtggccatccgcatctttcagggctgccagtttcgctccgtggaggctgtgcaggagatcacagagtatgccaaaagcattcctggttttgtaaatcttgacttgaacgaccaagtaactctcctcaaatatggagtccacgagatcatttacacaatgctggcctccttgatgaataaagatggggttctcatatccgagggccaaggcttcatgacaagggagtttctaaagagcctgcgaaagccttttggtgactttatggagcccaagtttgagtttgctgtgaagttcaatgcactggaattagatgacagcgacttggcaatatttattgctgtcattattctcagtggagaccgcccaggtttgctgaatgtgaagcccattgaagacattcaagacaacctgctacaagccctggagctccagctgaagctgaaccaccctgagtcctcacagctgtttgccaagctgctccagaaaatgacagacctcagacagattgtcacggaacacgtgcagctactgcaggtgatcaagaagacggagacagacatgagtcttcacccgctcctgcaggagatctacaaggacttgtactagcagagagtcctgagccactgccaacatttcccttcttccagttgcactattctgagggaaaatctgacacctaagaaatttactgtgaaaaagcattttaaaaagaaaaggttttagaatatgatctattttatgcatattgtttataaagacacatttacaatttacttttaatattaaaaattaccatattatgaaattgctgatagta

SEQ ID NO: 4117 - DNA, 653 bp, Homo Sapiens
  NM_015871
ctgacgtagctgatcggcccggaagtgctcacacgtgtgctccctgccctgctcctggccccttggccggccgggctgtttctggccatgggtcgctcccgccggacaggcgcgcaccgagcgcactctctagcccggcagatgaaggcgaagcggcggcggccggacttggatgagattcaccgcgagctgcggcctcagggatccgcacgaccccagcccgacccaaacgccgagttcgaccccgacctgccagggggcggtctgcaccgctgtctggcctgcgcgaggtacttcatcgattccaccaacctgaagacccacttccgatccaaagaccacaagaaaaggctgaagcagctgagcgtcgagccctacagtcaggaagaggcggagagggcagcgggtatgggatcctatgtgccccccaggcggctggcagtgcccacggaagtgtccactgaggtccctgagatggatacctctacctgacatggcctgaagatgcagggcagaggaattgcccatggacagtgacgcaaggactaggctgggagggagcgtgccaaccccttttgcctctgggtttggggagcggagggcctcttcttggtgccctgccccaaataaaggaactggacaaagagaaaaaa

SEQ ID NO: 4118 - DNA, 3630 bp, Homo Sapiens
  NM_015872
gggagggatggggggaaagcaagctggaggacaggtgagacagcaggacaggaccggagcagggccccaagcccccgggcctggtgggggacgcgcttcttcccacactgtgagcctcagcagctccagccagcggacccgacggctgagaggagaagatggggagccccgaggatgacctgattgggattccattcccggaccacagcagtgagctcctgagctgcctcaatgagcagcgccagctgggccacctatgtgacctcaccatccggacgcagggccttgaataccgcacccacagggctgtgctagctgcctgtagccactacttcaagaagcttttcactgagggcggtggcggagctgtcatgggggccgggggtagcgggacggccactgggggagcaggggccggtgtgtgtgagctggactttgtagggccagaggcactaggcgccctccttgaatttgcctatacagccacactgaccaccagcagcgccaacatgccagctgtgctccaggctgcccgcctgctggagatcccgtgtgtcatcgctgcttgcatggagattctgcagggcagtgggctagaagctcccagcccggacgaggatgactgtgagcgagcccgccagtatctggaggcctttgccacagccacggcctctggagttcccaatggtgaagacagtcctccacaggtgcccctcccaccacctccgccaccgccacctcggcctgttgcccgccgcagccgcaagccccggaaagctttcctgcaaaccaagggggccagagcaaaccacctagtccctgaggtgcccacagtgcccgcccatcccttgacctatgaggaggaggaggtggcgggcagagtgggcagcagtgggggcagtgggccgggggacagctacagccctcccacaggaactgcctcccctcctgagggtccccagagctacgaaccctatgagggtgaggaagaagaagaggagctggtatatcccccagcctatgggctggcgcagggtggcgggcccccgctgtccccagaggagctgggctcagatgaggatgccatcgatcctgacctgatggcctacctaagctccctgcaccaggacaacctggcaccaggcctggacagccaagacaagctggtgcgcaaacgccgctcccagatgcctcaggagtgccctgtctgccacaagatcatccatggggcaggcaaactgcctcgccacatgaggacccacacaggcgagaagccctttgcctgcgaggtctgcggtgttcgattcaccaggaacgacaagctgaagatccacatgcggaagcacacgggagagcgcccctactcatgcccgcactgcccagcccgcttcctgcacagctacgacctcaagaaccacatgcacctgcacacaggggaccggccctatgagtgccacctgtgccacaaggctttcgccaaggaggaccacctgcagcgccacctcaaaggccagaactgcctggaggtgcgcacccgacggcgccgcaaggacgatgcaccaccccactacccaccaccctctaccgctgctgcatcccccgctggcctcgacctctccaatggccacctggacaccttccgcctctctctagctcgattctgggagcagtcagcccccactgggcccccggtctctaccccagggccccctgatgacgatgaggaggaaggggcacccaccacaccccaggctgaaggtgccatggagtcctcttaaagagggacgagggccagactgaagcagcacaaggccggggacacccatgccaagcagtgggagcacgcaggacagacacagcaggggtctggggcacggagccttgctggcatcagcatcagcccttcctcccagagccctcattccaattccaagctaagaaggtattggggcagaggctccccaaattggggtgatcccccaaggagtgatacatatattgtgtatatatttacagctgtattgtaaaagtggggtccctgtccccagctgctcctggggagtagaagcaataatgtatttctaatttgtgggtcccacttcggctatgcgggtttctagggggtgggggcttgggaccaaagccttgccccgcccctatgccccttgggggttttggctgtgtaagggggtgaaggactgcccctccctttcgagacccctccttcctggtttctgttcctttttcctggcagtgaattatgcaaagggggccggcaaaggaagggtaggtgggggaaagccaggtggaagcttgaaagactgggggactgggcctgtaaggaaggagccatcccagtccccctccgccctgctcccggcgctgagtcatggggtcgtggagaagggggcggggtggcctgattggctcgcctgcccctgggggcagtagaggggccccgcccagctaggggagccgctccgttccactcccctccctagccctccctccccacggccctgggcagggaatgtcttgttcccgccgctccctccccggggccagagggcagggcgggccgggcggcgtcctaccctcttctcctcctccccatctcctccccgcccaggtgcgagccggagccgccgccaccgctgccgcccctgactcacgccgcccccgggctggcgcagcgaagggtgtgggacagggtaaggggttggaagagccttgtggagagcgggcgagccggcgccatctggcggccatgctctgagtgggcgagcgccccccgcggccactggagcgagctgtcttcacgctcctcatccaccccagctggtgagcggcgcccccttgccaaggcagtgggcacagaacttctcgcttggccgcaggggaaggggctgcggacctgtgggaaagtgatccccttcccagatccttgccagccgggcttcctgtcaggcaggggagaataatccccactctgctcttaggattgaatccacccccattctgtacatagcctcttctgttggtcttgttgaaatctagtttcagatttttaactacccaattctgctgggggtgggggacacccccccttcctcgctgggtgctggaccccttttgcagcctgggctctgccttgcactatttccccttcctggcctgacggctcctccccctccttaaaaggggcaggttcaggggcccggtgctcttcctcccttccatgcacccccatgcccatttgcacagctgcccaggtacccctaacagtggggaggggtcacagggagggggtagcgggaccagtccctgttatctatttaaaaagtgatgatgtaatatattggggtggcggggagatcgggttgtcctgggcctcatcttagcatttcaggtgatggggggagcccagggctggggagacctggggcccagccccagaaagtggggacaatgtggcctcccttctccctactttcggctttcccagtcagtgccttagggggagaggcactccccccctcctattcccttccccccaccccaactcccccacctcgggtgtaagcgacaggaagaaataataataatttaagattcaaaaaaaaaaaaaaa

SEQ ID NO: 4119 - DNA, 6732 bp, Homo Sapiens
  NM_015886
agcattcaaaccttgcagagctttgctctcagagagtttgtaaaaagacacactcctcttacaagagttcatgctaccacatagcaaagaaccttaaatttttggaagaacaatatattcattttggcattgtgcagagcaaagtaaactcggtggcctcttcttctccacccctcaaaatgatagcaatctctgccgtcagcagtgcactcctgttctcccttctctgtgaagcaagtaccgtcgtcctactcaattccactgactcatccccgccaaccaataatttcactgatattgaagcagctctgaaagcacaattagattcagcggatatccccaaagccaggcggaagcgctacatttcgcagaatgacatgatcgccattcttgattatcataatcaagttcggggcaaagtgttcccaccggcagcaaatatggaatatatggtttgggatgaaaatcttgcaaaatcggcagaggcttgggcggctacttgcatttgggaccatggaccttcttacttactgagatttttgggccaaaatctatctgtacgcactggaagatatcgctctattctccagttggtcaagccatggtatgatgaagtgaaagattatgcttttccatatccccaggattgcaaccccagatgtcctatgagatgttttggtcccatgtgcacacattatacgcagatggtttgggccacttccaatcggataggatgcgcaattcatacttgccaaaacatgaatgtttggggatctgtgtggcgacgtgcagtttacttggtatgcaactatgccccaaagggcaattggattggagaagcaccatataaagtaggggtaccatgttcatcttgtcctccaagttatgggggatcttgtactgacaatctgtgttttccaggagttacgtcaaactacctgtactggtttaaataagtttaccttttcctccaggaaatataatgatttctgggaacatgggcatgtatatatatatatggagagagaattttgcacatattatacatattttgtgctaatcttgttttcctcttagtattcctttgtataaattagtgtttgtctagcatgtttgtttaatcctttgaaatatttgaaacatcaatttctattttctgacctctaagcctaaattaagatattgtatatgtaatgatgacatagttgatgcatccaatcctaaaacttacattccaaaggaattatatcattatgttcctaaggagtaaatatatatttgacctgtaagtgtgtgtatgtatacatatacatatgtatgtgtatggatttatatatgcacacaaacatataatatgtgatgtaacatgtagatgataatatgattcagtagtcaacttgagggaaatttttaaaaaactattctcaattatatacgaggtgatgggacttcttaacacacatttctataatacccatgaaatgataatttgtaaaataacacttagtgatatctggaaataataattcaattaagcaaccacgaatttcaccctggagatattttttcttatttgagtccaccaaaggataatgccaacttatataagttctcaaatcatgccttccgcttagtctcattttattcattcagtcgtcatgagttgagtgcttactacatgcaaggcactctgctagttatattctaataatgcagagataattagacatggttcccgccctcaagaagctcacaaaagtattcaggaaataatgcagactagtgattttgctataaaattatttttgaaggaagcagacacagcagtatttacctgtaggtggagcaagtaataagccatgctgtgcaatatatacataaagcttctgcttctcatgggaatttagttacagtgcttggaatgagaaggggaaggaaagaattaacaaatgccaagatttctggagcagattgtacagctgtgactttggaaaacagaaagtaagaccctcagaaaaccaatgaagtctaagagaaataaaatttagtggacaggtatgaaaagtgtaattgcgcctaactaccagatggagagcttcagaatgggctatccttagagtctagtacatcttgaggcctctcagcaggagacaaaggattccaaaaagagatgtggaggtgctgagggcacctctatctctttgttgtttagtctgtcattgaatcaatctacttatcatcttgggtctttgagtattgtatgaaagatccttcgtgcacaccacacacagtcatgattttgttaaagtagccttcttcagatgcttttctaagggctagttaccaactttatttctgtgtttctgtagaagaaacattttcagttcttcattgagtttgattatggaaatccattcaaagtcactatgaaaattttactcatgtagtttggaaatgcaacattttcctatcatgaaatctctttcagagaggagaatacaacatcttagtccagacatttaacatactgcatttcaagtacatgtgtgtgtgttttattcaggttgtgtaatgctcccgtagaattatagaacaattaaatatggttagttccagagtgcaaattacagaaggaagctacttgtttaaaattccatacacgtttgcagtttcttgtacacatttggatactttgaaagatgacagattgttaaatccattcaatggtaaagaaactcaccatctggagattgagtctacttgttaatgaatgactagcccaattatccttataaattgaatatggtgaccaaatgctttgatatcatactactctgcctttgtgggcacatatgtagacactactaaaaataaatatttttggagattaaaatggagaatagaagtaattacattatttaggtcttaatccaacttttttctaatatatctaaacaattgaaagggaagcttattcatggaatattggcttgatttatctagaaagtttttccttcttcaattttactatattcattctacaggaacagcaataagtactattaaacagaagatggctacactaagttccaattttgttgctgaattgcttctgtgagttcacttttcagttctaaggaagaataatatttgctacatatttcacaggggttcttatgaaggtaaatttaccagattaataaaaatttatgaatattaaaattatcattaataatataaaacacttatttgagattaaattaaatttttcatgagcccctctttggcaggaactctgtttaattctttgtatttatcccagcttcttaaatggtggctgtaacataataaatgtttaataaatgcttatatgaatggatttttagaattaactaagaagccaaaaatggcaacaatttacagaaatcccacctttccatgcttaagacaaaaatgtcttaaatataaagctgtgattatatcaaaaatccagataaatcatcaaatatatcagattaagaccagggtttacacacttaggcaatagtcctttccaaaccatgacaaaaactacaagtttatttataatttaacaactcagctgaaaatataacgggtatatttgttattctaactctattttttaaagttaataatataaagtggccatgtaaaatattttattttccaggctaaagcaaatgaaagtttgctggtatcaacacagcctgccatatttttcacagcatgcaacaatggtgctaggatagctatttcttactgtaattgccagaggcagaaatggtctgggtataagctatttcataaaagcagctttaaattgtcagtattaaggttttcatgtggaaaggtgtcattcaaaaaaaaagtaattggcatacatattccacatcatcgatcctctctgtggtgttaatttttttatatgaccagtagaaaaattttaatattctcacaatataggttttggggcttccatatcatcaaaagactgaaaaattataattttagaattaaactgatggatttcattatagaattatctgtgagttgtgtagacacagtcttaatgtttctggttatgacagataagtttgctcaaaaaatgtggatgaagccattattgttattattgttattgcttctgttcagttgtctaagtatcatcccttctgtggcccatcacgcagcagagttgccctacaaatttcatttggcagcgccataacattcatttaaaaagtttatgaaaacattcatttgaaagttccatgcagctttagcacagagttgaccaaacactggcgtaagttcaatttacacagaatatttgaattgaaacaatagaaatttttctcataatatatacctatgtgaaaccaacttatctgcataattaaatctaatacatatttaagccagtttaagtgctttgtgttgatgccatgcttatcaaatacatgcacaagctaaacataatttgaatgggtctatgaaggaaaaataatgcttagactttggtgtaggttcttcctgtgtagccatatacccaggctctgcagtatcgaaggatgcaaatgttgacatagatggaagctcttacctaccaaagtgtttaggaaggataaagttacatttgtcttaatttctaacattatctttgcttttatgtttcataaaaatttgtcattatttatgctggtgaaacgtataatcacatccaattatttgaacacatgcaaaataattttttaaattatgttattgtttaaatttgacttatgggagatcagtcaaaaacttagaaggtttaacacttcactgattaatggtgctgaaaacacgttacaattaccacatatccttgctataagttttgaagtttcttagcaattaaagtttttttattcagtgtgaactgtcagtatctattctggtgctaaatgtatggtgctaaatgaattgttagtgttgatggctttagtaatgctccttttattcattgctaaatttagtgttatccatttgattcctgattcagaaatatcaataaaatcctatgttaaattaatctttaccaaaaacaggcaagttaactctgttgttttaattcaacagtccaacattatttaggtgttacagagtgtaaatatatttctttgggagttattttctttttaaaatctttttatagcttggcaatgtccaaagtcaaatatcacctaaactggttagattacttctacagctaataatattgcaggcactggcgccctctggtggttatgaagacaaattcttaatggctacttgacctacagcaaaagccatttctgtaccataaaaatttgttgtgcaatattagaattatcatatgtttcctacatctgacagcacctaaaatgtttgataatattaacatgtatctaagaggaaaaaagagttaatatattctggcacccactttcctagtaatgttttccatgattttccagttctgaggcacttattaaagtgcttttttttttctgaattaattaggtattggtaaaatatatttttaaatttagttagctttataaacacaattagaattacaattaattaacagaggtataattgtctcactttcagaagtgatcatttatttttatttagcacaggtcataagaaaaatatatagaaaaataatcaatttcatatataaaaggattatttctccacctttaattattggcctatcatttgttagtgttatttggtcatattattgaactaatgtattattccattcaaagtctttctagatttaaaaatgtatgcaaaagcttaggattatatcatgtgtaactattatagataacatcctaaaccttcagtttagatatataattgactgggtgtaatctcttttgtaatctgttttgacagatttcttaaattatgttagcataatcaaggaagatttaccttgaagcactttccaaattgatactttcaaacttattttaaagcagtagaaccttttctatgaactaaatcacatgcaaaactccaacctgtagtatacataaaatggacttacttattcctctcaccttctccagtgcctaggaatattcttctctgagccctaggattgattctatcacacagagcaacattaatctaaatggtttagctccctcttttttctctaaaaacaatcagctaataaaaaaaaaatttgagggcctaaattatttcaatggttgtttgaaatattcagttcagtttgtacctgttagcagtctttcagtttgggggagaattaaatactgtgctaagctggtgcttggatacatattacagcatcttgtgttttatttgacaaacagaattttggtgccataatattttgagaattagagaagattgtgatgcatatatataaacactatttttaaaaaatatctaaatatgtctcacatatttatataatcctcaaatatactgtaccattttagatattttttaaacagattaatttggagaagttttattcattacctaattctgtggcaaaaatggtgcctctgatgttgtgatatagtattgtcagtgtgtacatatataaaacctgtgtaaacctctgtccttatgaaccataacaaatgtagctttttaaagtccattgtattgttttttctttcaataaaagagtataattaa

SEQ ID NO: 4120 - DNA, 5865 bp, Homo Sapiens
  NM_015888
gcggggctcaggtgcctggcagcgcggccggggcccaggaaggggagggggcgaacgctggagcgaggcgggggcgggtgaggagggggtgacgccggacgcgtcgacagcgcgagggttcgcgcgtgagctgcgcgggtcgggcctggtaccgagctttcctgggggctagcaggtcgtggacgccggctcctggaggagagccggtaggagggaggtgaaggtgtccgcggcgtcgtcgacggcggcgccggccatggaggagacgcagccgccgccgcagcctaagctgcccctgtgcgacagcctcatgatctggctgcagacattcaatactgcctcaccttgtcaagatgtcaaacagctgactagtggagttgccatggcacaagttcttcatcaaattgatgcagcttggtttaacgaatcttggttaagccgaattaaagaggatgttggggacaactggagaataaaggccagtaatgtaaagaaggtccttcaaggaattatgagttattatcatgagtttttggggcagcagatttcagaagcacttatccctgatttaaaccaaataaccgaatgttcagatccagtggagcttgggaggttgctccagcttattttaggttgtgcgatcaactgtgaaaagaagcaagaacatattcaaaatataatgacactggaagagtctgttcaacatgtggtcatgactgctattcaagagttgatgagtaaagaaatattgagctctcctccaaatgatgctgttggagaattggagcaacagcttaaaagagccttggaagaacttcaggaagcactagcagaaaaagaagagctgaggcaaagatgtgaagaattggatatgcaggtgactacacttcaagatgaaaagaattcactggtttctgaaaatgagatgatgaatgaaaaacttgaccagttggatggctcttttgatgatccaaacacagtggttgcaaaaaagtattttcatgcacaattacaactagaacaattacaggaagaaaacttcaggcttgaagctgcaaaagatgattaccgtgttcactgtgaagaacttgaaaagcagctaatcgaattccagcataggaatgatgaattgactagtcttgcagaagaaacaagagccctgaaagatgaaatagatgttcttagggctacctctgataaagcaaataaactggagtcaacagttgagatatatcgtcagaagctacaagatctgaatgaccttcgcaagcaggtgaaaactttacaggaaaccaacatgatgtatatgcataatacagtcagcttagaagaagaattaaaaaaagcaaatgcagcacgtacacaattagaaacatacaaaaggcaggttcaagatcttcatgttaaactttcctccgaatccaagagggcagacacactagcgtttgaaatgaagcggcttgaagaaaaacatgaagctttacttaaggaaaaagagagactaattgagcagcgtgatactttgaaagaaacaaatgaagagcttcgatgttcacaagtacaacaggaccacctaaaccaaacagatgcatctgctacaaaaagttatgagaatcttgctgctgagattatgccagtggaatatagggaggtgtttattcgactgcaacatgaaaataagatgcttcgcttacagcaagaaggctctgagaatgaacgtattgaggaacttcaggagcagctagaacagaaacaccgtaaaatgaatgaactggaaactgagcagaggctgagcaaagagcgtattagagaattgcagcagcagattgaggacctccagaaatctttacaggaacaaggttccaagtctgaaggcgaaagttccagcaaattaaagcagaagttggaagctcatatggaaaaactcacagaggtccatgaagaattacagaagaaacaagaactcattgaagatcttcagccagatataaatcaaaatgtacaaaagatcaatgaacttgaagctgctcttcagaagaaagatgaagatatgaaagcaatggaggaaagatataaaatgtacttggagaaagccagaaatgtaataaaaactttggatcccaagttaaatccagcatcagctgaaataatgctactaagaaagcagttggcagagaaagagagaagaattgagattctggagagtgaatgcaaagtagcaaaattccgtgattatgaagaaaaactcattgtttctgcgtggtataataagagtctagcattccagaaactggggatggaatctagacttgtgagcggcggtggtgcctgcagtgacactggtgcgtgcactcctgcgcggtctttcttagcgcagcaacggcacatcaccaacaccagaagaaatctctctgttaaagtccctgctacaacatctgattaaactgcaaaaaaaacaaaacaaaacaaaaaaaccacataaaatagaagtgtccttaaaatattttgtacctttcaactaactaccagattgaaaaagagtttatgatgcgggatatcaggtattttaaaatcaacatgcatcaaattaattttgccagttgactttaaaaacaaattatagaattagccatctctctgagggagcacatttgaataattggagatgcagttatacacacatttcaaacaaacatttgtcttttgagagtattataatttcaaattggccttgtatattttagttaaatgttttcagttgtattagtaacttaattaattttcaatagctattcagtaatacttaatcttagaacattaattggatttgtttaatctttttttgttttttgttgatttatatgaaaacagtcttgaggcagggacatggagaactatgcaagggtgatttctttgacttaatatatacaaggctttacttctgtcccctaattcttccattgaatgtgtacctctaccttgtcatgtcatggaagatacaacatttggaagatctgacaattggaatgactttggaataataaaattgactaattggaaattttgcatattctgaaaatctaatctcatagttctaatttgtacctatggcaaataagggcttctggacatcatgtttaaaatgttaagcataagaaataaactgacatttgtaataggtgactttctgatggaaagcaagctatatatatatatatatatatatatatatatatatatatactttttgtgaaatgtctatatactttttaaggtaattaatgaagatttcagttattgcttttaagcataaagttgtatttagcttctgctgaaaaattgtatcatataataattttgcttcattgaaaagggatgttgcagtgatgaaacaaggtgggatcagtttgattttgtttacttattaaggagtttatcttgggctcagtttgtggtattcagttcgtttctgcccaaagctcttattttcagaggtgttacttttgaacttttggggtcatttttaaaagttagcacttttgaattttagttgtgttaaatatgtgctgtcgtatatcatagccatgagccatatatgacaatttaaatttaattaattataaactcagtctcttggttgcaccagccacatttcagatgctcaatagccacatgtggctagtgggtaccatattggacagggcagctatagaatatttccatcattgcagaaagttctattggatagtaccataatctttttatagtaacttggaaatactatttgatattagatgttagaccacaaaaagaagaaaaatgttaggactatttcagatataaaaaggaactgaattgtgacataattagcatcttacattccatacagttgaataccttatgctgtgacaaccatagttaatcatttcagtgctgttcaacatacatacctatcagcagtgtgtttagaccaggggtctgcaaactttctgtgaatggacaaagagtaaatactttagtaaatgtcttaggctttgtggcctacatgatctttgttgcaagtactcaactctgccattatagagttaaagcagccatacacaatatataaacaaaatgggcatagttgtatttcagtaaaactttatttacaaagacaggcggtaggccagatttggcttgcatgctgtagagctgtggtctaaattttattcatagactttctttgcaaatacagtgtgagtattgttccatttacagtattattattttttagatacctggtttttagattcttgcctggtaactttttactgaaaatacaagaatttcgtactgcatttgcatctccgagattagggagcacctgtcaggatatgttgttctatcagggttacttctgttgactacctcttagattttgatacagttatattgttgagtttcattttcatatattcttgtagtgtctgcttgcctgtgacttctggtaaaataaaataagcctttgaaaatattttagcatggtatttaacattttctaaatattatggcattttgacatattttagtcagcgaagacatctgcccctttggtgtttctacttgcttatgattgagattttacaagcccttcaaactccgttttaaaggaatttattgtaaaacattaactttaataaattagtgttttcacagatcagatcattatacttggaacttctaaatcatgcaatttctgaataaggacataaggctagattcatttttcttaatagagaaaaaggaaatttctgatttatcacttttctagttgataagtaggattcaaaacgtttgatatgtaagtatttatataagactaatgtaatttaaagttctgtattattgtgattaatcatacagaaattcaggaactgatcagaagtgagattcttttccacatctggttaatgtagtgagttgacaccctgtgggtggtaaagcattataaacatttcatcttgaaccatgatttatacacatctgtgttataagggaggcttgagtacatataccaatgaagagatattcagcatttgtctatttgataaggaattaaatgtcctagtgattataaagtaaaaccacagaccaatttgcaaatgatcttcaatgttaagcacttgctctaagattaaaattccttttctttttaaggttaagggtgtgtacgtatggcagtgatgtctatgttgagattaacttatgtattgaggaaaatttgaagtttattttttcgatgaataaggctgtcaaatgatttagtatagattaatgacatcttttttagaaatattaaagtgagtattcctcattatgtcatcatttctgataattagagtgctaatttgaatgttagataatgtttccacatctatacctatttctttctagggcacttctgaccctggggcttggggatggcctttaggccacagtagtgtctgtgttaagttcactaaatgtgtatttaatgagaaacattcctatgtaaaaatgtgtgtatgtgaacgtatgcatacatttttattgtgcacctgtacattgtgaagaagtagtttggaaatttgtaaagcacaaaccataaaagagtgtggagttattaaatgatgtagcacaaatgtaatgtttagcttataaaaggtcctttctattttctatggcaaagactttgacacttgaaaaataaaaccaatatttgatttatttttgtaagtatttaggatattattttaaataaatgattgtccattatcaatataatagttgtgaaatgatttaagtaaataaactttatgcttctgtgtctgttgaaaaaaaaaa

SEQ ID NO: 4121 - DNA, 3866 bp, Homo Sapiens
  NM_015891
ctccgcagaagatttgttgccgtcatgtcggctgcgattgcagctctggccgcttcctatggttcgggttcagggtccgaatcggactcggacagtgagagcagtcggtgtccgctgccagccgccgactccctcatgcacttgactaaatcgccttcatcaaagccgtctctagcagtggcagtggactcggctccggaggtggcagttaaggaagatttggagactggagttcaccttgaccctgccgtcaaagaagttcagtataatcctacctatgagaccatgtttgctcctgagtttggaccagaaaatccctttaggacacagcaaatggctgcccctagaaatatgctttctggatatgccgaaccagctcatatcaatgatttcatgtttgagcagcaaaggagaacttttgcaacatatggttatgcattagacccttcattagataatcatcaagtgtctgctaaatatattggttctgtagaagaagctgaaaaaaatcaaggtttaactgtatttgaaactggtcagaagaaaacagaaaagaggaaaaagtttaaagaaaatgatgcatccaatattgatggttttttgggaccatgggcaaaatatgtggatgaaaaagatgtagccaaaccttcagaagaagagcaaaaagaattggatgaaatcacagcaaagaggcagaaaaaaggaaaacaggaagaagagaaacctggggaggagaagacaatcttacatgttaaagaaatgtatgactatcaaggcaggtcctatcttcacatacctcaggatgttggtgttaatctacggtcaactatgccacctgagaagtgttatcttcccaaaaaacaaattcatgtgtggtctggacacacaaagggcgtcagtgcagtcagattgtttcctctctctggccatttattgctgtcttgttccatggactgtaaaattaagctatgggaggtttatggagaacggcgctgtctgagaacatttattggtcacagtaaggctgttagggatatctgcttcaatactgcaggaacacagttcctcagtgcagcctatgacaggtatcttaagctctgggacactgagacaggacagtgtatatcaagatttacaaaccgaaaagtaccttattgtgtcaaattcaatcctgatgaagataagcaaaatctctttgtggctgggatgtctgataagaagattgtgcaatgggacattcgaagtggagaaattgtgcaggaatatgatcggcatttgggagctgtcaacaccattgtttttgtggatgagaataggagatttgtgagcacatctgatgataaaagcctaagagtttgggaatgggatatccctgtggatttcaagtacatagcagaacccagtatgcactcaatgcctgcagtgactttgtctccaaatggaaaatggctagcatgccaatcaatggacaaccaaatcttaatttttggagcacagaacagatttagattaaataagaaaaaaatttttaagggccatatggtagcaggctatgcttgtcaggtggacttttcaccagacatgagttatgtgatttcaggagatggaaatggaaaattaaacatttgggactggaagaccacaaaactctacagtcgatttaaagctcatgataaagtgtgtataggtgcagtgtggcatcctcatgaaacttctaaggtcataacatgtggttgggatggtctcattaaattgtgggattaatgagattaatccttaaactagctgggatcatttttgatccattgtcatatttatatttaattattaaatgtatctgatgataacttgatttacagataatgttgatgacattgaccctttgtttaaaaaaagaaactgtaaatttgacataatttcatttgcaacttcattttgttttttataaatgttatttatacagaaagtggctattgactttctatttgacaagtagttataattggcaagcagtttgagtttatactcatgacatactgaaagcatctctttggggtcaagaaagaatccctagtggatttgggattctagaggaggtgttataattaattattcagaaaaatgcatgtatttacctcttcaaccaaaagggcagtaaagaatagggataatatattttaatgtaaatttggaagaaggataaaatcacccacagttactctccctattattttcactgggtcaagttttaatcttttggcttcatgagttccactccctttgatgatatatgttgtatatttttagttgtaaagcagtaatctttaactgtagcattcctctaattataaacagtgaaaaatcaaaatcagtccagagttcttttgttgacttaattcctgatcagtatagacaggactatatatatttaatcagagaattacattatatctgaagatggagctcaggagaatgcaccaagactttgaattgtatttacattcactgtcagtaaagacctggctacgctttgagaaatcaggatctcctaggtcattgcttcgcagctgtgattactgaaatcctcctcataggagataaagtacgaggggtagagtccaagatgtcaacttgtaatttctttgaagtcatatgttttatctttaaaattattcttattttacctgtgaatatatacaacagaactttttaagattaaaaaatttttaaacctctatgtctgaaaaaaaaaatgacactcctggaagatggctagggttccccagtttgagaagcagtggccatggtgaaaaatagtttttgaaaacatcagattataaaatcaagatagtccggacgcggtggcacatgcctgtaatcccagcactttgggaggctgaggcaggtgaatcacctgaggtcaggagttcaagaccagcctggccaacatagtgaaaccccgtctctactaaaaacacaaaaattagccaggcttggtggctggcgcctgtaattccagctactcagaaggctgaggcagggagaattgcttgaacccaggagtggaggttgcagtgagctgagatcatgccactgcactccagcctgggcgacagagcgagactccacctcaaaaaataaaatcaagataacctcttgaatgtaatagctcatagcactttaatttggcaagccatttttcctgttttattataaatctatattagatgtttgaatatggtttgaaatatttcactaccgtgctgaaaaaggttggttgatagcagcttggagtgctaactggaagatcaaaatcatgtctcttgctgataacctaagagcattaagctctgagtccagtgaggtcatagcagtgtatgctccttgcccttacggagtgtctgtttttagaaatttagattttaaaaggcgtgggacatacgaccaggccctatagccacataaatataaatttcatagaaaaagaataaaagcggagatatattttttgacacagaggcacccaaagaaatacaaacattgcctagctgctgccatttctgtaactgcccagaagggtgacagatttctgaaggggaaaggattcagatatgaccttttctttagtcccaaccactagttttaacaaatgtgaattattgaaatgtgaagggacaaaaagaatcatacatttaaactgtcttgttcagcataccaatattgtatgttacaaatcatcatttctaaatctggattgattctgttgtgtttttgactgtttctaaagtaagtgtgtataaaagtctcctttttaaaaagatcatatttttaaataaagcattttttgtagaaaaaaaaaaaaaaaa

SEQ ID NO: 4122 - DNA, 4803 bp, Homo Sapiens
  NM_015892
gactcgggagttgccggcgcttcccggcggtggcggcgtctctggccggccttggtgcggcgagccgagcgaggcagctctgagccgcgcggaaatctggcattttttaaagtttgcgccccacaaagaggaaatattccaaaggtactcaggatgtaaaaggggagatcttcacagatgcctccgtggatggcatggcaatccatccatcaatgagaagaccatgatttcttttaattttctgtgtgtttccacattccccagtgagaattcttccacctttttttgtgccatgggaaaaacctgaagggcaggcagagctgctcccgaacttgtgaccttctctgaggttgcagcggctcttgtagaacatgactctgggacatcacttccttttgttttctttcggagctgaaccaaagaatgtgcaccctctttctctagtgctgtggtgtctgcttatttttgtatttgtgctttccatccatcttctgtgatcacaaggcattcttaaggttttctagcacgacttgcggacatccagactcgtggggggcccacccatggctcggtaagccagcagcccagggcactggcactaccatgaggcactgcattaattgctgcatacagctgttacccgacggcgcacacaagcagcaggtcaactgccaagggggcccccatcacggtcaccaggcgtgccccacgtgcaaaggagaaaacaaaattctgtttcgtgtggacagtaagcagatgaacttgcttgctgttctcgaagtgaggactgaagggaacgaaaactggggtgggtttttgcgcttcaaaaaggggaagcgatgtagcctcgtttttggactgataataatgaccttggtaatggcttcttacatcctttctggggcccaccaagagcttctgatctcatcacctttccattacggaggcttccccagcaaccccagcttgatggacagcgaaaacccaagtgacacaaaggagcatcaccaccaatcctctgtaaataatatttcatacatgaaggactatccaagcattaaattaattatcaacagcatcacaactaggattgagttcacgaccagacagctcccagacttagaagaccttaagaagcaggagttgcatatgttttcagtcatccccaacaaattccttccaaacagtaagagcccctgttggtacgaggagttctcggggcagaacaccaccgacccctacctcaccaactcctacgtgctctactccaagcgcttccgctccaccttcgacgccctgcgcaaggccttctggggccacctggcgcacgcgcacgggaagcacttccgcctgcgctgcctgccgcacttctacatcatagggcagcccaagtgcgggaccacagacctctatgaccgcctgcggctgcaccctgaggtcaagttctccgccatcaaggagccacactggtggacccggaagcgctttggaatcgtccgcctaagagatgggctgcgagaccgctatcccgtggaagattatctggacctctttgacctggccgcacaccagatccatcaaggactgcaggccagctctgcaaaggagcagagcaagatgaatacaatcattatcggggaggccagtgcctccacgatgtgggataataatgcctggacgttcttctacgacaacagcacggatggcgagccaccgtttctgacgcaggacttcatccacgcctttcagccaaatgccagactgattgtcatgctcagggaccctgtggagaggttgtactcagactatctctactttgcaagttcgaataaatccgcggacgacttccatgagaaagtgacagaagcactgcagctgtttgaaaattgcatgcttgattattcactgcgcgcctgcgtctacaacaacaccctcaacaacgccatgcctgtgaggctccaggttgggctctatgctgtgtaccttctggactggctcagcgtttttgacaagcaacagtttctcattcttcgcctggaagatcatgcatccaacgtcaagtacaccatgcacaaggtcttccagtttctgaacctagggcccttaagtgagaagcaggaggctttgatgaccaagagccccgcatccaatgcacggcgtcccgaggaccggaacctggggcccatgtggcccatcacacagaagattctgcgggatttctacaggcccttcaacgctaggctggcgcaggtcctcgcggatgaggcgtttgcgtggaagacgacgtgagagctgaattgttgctgcacgtgctgggcccgccaatgccgtcatcatcaggattttacaaatctctttgcggggaactgtttcactcatggtatggaaaaccccaggactctgccactctaggcacacatgaattataaccattttggaatttccttcgtgatgttcgagagctcagcaatggacccctcacagagctcctctatccgaggccattggagaccccagtttctcaagaattcagctctgctctgagcgtcctggagcttggggatgcagccagctggcctgcactgggtgtggagagaacacctagggaaggcagcctggccctgcccgcctccgccttctggagagcctctgggttctgagtcagcaagccagaggtcatgccacaggcctggctggaacttacacttcacgttccctttttttccccctagagatggggtctcgccgtgttgcacagactgtctgtattcaatggctatcttcacaggtgtgatcataccacattcacttctgaaacactcttgttgcgatcgctaacctcactgggacagagaaccgcagtctttcgagaatggaggctcttcattttttttttctcctttactccaaactcagccctccagtttcttcagatgtaaaccctgttaacgtcactgtttccaaaaggaaaaaaataagtcagtttttggcagcaccttcatctttctgacctcctcctattctgtccttgtggacttatgtttaacatagaaaatgaatgcgtttaaaacaaaaccactttctgcatttaaccagtcctggctctctctctgctgcctcttcatacgttttctcaagaacttcagtttataattggaagagaaatttttgctgttaatgccagaatgagcaacctcaaggaattgaacacttcttggaaaatctaggtaattcaagccctcatcaggtttacaagatcatcagagaaacagaggattttaatttttagttctggccggctacaggctccatttctctgccttcccattggaaatagtttatttccacattctccactgcgtgtggtcaaagttcctcacccagcaagggactatagatactcgtgtcccaattccaaaacacaatgcacaagctgaacttgggctgaacgtggcgtgttgagatttggaatgaggtttctaagagccgtgttcttcatggaattttccaggccacttggcagcttggtttaccgatggatgggctagagatcttgtcgtttcttggaagtcacagggaagattgaagagaacgcttgagcatccttggcaacagcccaggtgggacctggatgaagctttgcactcaagtattgtcaagggaagcttcctgtgaaccaaagttctcaggccaaggtctcgcccaccaaagccagaaagtgcaagcacccgtctacccagctctaacttgtatgtgtgagacagaccaggcttcgggggtaggaggatctgcagttgttcagccgtctttctgctggtgttgtctttctgccatcagagaagggacacacagcccgttcgaaggtgtgcagagggctctgagcgccaggatggccagggctgtttttgctactgaaggagcgtgtgtcctgaactcccacttgcagggacagtccccaccttctctatagccggcactgggagcagccgccagcagggaaatctggcctgagcacaaggatgctttagggagagatcacttcagtgtgtgtgtatatttatttgcagtacagtgcgcgcgtgtgtgtgtgtgtacgcgcacgtgtgggtgagtgcgtcttctgagtgggttctgttcagttgctaatgaggctcctccgctctggacacaacccttttatagattaatttctctgccaattaacttgtcattttcagtacatattttactattccacaccaaccataattacaacaagggatttttcttatgcactcctatgcatgtgaataacatgtggtgtaattctgcttcttacagaagtattactgaaggtattatttccaatattatttggtttattatgcggatcttttttatatatgcagtcccatcccttctgtgccactcaatgccatccagacatggtttttccctccaggggcctttctctccagagggcacttcggctgcctctgcttcctctcattcgaggcccggctcttgctgacagaataggttccgttctgggcggtggttctcgagcctgccattcaaaaccaaagcaaattggagcatttctcacaacatggtattgaagttcctttttgttctcaaaagttgtgaccgtgttaaattgtactcccttagtcctgtaaggtatgttaagtgaatcgcagttacgctgtacttttattaatatttaacataattaaagatggacccataagagtgacgcctgtggagcgcgtgctcttcctctgcagccaagcaaaaaaaaaaaaaaaaaaaaaaaaaaaaaaa

SEQ ID NO: 4123 - DNA, 1215 bp, Homo Sapiens
  NM_015895
cgtcagttggtcacgtggttgttcggagcgggcgagcggagttagcagggctttactgcagagcgcgccgggcactccagcgaccgtggggatcagcgtaggtgagctgtggccttttgcgaggtgctgcagccatagctacgtgcgttcgctacgaggattgagcgtctccacccagtaagtgggcaagaggcggcaggaagtgggtacgcaggggcgcaaggcgcacagcctctagacgactcgctttccctccggccaacctctgaagccgcgtcctactttgacagctgcagggccgcggcctggtcttctgtgcttcaccatctacataatgaatcccagtatgaagcagaaacaagaagaaatcaaagagaatataaagaatagttctgtcccaagaagaactctgaagatgattcagccttctgcatctggatctcttgttggaagagaaaatgagctgtccgcaggcttgtccaaaaggaaacatcggaatgaccacttaacatctacaacttccagccctggggttattgtcccagaatctagtgaaaataaaaatcttggaggagtcacccaggagtcatttgatcttatgattaaagaaaatccatcctctcagtattggaaggaagtggcagaaaaacggagaaaggcgctgtatgaagcacttaaggaaaatgagaaacttcataaagaaattgaacaaaaggacaatgaaattgcccgcctgaaaaaggagaataaagaactggcagaagtagcagaacatgtacagtatatggcagagctaatagagagactgaatggtgaacctctggataattttgaatcactggataatcaggaatttgattctgaagaagaaactgttgaggattctctagtggaagactcagaaattggcacgtgtgctgaaggaactgtatcttcctctacggatgcaaagccatgtatatgaaatgcattaatatttgactgttgagaattttactgccgaagtttacctccactagttctttgtagcagagtacataactacataatgccaactctggaatcaaatttccttgtttgaatcctgggaccctattgcattaaagtacaaatactatgtatttttaatctatgatggtttatgtgaataggattttctcagttgtcagccatgacttatgtttattactaaataaacttcaaactcctgttgaa

SEQ ID NO: 4124 - DNA, 1839 bp, Homo Sapiens
  NM_015899
gagactgcagagggagtagtgcgatcctgcgcgcgggggaactagctggagggcaaggcgggaacaccatctattgttggggtgatcggacctaacaccaggttgtggggacaacgaagtccagaagagtgaaaggaatgagaaaagacagtttgagagagaaagtgggcccagggggccaatgcgagtatggaggctgtgaaggccccgagccctggaagcccagactatttattggtgatcaaacaaagaaacaggtggggaatattgtcctattatgattctcctgaagatgcctggaaaggttgcaaagggagcatacaaatggcagtctgtgaaattgaagttcattctgtagataatacatgcatggacctgataatccccggggaacagtatttctacctgaaggccagaagtgtgcctgaaagatagcggcggctggtggccctgggatcagccaaggcttgcctgactgacagtaggacccagaaggataaagagtttgctgaaaacactgaaaacttgaaaaccaaaatgtcagaactaagactctgctgtgacctccttgttcagcaagtagataaaacaaaagaagtgaccacaactggtgtgtccaattctgaggagggaattgatgtgggaactttgctgaaatcaacctgtaatacttttctgaagaccttggaagaatgcatgcagattgcaaatgcagccttcacctctgagctgctctaccacactccaccaggatcaccacagctggccatgctcaagtccagcaagatgaaacatcctattataccaattcataattcattggaaaggcaaacggagttgagcacttgtgaaaatggatctttaaatatggaaataaatggtgaggaagaaatcctaatgaaaaataagaattccttatatttgaaatctgcagagatagactgcagcatatcaagtgaggaaaatacagatgataatataaccgtccaaggtgaaataatgaaggaagatagaatggaaaacctgaaaaatcatgacaataacttgtctcagtctggatcagactcaagttgctctccagaatgcctctgggaggaaggcaaagaagttatcccaactttctttagtaccatgaacacaagctttagtgacattgaacttctggaagacagtggcattcccacagaagcattcttggcatcatgttgtgctgtggttccagtattagacaaacttggccctacagtgtttgctcctgttaagatggatcttgttgaaaatattaagaaagtaaatcagaagtatataaccaacaaagaagagtttaccactctccagaagatagtgctgcacgaagtggaggcggatgtagcccaggttaggaactcagcgactgaagccctcttgtggctgaagagaggtctcaaatttttgaagggatttttgacagaagtgaaaaatggggaaaaggatatccagacagccctgaataacgcatatggtaaaacattgcggcaacaccatggctgggtagttcgaggggtttttgcgttagctttaagggcaactccatcctatgaagattttgtggccgcgttaaccgtaaaggaaggtgaccaccggaaagaagctttcagtattgggatgcagagggacctcagcctttacctccctgccatgaagaagcagatggccatactggacgctttataagaggtccatgggctggaatctgatgaggttgtatgatggctgctgggcagcacctcctaacttcagggaataaagtgctaaagtgtaaaaaaaaataaaaataaaaataaataaataaataaaatt

SEQ ID NO: 4125 - DNA, 4698 bp, Homo Sapiens
  NM_015904
cttgcgcactgagaactcacaccatatgtgtcctgttccagtgcgcgggtctgtggagagccgggtgcgagcggcggcagcacgaggggaaaagagctgagcggagaccaaagtcagccgggagacagtgggtctgtgagagaccgaatagaggggctggggccacgagcgccattgacaagcaatggggaagaaacagaaaaacaagagcgaagacagcaccaaggatgacattgatcttgatgccttggctgcagaaatagaaggagctggtgctgccaaagaacaggagcctcaaaagtcaaaagggaaaaagaaaaaagagaaaaaaaagcaggactttgatgaagatgatatcctgaaagaactggaagaattgtctttggaagctcaaggcatcaaagctgacagagaaactgttgcagtgaagccaacagaaaacaatgaagaggaattcacctcaaaagataaaaaaaagaaaggacagaagggcaaaaaacagagttttgatgataatgatagcgaagaattggaagataaagattcaaaatcaaaaaagactgcaaaaccgaaagtggaaatgtactctgggagtgatgatgatgatgattttaacaaacttcctaaaaaagctaaagggaaagctcaaaaatcaaataagaagtgggatgggtcagaggaggatgaggataacagtaaaaaaattaaagagcgttcaagaataaattcttctggtgaaagtggtgatgaatcagatgaatttttgcaatctagaaaaggacagaaaaaaaatcagaaaaacaagccaggtcctaacatagaaagtgggaatgaagatgatgacgcctccttcaaaattaagacagtggcccaaaagaaggcagaaaagaaggagcgcgagagaaaaaagcgagatgaagaaaaagcgaaactgcggaagctgaaagaaaaagaagagttagaaacaggtaaaaaggatcagagtaaacaaaaggaatctcaaaggaaatttgaagaagaaactgtaaaatccaaagtgactgttgatactggagtaattcctgcctctgaagagaaagcagagactcccacagctgcagaagatgacaatgaaggagacaaaaagaagaaagataagaagaaaaagaaaggagaaaaggaagaaaaagagaaagagaagaaaaaaggacctagcaaagccactgttaaagctatgcaagaagctctggctaagcttaaagaggaagaagaaagacagaagagagaagaggaagaacgtataaaacggcttgaagaattagaagccaagcgtaaagaagaggaacgattggaacaagaaaaaagagaaaggaaaaagcaaaaagaaaaagaaagaaaagaacgcttgaaaaaagaagggaaacttttaactaaatcccagagagaagccagagccagagccgaagctactcttaaactgctacaagctcagggtgttgaagtgccatcaaaagactctttgccaaagaagaggccaatttatgaagataaaaagaggaaaaaaataccacagcagctagaaagtaaagaagtgtctgaatcaatggaattatgtgctgctgtagaagttatggaacaaggagtaccagaaaaggaagagacaccacctcctgttgaaccagaagaagaagaagatactgaggatgctggattggatgattgggaagctatggccagtgatgaggagacagaaaaagtagaaggaaacaaagttcatatagaagtaaaagaaaaccctgaagaggaggaggaggaggaagaagaggaagaagaagatgaagaaagtgaagaagaggaggaagaggagggagaaagtgaaggcagtgaaggtgatgaggaagatgaaaaggtgtcagatgagaaggattcagggaagacattagataaaaagccaagtaaagaaatgagctcagattctgaatatgactctgatgatgatcggactaaagaagaaagggcttatgacaaagcaaaacggaggattgagaaacggcgacttgaacatagtaaaaatgtaaacaccgaaaagctaagagcccctattatctgcgtacttgggcatgtggacacagggaagacaaaaattctagataagctccgtcacacacatgtacaagatggtgaagcaggtggtatcacacaacaaattggggccaccaatgttcctcttgaagctattaatgaacagactaagatgattaaaaattttgatagagagaatgtacggattccaggaatgctaattattgatactcctgggcatgaatctttcagtaatctgagaaatagaggaagctctctttgtgacattgccattttagttgttgatattatgcatggtttggagccccagacaattgagtctatcaaccttctcaaatctaaaaaatgtcccttcattgttgcactcaataagattgataggttatatgattggaaaaagagtcctgactctgatgtggctgctactttaaagaagcagaaaaagaatacaaaagatgaatttgaggagcgagcaaaggctattattgtagaatttgcacagcagggtttgaatgctgctttgttttatgagaataaagatccccgcacttttgtgtctttggtacctacctctgcacatactggtgatggcatgggaagtctgatctaccttcttgtagagttaactcagaccatgttgagcaagagacttgcacactgtgaagagctgagagcacaggtgatggaggttaaagctctcccggggatgggcaccactatagatgtcatcttgatcaatgggcgtttgaaggaaggagatacaatcattgttcctggagtagaagggcccattgtaactcagattcgaggcctcctgttacctcctcctatgaaggaattacgagtgaagaaccagtatgaaaagcataaagaagtagaagcagctcagggggtaaagattcttggaaaagacctggagaaaacattggctggtttacccctccttgtggcttataaagaagatgaaatccctgttcttaaagatgaattgatccatgagttaaagcagacactaaatgctatcaaattagaagaaaaaggagtctatgtccaggcatctacactgggttctttggaagctctactggaatttctgaaaacatcagaagtgccctatgcaggaattaacattggcccagtgcataaaaaagatgttatgaaggcttcagtgatgttggaacatgaccctcagtatgcagtaattttggccttcgatgtgagaattgaacgagatgcacaagaaatggctgatagtttaggagttagaatttttagtgcagaaattatttatcatttatttgatgcctttacaaaatatagacaagactacaagaaacagaaacaagaagaatttaagcacatagcagtatttccctgcaagataaaaatcctccctcagtacatttttaattctcgagatccgatagtgatgggggtgacggtggaagcaggtcaggtgaaacaggggacacccatgtgtgtcccaagcaaaaattttgttgacatcggaatagtaacaagtattgaaataaaccataaacaagtggatgttgcaaaaaaaggacaagaagtttgtgtaaaaatagaacctatccctggtgagtcacccaaaatgtttggaagacattttgaagctacagatattcttgttagtaagatcagccggcagtccattgatgcactcaaagactggttcagagatgaaatgcagaagagtgactggcagcttattgtggagctgaagaaagtatttgaaatcatctaattttttcacatggagcaggaactggagtaaatgcaatactgtgttgtaatatcccaacaaaaatcagacaaaaaatggaacagacgtatttggacactgatggacttaagtatggaaggaagaaaaataggtgtataaaatgttttccatgagaaaccaagaaacttacactggtttgacagtggtcagttacatgtccccacagttccaatgtgcctgttcactcacctctcccttccccaacccttctctacttggctgctgttttaaagtttgcccttccccaaatttggatttttattacagatctaaagctctttcgattttatactgattaaatcagtactgcagtatttgattaaccaagcttctgcagattttgtgattcttgggacttttttgacgtaagaaatacttctttatttatgcatattcttcccacagtgatttttccagcattcttctgccatatgcctttagggcttttataaaatagaaaattaggcattctgatatttctttagctgctttgtgtgaaaccatggtgtaaaagcacagctggctgctttttactgcttgtgtagtcacgagtccattgtaatcatcacaattctaaaccaaactaccaataaagaaaacagacatccaccagtaagcaagctctgttaggcttccatgttagtgtagcttctctcccacaagttgtcctcctaggacaagaattatcttacaaactaaactatcatcacactaccttgtatgccagcacctggtaacagtagagatttttatacattaatcttgatctgttttaatcttgatctgttttagtagagatttttatacattaa

SEQ ID NO: 4126 - DNA, 4007 bp, Homo Sapiens
  NM_015905
gacagataccctccttccggccgcgccactcgggaggcggatcccgtgggcctgaggaggcttcccccgcccggtttgctttccctccctcgctggcgctgccgcgagtccaccgagcggcctctgaggagcagccgcaggaggaggaggaggtcgtcgggggcggcgggcggagaccgcgctctcgcttccccggcggcggcaagggcaggacaatggaggtggcggtggagaaggcggtggcggcggcggcagcggcctcggctgcggcctccggggggccctcggcggcgccgagcggggagaacgaggccgagagtcggcagggcccggactcggagcgcggcggcgaggcggcccggctcaacctgttggacacttgcgccgtgtgccaccagaacatccagagccgggcgcccaagctgctgccctgcctgcactctttctgccagcgctgcctgcccgcgccccagcgctacctcatgctgcccgcgcccatgctgggctcggccgagaccccgccacccgtccctgcccccggctcgccggtcagcggctcgtcgccgttcgccacccaagttggagtcattcgttgcccagtttgcagccaagaatgtgcagagagacacatcatagataacttttttgtgaaggacactactgaggttcccagcagtacagtagaaaagtcaaatcaggtatgtacaagctgtgaggacaacgcagaagccaatgggttttgtgtagagtgtgttgaatggctctgcaagacgtgtatcagagctcatcagagggtaaagttcacaaaagaccacactgtcagacagaaagaggaagtatctccagaggcagttggtgtcaccagccagcgaccagtgttttgtccttttcataaaaaggagcagctgaagctgtactgtgagacatgtgacaaactgacatgtcgagactgtcagttgttagaacataaagagcatagataccaatttatagaagaagcttttcagaatcagaaagtgatcatagatacactaatcaccaaactgatggaaaaaacaaaatacataaaattcacaggaaatcagatccaaaacagaattattgaagtaaatcaaaatcaaaagcaggtggaacaggatattaaagttgctatatttacactgatggtagaaataaataaaaaaggaaaagctctactgcatcagttagagagccttgcaaaggaccatcgcatgaaacttatgcaacaacaacaggaagtggctggactctctaaacaattggagcatgtcatgcatttttctaaatgggcagtttccagtggcagcagtacagcattactttatagcaaacgactgattacataccggttacggcacctccttcgtgcaaggtgtgatgcatccccagtgaccaacaacaccatccaatttcactgtgatcctagtttctgggctcaaaatatcatcaacttaggttctttagtaatcgaggataaagagagccagccacaaatgcctaagcagaatcctgtcgtggaacagaattcacagccaccaagtggtttatcatcaaaccagttatccaagttcccaacacagatcagcctagctcaattacggctccagcatatgcagcaacaggtaatggctcagaggcaacaggtgcaacggaggccagcacctgtgggtttaccaaaccctagaatgcaggggcccatccagcaaccttccatctctcatcagcaaccgcctccacgtttgataaactttcagaatcacagccccaaacccaatggaccagttcttcctcctcatcctcaacaactgagatatccaccaaaccagaacataccacgacaagcaataaagccaaaccccctacagatggctttcttggctcaacaagccataaaacagtggcagatcagcagtggacagggaaccccatcaactaccaacagcacatcctctactccttccagccccacgattactagtgcagcaggatatgatggaaaggcttttggttcacctatgatcgatttgagctcaccagtgggagggtcttataatcttccctctcttccggatattgactgttcaagtactattatgctggacaatattgtgaggaaagatactaatatagatcatggccagccaagaccaccctcaaacagaacggtccagtcaccaaattcatcagtgccatctccaggccttgcaggacctgttactatgactagtgtacaccccccaatacgttcacctagtgcctccagcgttggaagccgaggaagctctggctcttccagcaaaccagcaggagctgactctacacacaaagtcccagtggtcatgctggagccaattcgaataaaacaagaaaacagtggaccaccggaaaattatgatttccctgttgttatagtgaagcaagaatcagatgaagaatctaggcctcaaaatgccaattatccaagaagcatactcacctccctgctcttaaatagcagtcagagctctacttctgaggagactgtgctaagatcagatgcccctgatagtacaggagatcaacctggacttcaccaggacaattcctcaaatggaaagtctgaatggttggatccttcccagaagtcacctcttcatgttggagagacaaggaaagaggatgaccccaatgaggactggtgtgcagtttgtcaaaacggaggggaactcctctgctgtgaaaagtgccccaaagtattccatctttcttgtcatgtgcccacattgacaaattttccaagtggagagtggatttgcactttctgccgagacttatctaaaccagaagttgaatatgattgtgatgctcccagtcacaactcagaaaaaaagaaaactgaaggccttgttaagttaacacctatagataaaaggaagtgtgagcgcctacttttatttctttactgccatgaaatgagcctggcttttcaagaccctgttcctctaactgtgcctgattattacaaaataattaaaaatccaatggatttgtcaaccatcaagaaaagactacaagaagattattccatgtactcaaaacctgaagattttgtagctgattttagattgatctttcaaaactgtgctgaattcaatgagcctgattcagaagtagccaatgctggtataaaacttgaaaattattttgaagaacttctaaagaacctctatccagaaaaaaggtttcccaaaccagaattcaggaatgaatcagaagataataaatttagtgatgattcagatgatgactttgtacagccccggaagaaacgcctcaaaagcattgaagaacgccagttgcttaaataatatgcagcaccactagcttgtgctggtttttagatttttttgttttcaaaaaaacatttgtcagtaatttaacatcactacaaaaagaagagtttgtgactattctcatctctgttttggacgtttactagactttgatttccttaatagcccatttctgttaacctcttatcactaagaaagaaaggaaagaaggagatgaatagaagaaagaaaatggaaagaaggaaaaaaggaggatagaaaaaggatggaagaaagaagcattgaaaacaaagacattcttcccacttcttggatttttaaaccacagtctggagtgatagctactgtagaaaggaaatagactttgtatgaactctttaagttgaaaagtaaaaaatatatgtggtttggatgtgtgctttaattcagctttagaaattaataccactacccgtgaattatatggcctgacaatatgaattaggtgtactgtactgaagaacagtactccacaaacatgggtggtaacaagagttccatcccaggaggccaaacggtgcaacagaagggtaggttagatgctattaagaaggcacttaatagtacatcatgtaagatggcaactgtattaaagaaaaatccggaaaacaaaaa

SEQ ID NO: 4127 - DNA, 3032 bp, Homo Sapiens
  NM_015908
agttccagttccggccgcgagggtggagctttgtgcctcggaggcgtgggtgacgcaggcgcagcgcgggctgcgcgcgctactgcccatccccggttgtcccacttttgttcgcctctcttcggccctctactcaagagctccgtctccgtctcgccctcctcgaagtcctcgtcgcgcgcccgcgacccaggtcgccctgaaatctagcccgtccgagcgcgagtccaacggccgcggccgcaccaaggccccctcagaccgtgccatgggtgacagtgatgacgagtacgatcgaaggcgcagggacaagttcagaagagagcgcagcgactacgaccgttcccgcgagagagatgaaagacgtcgaggggacgattggaatgacagagagtgggaccgtggccgtgagcgccgtagtcggggtgaatatcgggactatgaccggaatcggcgagagcgcttctcgccacctcgccacgaactcagcccgccacagaagcgcatgaggagagactgggatgagcacagctctgacccataccacagtggctatgagatgccctatgctggggggggtgggggcccaacttatggcccccctcagccctggggccaccctgacgtccacatcatgcagcaccatgtcctgcctatccaggccaggctgggcagcattgcagagattgacctgggtgtgccgccgcccgtgatgaagaccttcaaggagtttctcctctccctggatgactcggtggatgagacggaggccgtcaagcgctataatgactacaagctggatttccggaggcaacagatgcaggatttcttcctggcgcacaaagatgaggagtggtttcggtctaagtaccacccagatgaggtggggaagcgtcggcaggaggcccggggggccctgcaaaaccgactgagggtcttcctgtccctcatggagactggctggtttgataaccttctcctggacatagacaaagctgatgccattgtcaagatgctggatgcagccgtgattaagatggaaggaggcacggagaatgatcttcgcatcctggagcaggaggaggaggaggagcaggcaggaaagcctggggagcccagcaagaaagaagaaggacgggctggagcaggcctaggggacggggagcgcaaaaccaacgacaaggatgagaagaaggaagacggcaagcaggctgagaatgacagttctaatgatgacaaaacaaagaagtcggagggtgatggggacaaggaagagaagaaagaagactccgagaaggaagccaaaaagagtagcaagaagcggaaccggaagcacagtggtgacgacagctttgacgagggcagcgtgtcagagtctgagtcggagtcagagagcggccaggctgaggaggagaaggaggaggccgaagaagcgctcaaggagaaggagaagcccaaggaagaagaatgggagaagcccaaggacgccgcggggctggagtgcaagccgcggccgctgcataagacctgctccctcttcatgcgcaacatcgcgcccaacatctcccgggccgagatcatctccctttgtaaaaggtacccaggctttatgcgggtggcgctctcagagccccagccagagaggaggtttttccgtcgtggctgggtgaccttcgaccgcagtgttaacattaaagagatctgttggaacctgcagaacatccgtctccgggagtgtgagctgagccctggtgtgaacagggacctgacccggcgcgttcgcaacatcaacggcatcacccagcacaagcagattgtgcgcaacgacatcaagctggcggccaagctgatccacacgctggatgacaggacacagctttgggcctcagaaccagggacgcctcccctgcccacgagcctgccctcgcaaaacccgatcttgaagaatatcaccgactacctgatcgaggaagtaagcgccgaggaggaggagctgctggggagcagcgggggcgctcctcctgaggagcctcctaaggaagggaacccggcagagatcaacgtggagcgggatgagaagttgattaaggtcttggacaagctcctcctttacctgcgcatcgtgcattccttggattattacaacacctgtgagtaccccaacgaggacgagatgcccaatcgctgtgggatcatccacgttcgggggcccatgccacccaaccgcatcagtcacggggaagtgctggagtggcagaagacttttgaggagaagctcacgccgttgctgagtgtgcgggagtcactctcagaggaagaggcccagaagatggggcgcaaagacccagagcaggaagtggagaagttcgtcacctccaacacgcaggaactgggcaaggataagtggctgtgtcctctcagtggcaagaaattcaagggtcctgagtttgtgcgcaaacatatcttcaacaagcatgcagagaaaattgaggaagtgaaaaaggaagtcgcgttttttaacaacttcctcactgatgctaagcgcccagctctgcctgagatcaagccagcccagccacctggccccgcccagatactccccccaggtttgaccccaggactcccctacccacaccagactccccagggcctgatgccctatggtcagccccggcccccgatcttgggctatggagctggtgctgtccgccctgcagtccccacaggaggccctccatacccccatgccccgtatggtgctggtcgagggaactatgatgccttccgaggccagggaggttatcctgggaaacctcgcaacaggatggttcgtggagacccaagggccattgtggaatatcgggacctggatgccccagacgatgttgatttcttttgagccgtcccccgttcctcagtcctgtatcatccatacttgtactaccttgtcctatgaagctctgagaattttttgtacgatcagccttactgctaataaaagcacttccacagggaaaaaaaaaaaaaaaaaa

SEQ ID NO: 4128 - DNA, 7299 bp, Homo Sapiens
  NM_015909
ctccgctgcctgagtcctcggcgaacatggcggcccccgagtcagggccggctttgagtccaggcactgcagagggtgaggaggagacgattctctatgacttgttggtcaacaccgagtggccaccggagactgaagtacagcctagaggcaaccaaaaacatggtgcatcctttatcatcacgaaagcaattcgagatcgtttattatttttacgccaatacatctggtacagcccggcaccttttttgctccctgatggactggttcgcttggttaataaacagataaactggcatttggtacttgcaagcaatggaaagcttttggctgctgttcaagatcagtgtgtggaaatcaggtctgcaaaagatgattttacatccattattgggaaatgtcaagttccgaaagacccgaaaccccagtggagacgggtagcatggagttacgattgtaccctactggcctatgccgaaagcacaggaactgtgagggtgtttgatctcatgggaagtgaactctttgtcatttccccggcatctagttttataggtgacttaagctatgccattgctgggttgatatttttagaatataaagcaagtgcacagtggtctgcagaactcctggtcatcaattaccgaggagaacttagaagttaccttgtaagtgttggaacaaatcagagctaccaagaaagtcactgtttcagcttcagtagtcattatcctcatggaatcaacacagctatttaccaccctggtcacagacttttacttgttggtggatgtgaaactgctgaagtaggcatgtcaaaagcttctagctgtggcctttctgcctggagagttctttcaggatcaccgtattataagcaggttactaatggtggagacggggttactgcagtaccgaagacactgggattattaaggatgttaagtgtcaagttttacagtcgccagggacaagaacaggatggaatttttaagatgagcctttctccagatgggatgctcctggcagccattcacttctcagggaaactgagcatctgggcgattccatctctgaagcaacaaggggaatggggtcaaaatgagcagccaggctatgatgaccttaatcctgattggaggctctctactgagaagagaaaaaaaatcaaagataaagagtccttttacccactgatagatgtcaattggtgggcagacagtgcagtgactttagctcgatgctctggtgctttaactgtttcatctgtgaaaactttgaagaatttactgggaaaatcctgtgaatggtttgaaccatcacctcaagtcactgctacccatgatgggggatttttaagtttggagtgtgagattaaacttgcccccaaacgatctcgtttggagactagagctggagaagaagatgaaggagaagaggattctgattctgattatgaaatatctgccaaggctcgctactttggttatataaaacagggcctttacttggtgactgaaatggagcgatttgcaccaccacggaaacgcccacgaaccattactaaaaactaccgccttgtgagtttgcgctccacgacaccagaggaactttatcagaggaagattgaaagtgaagagtatgaggaagccttgtccttggctcatacctacggcctggatactgaccttgtatatcagaggcagtggaggaagtcagcggtcaacgttgcttcaattcagaattatttgagtaaaataaagaagcgatcctgggttctccatgagtgtttggaaagagttcctgaaaatgtggatgctgcaaaagaactgcttcagtatggattaaaaggcacagacctggaggctcttttagcaatagggaaaggagcagatgatggcagatttacattacctggtgaaatagacattgacagtatctcctatgaagagctttcaccacctgatgaagagcctgccaagaataaaaaggaaaaggagctcaagaagagacaagaactactgaaattagtgaacttttccaagttgacactggaacaaaaggaactttgccgttgtagacggaagttattaacctacttagatcgacttgcaacatatgaggaaatcctaggagtgcctcatgcatctgaacagagatatgatgctgaattctttaagaaattcagaaatcagaatattgttctctcagcaagaacttatgctcaggaaagtaatgtacaagccctggaaattctgtttacttaccatggttccgacctgcttcctcatcgccttgcaattctgtccaactttccagagaccacttctccacatgaatattctgttttgctgcccgaagcttgttttaacggtgactccctgatgatcattccttggcatgaacataaacaccgagctaaagattggtgcgaggagttggcttgcagaatggttgttgagccgaatctccaagatgaaagtgaattcttgtatgctgcacagcctgagttactaaggttcaggatgacccagcttacggtggagaaggttatggactggtatcagaccagagcagaggaaatagagcattatgctcggcaggtggactgtgcattgtcacttattcgacttgggatggagcggaatattcctggtttgctggttctctgtgacaatttggttactctggaaacattggtttatgaagccaggtgtgatgtaactctaaccctgaaagaactccagcagatgaaagacattgaaaaactaagattactgatgaatagttgttctgaggataaatatgtgacaagtgcctaccagtggatggttccctttcttcatcgttgtgagaaacagtcgcctggtgtggctaatgagctattaaaagaatatttagtaactttagctaaaggggacttaaaatttcccctgaagatatttcagcattccaaaccagatctgcagcaaaaaattattcctgatcaggaccaactgatggcaatagcactagagtgcatctatacctgtgaacgaaatgatcaactctgtctttgctatgacctactagaatgtctgccagaaagaggatatggtgataagacagaggcaaccacaaagcttcatgacatggtagaccaactggaacaaattctcagtgtgtcagagcttttggaaaaacatggactcgagaaaccaatttcatttgttaaaaacactcaatctagctcagaagaggcacgcaagctgatggttagattgacgaggcacactggccggaagcagcctcctgtcagtgagtctcattggagaacgttgctgcaagacatgttaactatgcagcagaatgtatacacatgtctagattctgatgcctgctatgagatatttacagaaagccttctgtgctctagtcgccttgaaaacatccacctggctggacagatgatgcactgcagtgcttgttcagaaaatcctccagctggtatagcccataaagggaaaccccactacagggtcagctacgaaaagagtattgacttggttttggctgccagcagagagtacttcaattcttctaccaacctcactgatagctgcatggatctagccaggtgctgcttacaactgataacagacagaccccctgccattcaagaggagctagatcttatccaagccgttggatgtcttgaagaatttggggtaaagatcctgcctttgcaagtgcgattgtgccctgatcggatcagtctcatcaaggagtgtatttcccagtcccccacatgctataaacaatccaccaagcttctgggccttgctgagctgctgagggttgcaggtgagaacccagaagaaaggcggggacaggttctaatccttttagtggagcaggcacttcgcttccatgactacaaagcagccagtatgcattgtcaggagctgatggccacaggttatcctaaaagttgggatgtttgtagccagttaggacaatcagaaggttaccaggacttggccactcgtcaagagctcatggcttttgctttgacacattgccctcctagcagcattgaacttcttttggcagctagcagctctctgcagacagaaattctttatcaaagagtgaatttccagatccatcatgaaggaggggaaaatatcagtgcttcaccattaactagtaaagcagtacaagaggatgaagtaggtgttccaggtagcaattcagctgacctattgcgctggaccactgctaccaccatgaaagtcctttccaacaccacaaccaccaccaaagcggtgctgcaggccgtcagtgatgggcagtggtggaagaagtctttaacttaccttcgaccccttcaggggcaaaaatgtggtggtgcatatcaaatcggaactacagccaatgaagatctagagaaacaagggtgtcatcctttttatgaatctgtcatctcaaatccttttgtcgctgagtctgaagggacctatgacacctatcagcatgttccagtggaaagctttgcagaagtattgctgagaactggaaaattggcagaggctaaaaataaaggagaagtatttccaacaactgaagttctcttgcaactagcaagtgaagccttgccaaatgacatgaccttggctcttgcttaccttcttgccttaccacaagtgttagatgctaaccggtgctttgaaaagcagtccccctctgcattatctctccagctggcagcgtattactatagcctccagatctatgcccgattggccccatgtttcagggacaagtgccatcctctttacagggctgatcccaaagaactaatcaagatggtcaccaggcatgtgactcgacatgagcacgaagcctggcctgaagaccttatttcactgaccaagcagttacactgctacaatgaacgtctcctggatttcactcaggcgcagatccttcagggccttcggaagggtgtggacgtgcagcggtttactgcagatgaccagtataaaagggaaactatccttggtctggcagaaactctagaggaaagcgtctacagcattgctatttctctggcacaacgttacagtgtctcccgctgggaagtttttatgacccatttggagttcctcttcacggacagtggtttgtccacactagaaattgaaaatagagcccaagaccttcatctctttgagactttgaagactgatccagaagcctttcaccagcacatggtcaagtatatttaccctactattggtggctttgatcacgaaaggctgcagtattatttcactcttctggaaaactgtggctgtgcagatttggggaactgtgccattaaaccagaaacccacattcgactgctgaagaagtttaaggttgttgcatcaggtcttaattacaaaaagctgacagatgaaaacatgagtcctcttgaagcattggagccagttctttcaagtcaaaatatcttgtctatttccaaacttgttcccaaaatccctgaaaaggatggacagatgctttccccaagctctctgtacaccatctggttacagaagttgttctggactggagaccctcatctcattaaacaagtcccaggctcttcaccggagtggcttcatgcctatgatgtctgcatgaagtactttgatcgtctccacccaggtgacctcatcactgtggtagatgcagttacattttctccaaaagctgtgaccaagctgtctgtggaagcccgtaaagagatgactagaaaggctattaagacagtcaaacattttattgagaagccaaggaaaagaaactcagaagacgaagctcaagaagctaaggattctaaagttacctatgcagatactttgaatcatctggagaaatcacttgcccacctggaaaccctgagccacagcttcatcctttctctgaagaatagtgagcaggaaacactgcaaaaatacagtcacctctatgatctgtcccgatcagaaaaagagaaacttcatgatgaagctgtggctatttgtttagatggtcagcctctagcaatgattcagcagctgctagaggtggcagttggccctcttgacatctcacccaaggatatagtgcagagtgcaatcatgaaaataatttctgcattgagtggtggcagtgctgaccttggtgggccaagggacccactgaaggtcctggaaggtgttgttgcagcagtccacgccagtgtggacaagggtgaggagctggtttcacctgaggacctgctggagtggctgcggcctttctgtgctgatgacgcctggccggtgcggccccgcattcacgtgctgcagattttggggcaatcatttcacctgactgaggaggacagcaagctcctcgtgttctttagaactgaagccattctcaaagcctcctggccccagagacaggtagacatagctgacattgagaatgaagagaaccgctactgtctattcatggaactcctggaatctagtcaccacgaggctgaatttcagcacttggttttacttttgcaagcttggccacctatgaaaagtgaatatgtcataaccaataatccatgggtgagactagctacagtgatgctaaccagatgtacgatggagaacaaggaaggattggggaatgaagttttgaaaatgtgtcgctctttgtataacaccaagcagatgctgcctgcagagggtgtgaaggagctgtgtctgctgctgcttaaccagtccctcctgcttccatctctgaaacttctcctcgagagccgagatgagcatctgcacgagatggcactggagcaaatcacggcagtcactacggtgaatgattccaattgtgaccaagaacttctttccctgctcctggatgccaagctgctggtgaagtgtgtctccactcccttctatccacgtattgttgaccacctcttggctagcctccagcaagggcgctgggatgcagaggagctgggcagacacctgcgggaggccggccatgaagccgaagccgggtctctccttctggccgtgagggggactcaccaggccttcagaaccttcagtacagccctccgcgcagcacagcactgggtgtgagggccacctgtggccctgctccttagcagaaaaagcatctggagttgaatgctgttcccagaagcaacatgtgtatctgccgattgttctccatggttccaacaaattgcaaataaaactgtatggaaacgatgagcaagtaaaaaaaaaaaaaatt

SEQ ID NO: 4129 - DNA, 1591 bp, Homo Sapiens
  NM_015911
ccctcgcctacagaggcggcgctgtccctgatcgagcggcgggagcgagggttcagagatgggcagtgagaaggagcagagtccagaaccacacctgcctgaggaaggggaagggggtaagccttggagagtggatgactcagagggttcttggatcccacctggggagaaggagcatgggcaagagagcctgtcggatgaactgcaagaaactcatccaaaaaagccatggcagaaagtcactgtccgggctcgagagctaggggaccccattgctcatccaaggcatgaggcagatgagaagccctttatatgtgcccagtgtggcaaaaccttcaataatacctccaacctgagaacacaccagcggatccacactggtgagaagccttacaagtgttctgaatgtggcaagagcttctcgagaagctccaaccgcatccggcacgagcggatccacctggaagagaaacactacaaatgccccaagtgccaggagagctttcggcggcgctcagacctcaccacgcaccagcaagatcacctaggcaagcggccataccgctgtgacatctgtggcaagagcttcagccagagtgccacgctagctgtgcatcaccggacccacctggagccagcaccctacatctgctgtgagtgtgggaagagcttcagcaacagctccagctttggcgtgcatcaccgcacccacacaggtgagagaccttatgagtgcactgagtgtgggcggaccttcagcgatatctccaactttggagcacaccagcggacccacagaggggagaagccctaccggtgcactgtgtgtgggaaacacttctcccggagctcgaatctcatccgccaccagaaaactcacttgggcgaacaggctgggaaagattccagctgaaggagagccccatttagagtgagggagagagagtgagagaccctaacctattggaggaagatcttcagcatcttttgctgctaccttgacctcaagcccttcatcccactttggagaatggttttgtatagcctctgaagtcaggatctcaggaagtcctgaggagggactctggaataaaaacccttgcctctttccaggccaatttctcgtgttggaaagtcagaagacccagtcttggctttactttcttggggtgaaagagaaatagggtaggctcagaacatgctcatgttattaaggcagcagtccccctggcctttgaggaagtacttatgagatgggtgtcactgtctgaaggttctccaaattgtctgtgaactgcttaggtaggagtgcactgcagtttcctgctagttcccacctgttgtgccccaactttgcttctagatctctggggtgggaggagtgaccttctcaatggaaggggcctccttggtctggagaagagatctgaggtcccaccttagaaatgaaagggaaaccctcagggagccatgacccagggaccttcacactcccccatgtttgttacttgttatccctcccccaacctgcctctgttttccccagagtgattagcagtaaaacccttcaatgaaaaaaaaaaaaaaaaaa

SEQ ID NO: 4130 - DNA, 1966 bp, Homo Sapiens
  NM_015916
ctcctctgcctggtggcgccgggaggctgtttttccactcactggcgcgcagactccatcccactgttttcttctctcttttctggagttagattagtctgaagccgccaccagccccaggcccccgtgcagaagaaaagcgggagggaacggcggaggccgccgctgccctgcaccgccctcctggaggccacttggagagtccggccccgaggaggccatggccacaagtgcccacagctggccccaggttgccagcgtcgctacagcccagaccaaggcagaataatctccggatgagctggtggcaccgctgagcctttggtctcaccagggcttcctgttgctggcaggcggggtggagcggagctgctgggaggctgctggataggagaggggtcacggctgcggaagaggaggttcttcgggacacccgtggatggacacggcaaggaaacaccaggccaaccacagctggggataaaatagcacaaccacaccctgccgtccagcgcctcccagcctgtgccccttcctagtaccaccagcaaccatcaatcccgtctcctcctgcctcctctcctgcaatccaccccgccacgactatcgccatggcagccctgatcgcagagaacttccgcttcctgtcacttttcttcaagagcaaggatgtgatgattttcaacggcctggtggcactgggcacggtgggcagccaggagctgttctctgtggtggccttccactgcccctgctcgccggcccggaactacctgtacgggctggcggccatcggcgtgcccgccctggtgctcttcatcattggcatcatcctcaacaaccacacctggaacctcgtggccgagtgccagcaccggaggaccaagaactgctccgccgcccccaccttcctccttctaagctccatcctgggacgtgcggctgtggcccctgtcacctggtctgtcatctccctgctgcgtggtgaggcttatgtctgtgctctcagtgagttcgtggacccttcctcactcacggccagggaagagcacttcccatcagcccacgccactgaaatcctggccaggttcccctgcaaggagaaccctgacaacctgtcagacttccgggaggaggtcagccgcaggctcaggtatgagtcccagctctttggatggctgctcatcggcgtggtggccatcctggtgttcctgaccaagtgcctcaagcattactgctcaccactcagctaccgccaggaggcctactgggcgcagtaccgcgccaatgaggaccagctgttccagcgcacggccgaggtgcactctcgggtgctcgctgccaacaatgtgcgccgcttctttggctttgtggcgctcaacaaggatgatgaggaactgattgccaacttcccagtggaaggcacgcagccacggccacagtggaatgccatcaccggcgtctacttgtaccgtgagaaccagggcctcccactctacagccgcctgcacaagtgggcccagggtctggcaggcaacggcgcggcccctgacaacgtggagatggccctgctcccctcctaaggaggtgcttcccatgctctttgtaaatggcactacttggtcccaaactgaaccccactgcttgctcacatccatatcagaaggggatttttaaaaaactgttatcttcttggccaggggaaaggaccacaaggcaatctggggtgtggacagacccagtagacaatggaagccccagccagcagggccaggtgacagtgaagctcaccagtgggctcctttatggtactctatgcagttaacatgtatctagctgcatagggacacccagcgcagcagtgcaccactgggaagtggcctccagtgcagcctctggccttattttatatatttaaatttttgataaagtttttcttactaaaaggaaaaaaaaaaaaaaaaaa

SEQ ID NO: 4131 - DNA, 1084 bp, Homo Sapiens
  NM_015920
tagagcagacaagcccgccccgccgctcctcccagcagcttctatcccggaagttgatgccgagcgcagatcgcttgcagcttgctagctgtgtgggctgggaggtctggtagggctgagcttgcaagaggatcaacatgcctttggctagagatttactacatccgtccttggaagaggaaaagaaaaaacataaaaagaaacgcctagtacaaagtccaaattcttactttatggatgtaaaatgtccaggttgctacaagatcaccacggttttcagccatgctcagacagtggttctttgtgtaggttgttcaacagtgttgtgccagcctacaggaggaaaggccagactcacagaagggtgttcatttagaagaaagcaacactaatgattcaaacagcttcctgaattttaattttgtgttgtctcacagaaagccttatcataaattccataattctaattaatttaccaagataatgtaattacatttggttttgtaaggtatacagcagtaatctcctattttggtgtcagtttttcaataaagttttgattatgggcaaatcccctctttttctttttttaaaatatatttgagtatgccatacatttatatatatggtgtatatgaatttggtttaaacattttaaaatttattctgattagtttgtgtctttttttttttttttgagagagagagtcctgctctgtcactcaagctggagtgcagtggtgcgatctcggctcactgcaacctccgcctcccaggtccaagcaattctcttgccttgtcctcccaagtagctgggattataggcacacaccaccatgcctggctaatttgtgtctcattttcaagagtagaaaccctaaatattttattttcattccttttccaaattgctatgaatgggattaaaggattacagatgtaaagtctattatttgtgaattctaaatgtagttctgctgttgtacctgtggaaacatcttaaagaagtacatattttgcacgtcctgcacgtgtaccccagaacttaaactataattaaaaagaatagtttcaaaaaaataca

SEQ ID NO: 4132 - DNA, 1581 bp, Homo Sapiens
  NM_015922
cgccgagctgggccaatcctcttggtggaggaagctcggctgattctcggctcacgcgggaggggagtaaagggtggcggtccgggcctggagttcagtgggtgcagcctgcttgcgagctgaggccagacaggggggcgcctacggacggaaaagaaaagttgattacaaacgggaccatattttgcttcgaaatggaaccagcagttagcgagccaatgagagaccaagtcgcacggactcatttgacagaggacactcccaaagtgaatgctgacatagaaaaggttaaccagaatcaggccaagagatgcacagtgatcggtggctctggattcctggggcagcacatggtggagcagttgctggcaagaggatatgctgtcaatgtatttgatatccagcaagggtttgataatccccaggtgcggttctttctgggtgacctctgcagccgacaggatctgtacccagctctgaaaggtgtaaacacagttttccactgtgcgtcacccccaccatccagtaacaacaaggagctcttttatagagtgaattacattggcaccaagaatgtcattgaaacttgcaaagaggctggggttcagaaactcattttaaccagcagtgccagtgtcatctttgagggcgtcgatatcaagaatggaactgaagaccttccctatgccatgaaacccattgactactacacagagactaagatcttacaggagagggcagttctgggcgccaacgatcctgagaagaatttcttaaccacagccatccgccctcatggcattttcggcccaagggacccgcagttggtacccatcctcatcgaggcagccaggaacggcaagatgaagttcgtgattggaaatgggaagaacttggtggacttcacctttgtggagaacgtggtccatggacacatcctggcggcagagcagctctcccgagactcgacactgggtgggaaggcatttcacatcaccaatgatgagcccatccctttctggacattcctgtctcgcatcctgacaggcctcaattatgaggcccccaagtaccacatcccctactgggtggcctactacctggccctcctgctatccctgctggtgatggtgatcagtcctgtcatccagctgcagcccaccttcacacccatgcgggtcgcactggctggcacattccactactacagctgcgagagagccaaaaaggccatgggctaccagccactagtgaccatggatgatgctatggagaggaccgtgcagagctttcgccacctgcggagggtcaagtgagggacactggaggctgggctctctcgacacgttgctcagccagtcactccttcccctgtggattgatgaaataacatcctttgaatgagtttgctctgagcctgtgactccttctgctaggcagagagcgcaccctactctttccgtgacgatgagggcggcaaaaacagacatttcttccttcatggaactggatttggatttcttgaagcaggcagcttcatattataccgatttgttctctgtcaaaaaaaaaaaaaaaaaa

SEQ ID NO: 4133 - DNA, 1382 bp, Homo Sapiens
  NM_015926
gtgcgcggcgggcgcgcgcaggctccgtaaccgaaccctgagccgcctgcgcggatcggcgtccgcagcgggcggctgctgagctgccttgaggtgcagtgttggggatccagagccatgtcggacctgctactactgggcctgattgggggcctgactctcttactgctgctgacgctgctggcctttgccgggtactcagggctactggctggggtggaagtgagtgctgggtcaccccccatccgcaacgtcactgtggcctacaagttccacatggggctctatggtgagactgggcggcttttcactgagagctgcagcatctctcccaagctccgctccatcgctgtctactatgacaacccccacatggtgccccctgataagtgccgatgtgccgtgggcagcatcctgagtgaaggtgaggaatcgccctcccctgagctcatcgacctctaccagaaatttggcttcaaggtgttctccttcccggcacccagccatgtggtgacagccaccttcccctacaccaccattctgtccatctggctggctacccgccgtgtccatcctgccttggacacctacatcaaggagcggaagctgtgtgcctatcctcggctggagatctaccaggaagaccagatccatttcatgtgcccactggcacggcagggagacttctatgtgcctgagatgaaggagacagagtggaaatggcgggggcttgtggaggccattgacacccaggtggatggcacaggagctgacacaatgagtgacacgagttctgtaagcttggaagtgagccctggcagccgggagacttcagctgccacactgtcacctggggcgagcagccgtggctgggatgacggtgacacccgcagcgagcacagctacagcgagtcaggtgccagcggctcctcttttgaggagctggacttggagggcgaggggcccttaggggagtcacggctggaccctgggactgagcccctggggactaccaagtggctctgggagcccactgcccctgagaagggcaaggagtaacccatggcctgcaccctcctgcagtgcagttgctgaggaactgagcagactctccagcagactctccagccctcttcctccttcctctgggggaggaggggttcctgagggacctgacttcccctgctccaggcctcttgctaagccttctcctcactgccctttaggctcccagggccagaggagccagggactattttctgcaccagcccccagggctgccacccctgttgtgtctttttttcagactcacagtggagcttccaggacccagaataaagccaatgatttacttgtttcacctggaaaaaaaaaaaaaaaaa

SEQ ID NO: 4134 - DNA, 1812 bp, Homo Sapiens
  NM_015927
ggagaataaaataatcaggaggctgggtttgtgcttggctccaagcatgccctgctctctgacctggagactaccacctcgcacatgccaaggtcaggggctcccaaagagcgccctgcggagcctctcacccctcccccatcctatggccaccagccacagacagggtctggggagtcttcaggagcctcgggggacaaggaccacctgtacagcacggtatgcaagcctcggtccccaaagcctgcagccccggcggcccctccattctcctcttccagcggtgtcttgggtaccgggctctgtgagctagatcggttgcttcaggaacttaatgccactcagttcaacatcacagatgaaatcatgtctcagttcccatctagcaaggtggcttcaggagagcagaaggaggaccagtctgaagataagaaaagacccagcctcccttccagcccgtctcctggcctcccaaaggcttctgccacctcagccactctggagctggatagactgatggcctcactctctgacttccgcgttcaaaaccatcttccagcctctgggccaactcagccaccggtggtgagctccacaaatgagggctccccatccccaccagagccgactggcaagggcagcctagacaccatgctggggctgctgcagtccgacctcagccgccggggtgttcccacccaggccaaaggcctctgtggctcctgcaataaacctattgctgggcaagtggtgacggctctgggccgcgcctggcaccccgagcacttcgtttgcggaggctgttccaccgccctgggaggcagcagcttcttcgagaaggatggagcccccttctgccccgagtgctactttgagcgcttctcgccaagatgtggcttctgcaaccagcccatccgacacaagatggtgaccgccttgggcactcactggcacccagagcatttctgctgcgtcagttgcggggagcccttcggagatgagggtttccacgagcgcgagggccgcccctactgccgccgggacttcctgcagctgttcgccccgcgctgccagggctgccagggccccatcctggataactacatctcggcgctcagcgcgctctggcacccggactgtttcgtctgcagggaatgcttcgcgcccttctcgggaggcagctttttcgagcacgagggccgcccgttgtgcgagaaccacttccacgcacgacgcggctcgctgtgcgccacgtgtggcctccctgtgaccggccgctgcgtgtcggccctgggtcgccgcttccacccggaccacttcacatgcaccttctgcctgcgcccgctcaccaaggggtccttccaggagcgcgccggcaagccctactgccagccctgcttcctgaagctcttcggctgacagcccgctcggctcgccctctcccccggaggccgcgccctcccggaaaagccgggtcctccagaccccgaggccttgctctcagagcgggaggccccacccactggagagccccgcccctaaggtactatgagtcctcaggggtcaagttcagaaacggcccagccagacctaaacccacacgcccacaaagtggattgcacacagacaagaactcccgtgcgggcctccactctattcccacccttgagggagcccccttactgggggagggtccttgcaattccagcgaatcggaggccaggccaggacgtccttgctccctgcaccctcactgttctgtgcactttttctacctacataaacacacgcattccacctctcaaaaaaaaa

SEQ ID NO: 4135 - DNA, 1456 bp, Homo Sapiens
  NM_015929
agcatcgcgcgcaaggcctgccggttgctcggggtcgtatgacgcacttttccagctcgagccctcacgaggccgtgggtacgaccggaagccgcagactgaatctcgctctgttgcccagcccatctcggcccactgaaacctccacctcccgggttcaagcgattctcctgcctcagcctcccgagtagctgagattacaggcgcctgccaccacgcccagcatgctgatcccattttcaatgaagaattgcttccagttactttgtaactgccaggtcccagcagctggctttaaaaaaacagtaaaaaatgggctcattttacagtcaatttccaatgatgtctatcaaaatctggctgtggaagactggatccatgaccatatgaatctagaaggcaaaccaattctattcttttggcagaattctccctctgttgtaattggtaggcatcaaaatccttggcaggaatgtaacctgaatctaatgagagaagaaggtataaaactggctcggagaagaagtggaggaggaacagtctaccatgatatgggtaatatcaatttgactttctttacaaccaaaaaaaagtatgatagaatggaaaatctgaaattaattgtgagagctctgaatgctgtccaaccccagctggatgtgcaggctaccaaaagatttgaccttttacttgatggacagtttaaaatctcaggaacagcttctaagatcggccggactactgcctatcaccattgcactttattatgtagtactgatgggacgttcttgtcttctttgctaaagagcccttaccaagggatcaggagcaatgccactgctagcataccttccttagtgaaaaatcttttggaaaaggatcccactctgacctgtgaagtactaatgaatgctgttgctacagagtatgctgcttatcatcaaattgataatcacattcacctaataaacccaacggatgagacactgtttcctggaataaatagcaaagccaaagaactgcaaacttgggagtggatatatggcaaaactccaaagtttagtataaatacttcctttcatgtgttatatgaacagtcacacttggaaattaaagtattcatagacataaagaatggaagaattgaaatttgtaatattgaagcacctgatcattggttgccattggaaatacgtgacaaattaaattcaagtcttattggcagtaagttttgcccaactgaaactaccatgctaacaaatatattacttagaacatgtccacaagaccacaaactaaacagtaaatggaatattctctgtgaaaaaattaagggaataatgtgattccaagtaaatgtcttaatacagtttcaattagaaaataaaatgtctcatacttgcacattgtatgtcaaaaaaaaaaaaaaaaaaaaaaaaaaaaaaaaaaaaaaaaa

SEQ ID NO: 4136 - DNA, 1477 bp, Homo Sapiens
  NM_015932
attgcaagcgtgggagcctcggccccgcgcagctccctccggcgtcccgcgccctccttccttcctcgccaggacggacgcacttccggcggatgtgggggccagccctcggaaacggaagtgagcggcggggtcgactgacggtaacggggcagagaggctgttcgcagagctgcggaagatgaatgccagaggacttggatctgagctaaaggacagtattccagttactgaactttcagcaagtggaccttttgaaagtcatgatcttcttcggaaaggtttttcttgtgtgaaaaatgaacttttgcctagtcatccccttgaattatcagaaaaaaatttccagctcaaccaagataaaatgaatttttccacactgagaaacattcagggtctatttgctccgctaaaattacagatggaattcaaggcagtgcagcaggttcagcgtcttccatttctttcaagctcaaatctttcactggatgttttgaggggtaatgatgagactattggatttgaggatattcttaatgatccatcacaaagcgaagtcatgggagagccacacttgatggtggaatataaacttggtttactgtaatagtgtgctgttcatggaaaccgagggctgcatcttgtttatagtcatctttgtactgtaatttgatgtacacaacattaaaagtactgacacctgagaatttctgctcaagtagtatcagtgatcatttaaaatttggaggggtctttggtttacagccatgtgacaattaaaagcactaaagggagatcatgttaaagctcttaatttatattaaaacagtagcctttgtctttaaaaaagttgttgctcatgaatattataaaatgatctacaggtttcaattcaacctgtttctaggtttttttgtaaatttagttttgattaagcattataagcatttgagtctataaactttatagtagcatctttcagaataaacatttttaattgatttcagtggcaactctcaaattgattacaatatgagatatatcagtgtcgtccattaacactcataagaataatatttactgtgtcagtgctattttaggattatagttattgtttgattatttcaggttgaaaagtagaagttccaaggttttgattttggtctggtctttaagtgaaaaattaaagcaaccagtagatgtaggttaaacttttacttcatagacttaatatgtaattaatatattgccaagcaacactgttaaagaaaagtaaaactcattttttcttgttcttaatttatatattacaagatactgtaaggtattctttatgaagttgatatataaaaatttacatttttagaacattagtgaatggatcatcttttacaattaaaagtatattttgattatcagtttcttaggaacatctttgattagataaattactgatttgaaaaaaaaaaaaaaaaaa

SEQ ID NO: 4137 - DNA, 491 bp, Homo Sapiens
  NM_015933
ggggaagcggcggcaggcgccatgtccggccgcgaaggtggcaagaagaagccactgaaacagcccaagaagcaggccaaggagatggacgaggaagataaggctttcaagcagaaacaaaaagaggagcagaagaaactcgaggagctaaaagcgaaggccgcggggaaggggcccttggccacaggtggaattaagaaatctggcaaaaagtaagctgttccttgtgcctgaggagatggtgaccctttatttcatctgtatttaaacctctctattccctgccataacatcttttgccacgtatagctggaattaagtgttgtcttggagctgttgtacatttaagaataaacttttgtaaaaaaagaaaaatcttacagtggctcatcatctctttagttgttttcactaagtcattcctaccataactgtgaatttaaagtaaaaccagctcagaatccaaaaaaaaaaaaaaaaaaaaaaaaaaa

SEQ ID NO: 4138 - DNA, 1979 bp, Homo Sapiens
  NM_015934
gcagcgtgttctgattctttgcgggacggcgagcgcatttgtgctttgcccgccgcggcctaggaggccttttgaggccgcgtagtcggtgtttttgaactgactctacagcttctggcaggccgtgcggcgccctgacccggcctcaccatgttggtgctgtttgaaacgtctgtgggttacgccatctttaaggttctaaatgagaagaaacttcaagaggttgatagtttatggaaagaatttgaaactccagagaaagcaaacaaaatagtaaagctaaaacattttgagaaatttcaggatacagcagaagcattagcagcattcacagctctgatggagggcaaaatcaataagcagctgaaaaaagttctgaagaaaatagtaaaagaagcccatgaaccgctggcagtagctgatgctaaactaggaggggtcataaaggaaaagctgaatctcagttgtatccatagtcctgttgttaatgaacttatgagaggaattcgttcacaaatggatggattaatccctggggtagaaccacgtgaaatggcagctatgtgtcttggattggctcacagcctgtctcgatatagattgaagtttagcgctgataaagtagacacaatgattgttcaggcaatttccttgttagatgacttggataaagaactaaacaactacattatgcgatgtagagaatggtatggctggcatttccctgaattaggaaaaattatttcagataatttaacatactgcaagtgtttacagaaagttggcgataggaagaactatgcctctgccaagctttctgagttgctgccagaagaagttgaagcagaagtgaaagcagctgcagagatatcaatgggaacagaggtttcagaagaagatatttgcaatattctgcatctttgcacccaggtgattgaaatctctgaatatcgaacccagctctatgaatatctacaaaatcgaatgatggccattgcacccaatgttacagtcatggttggggaattagttggagcacggcttattgctcatgcaggttctcttttaaatttggccaagcatgcagcttctaccgttcagattcttggagctgaaaaggcacttttcagagccctcaaatctagacgggatacccctaagtatggtctcatttatcatgcttcactcgtgggccagacaagtcccaaacacaaaggaaagatttctcgaatgctggcagccaaaaccgttttggctatccgttatgatgcttttggtgaggattcaagttctgcaatgggagttgagaacagagccaaattagaggccaggttgagaactttggaagacagagggataagaaaaataagtggaacaggaaaagcattagcaaaaacagaaaaatatgaacacaaaagtgaagtgaagacttacgatccttctggtgactccacacttccaacctgttctaaaaaacgcaaaatagaacaggtagataaagaggatgaaattactgaaaagaaagccaaaaaagccaagattaaagttaaagttgaagaagaggaagaagaaaaagtggcagaagaagaagaaacatctgtgaagaagaagaagaaaaggggtaaaaagaaacacattaaggaagaaccactttctgaggaagaaccatgtaccagcacagcaattgctagtccagagaaaaagaagaaaaagaaaaaaaagagagagaacgaggattaacagaaaggaattacgattatatcacccggacacacatcatgcttaagattcaactgggagcataccagggatgctctctaacgtaatcaagggaaggttcagtaagacaaagtgatttatcatctataacttcaaacctatttgtcttgacatcaactctgttaaccttatgtcatcatttcttagagtctttgatatacaaataaaattttctttgtattttaaaaaaaaaaaaaaaa

SEQ ID NO: 4139 - DNA, 3421 bp, Homo Sapiens
  NM_015935
gagttgggctgggccggccgacgaatcacgaggcttcgcacccggatatggttatgggctcggaaatctagttcgggaaaagtgtgaggggctcttcacgtggggaaggaacagcaggcgcggaggagggggcaagcgtgtgtgagattcagtggtccatgcgtgcgtttgtcgtgtaagggtcattcctggggtttggagtgggggaacaaatcaatgtggctgtttttccgtggaaagaattcccactgcagtgtcccggagcctgcgtgtggtgggcaagctcctcaaatggtatctcacagggaataggggagtcttgaaaacgcagcttcggcagtaggaacatgaacctcttacctaaaagttccagggagtttggctccgttgactattgggagaagttcttccagcagcgaggaaagaaagctttcgagtggtatggaacctacctggaactgtgcggggtgctacataaatatatcaagcccagggaaaaggtgctggtgattgggtgtggcaactcagaactgagtgagcaactgtatgatgtgggctatcgggatatagtgaacatcgacatcagtgaggttgtcatcaagcaaatgaaggaatgtaatgccacccgacggccccagatgagcttcttgaagatggacatgacgcagatggagtttcctgatgcctcgttccaggtggtgttggacaagggcaccctggatgctgtcctgacagatgaggaagagaagaccttacaacaggtggacaggatgctggctgaggttggccgtgtcctgcaggtgggcggtcgctatctctgcatctccctggctcaggctcacatcctgaagaaagcagtgggccacttctcccgggaggggtggatggtgagggtgcaccaagtggccaacagccaggaccaggtgttggaagcagagcctcagttctccttgcctgtctttgccttcatcatgaccaagttcaggccagtccctggctctgcccttcagatctttgagctgtgtgctcaggagcagcgcaagcctgtgcggctggagagtgccgagcggctggccgaggcggtgcaggagcgacagcagtatgcctggctgtgcagccagctgcgccgcaaggccaggctggggagtgtgtctctggacttgtgcgatggggacacgggggagccacgctacaccctccacgtggtggacagccccactgtgaaaccatcgcgggacaatcattttgcgattttcatcatccctcagggccgggagaccgagtggctctttggcatggatgagggccggaaacagctggcggccagtgctggcttcaggaggttgattacagtggcccttcaccgaggtcagcagtatgaaagcatggaccacatccaagctgagctgtcggctagagtcatggagctggccccagctgggatgcccacccagcagcaggtcccctttctgtctgtgggtggggacattggggtccggaccgttcagcaccaagactgcagccccttgagcggtgactatgtcattgaggatgtgcaaggggatgacaagcgatacttccgtcgactgatcttcctcagcaacaggaatgtggtgcagtccgaagccaggttgctgaaggatgtgtctcacaaagcccagaagaagcggaaaaaggacaggaagaagcagcggcctgctgatgcggaggacctccctgcagccccggggcagtccattgataagagttacctgtgttgtgaacaccacaaagccatgatcgctggccttgccctgctgagaaacccagagctactcctagagatcccactggcattgttggtggtaggcctgggcgggggcagcctccccctctttgtccacgatcattttccaaagtcctgcattgatgctgtggagatcgatccctccatgttggaagtggccacccagtggtttggcttctcccagagtgaccgaatgaaggtccacattgcagatggcctggactatatcgccagcttggcaggaggaggagaagcacggccttgctacgatgtcataatgtttgatgttgacagtaaggacccaacactgggaatgagttgtccgcccccagcatttgtggagcaatcttttctacagaaggttaaaagcatcttgactcctgaaggtgtttttattctcaaccttgtgtgccgagacttggggctaaaagactcagtgctggctgggctcaaggcagtgttccccctcctatatgtccggcgaattgagggtgaagtgaatgagatcctgttctgtcagctgcaccctgagcaaaaacttgccacaccagagctcctagaaacagcccaggctttggagcggaccctgaggaagcctgggaggggttgggatgacacgtatgtcttgtcagatatgctcaagacggtgaaaattgtgtgactgcttaggccaagcagccctcctgcctagactgaccttggactcccagcctgccagagaatgaagaaatacaacgcacagtacttttgaagcttcgtatttttcttggtttcacactcagctacatgtgacctccagcttggtgaggttgcctgaagattagggaaaataaaaatgtccttcccatcttgtcctcttcagtaccacttgggttggtttgtctttgcttcctacaccacgtccttgagtggagttccctgctgaagcccctagcacacactgcatgccttaacaagtgtgtgcaagcccctcagaactcaagacatccaaattttattgcgtctctacttatactggtttgcttttgatttattcctctattagttctataggagtgatctcaagtgagatagcagagcaagatgccaaaagaccataaatagagtaaggtttctatagatgtgagacagatttgagagagcatttactctgtctccctgtggatgaaactgctgctgaaatggttccaatttttaggaatctgcttacccacttcattatttgacagctttccttggtgacccaaaccttgtagcctaagccatttgtctttttctcagtggagggagtgtatggacctggccccatggctttgcatgttagagacctggcagactaaagtctctagtgtttgtttgctcacatttgctgagtgacagctatgtgccagactgcataaagggtggtggcagaagtgaaaatgtttaagaatgaccaaaaacattagtaatgaaagttaatgtgttccaggcattcttctaagtggtttacatgcactgtctcatttaatctgagataaaggatacttaagcccaaactatatctaaacccaaatctcacttggctggaaacatcaatcttaaccatttattcagaaccattaaaccaatgattccaagaaaaaaaaaaaaaaa

SEQ ID NO: 4140 - DNA, 2245 bp, Homo Sapiens
  NM_015937
agcggaagtcacttctcacacgcctttcttattggataccggcttttcatggggccgagcgccgctgggtaggcggaagtagccgcaggcatggcggcggctatgccgcttgctctgctcgtcctgttgctcctggggcccggcggctggtgccttgcagaacccccacgcgacagcctgcgggaggaacttgtcatcaccccgctgccttccggggacgtagccgccacattccagttccgcacgcgctgggattcggagcttcagcgggaaggagtgtcccattacaggctctttcccaaagccctggggcagctgatctccaagtattctctacgggagctgcacctgtcattcacacaaggcttttggaggacccgatactgggggccacccttcctgcaggccccatcaggtgcagagctgtgggtctggttccaagacactgtcactgatgtggataaatcttggaaggagctcagtaatgtcctctcagggatcttctgcgcctctctcaacttcatcgactccaccaacacagtcactcccactgcctccttcaaacccctgggtctggccaatgacactgaccactactttctgcgctatgctgtgctgccgcgggaggtggtctgcaccgaaaacctcaccccctggaagaagctcttgccctgtagttccaaggcaggcctctctgtgctgctgaaggcagatcgcttgttccacaccagctaccactcccaggcagtgcatatccgccctgtttgcagaaatgcacgctgtactagcatctcctgggagctgaggcagaccctgtcagttgtatttgatgccttcatcacggggcagggaaagaaagactggtccctcttccggatgttctcccgaaccctcacggagccctgccccctggcttcagagagccgagtctatgtggacatcaccacctacaaccaggacaacgagacattagaggtgcacccacccccgaccactacatatcaggacgtcatcctaggcactcggaagacctatgccatctatgacttgcttgacaccgccatgatcaacaactctcgaaacctcaacatccagctcaagtggaagagacccccagagaatgaggcccccccagtgcccttcctgcatgcccagcggtacgtgagtggctatgggctgcagaagggggagctgagcacactgctgtacaacacccacccataccgggccttcccggtgctgctgctggacaccgtaccctggtatctgcggctgtatgtgcacaccctcaccatcacctccaagggcaaggagaacaaaccaagttacatccactaccagcctgcccaggaccggctgcaaccccacctcctggagatgctgattcagctgccggccaactcagtcaccaaggtttccatccagtttgagcgggcgctgctgaagtggaccgagtacacgccagatcctaaccatggcttctatgtcagcccatctgtcctcagcgcccttgtgcccagcatggtagcagccaagccagtggactgggaagagagtcccctcttcaacagcctgttcccagtctctgatggctctaactactttgtgcggctctacacggagccgctgctggtgaacctgccgacaccggacttcagcatgccctacaacgtgatctgcctcacgtgcactgtggtggccgtgtgctatggctccttctacaatctcctcacccgaaccttccacatcgaggagccccgcacaggtggcctggccaagcggctggccaaccttatccggcgcgcccgaggtgtccccccactctgattcttgccctttccagcagctgcagctgccgtttctctctggggaggggagcccaagggctgtttctgccacttgctctcctcagagttggcttttgaaccaaagtgccctggaccaggtcagggcctacagctgtgttgtccagtacaggagccacgagccaaatgtggcatttgaatttgaattaacttagaaattcatttcctcacctgtagtggccacctctatattgaggtgctcaataagcaaaagtggtcggtggctgctgtattggacagcacagaaaaagatttccatcaccacagaaaggtcggctggcagcactggccaaggtgatggggtgtgctacacagtgtatgtcactgtgtagtggatggagtttactgtttgtggaataaaaacggctgtttccgtggtt

SEQ ID NO: 4141 - DNA, 1424 bp, Homo Sapiens
  NM_015942
gggacgtgcggcccagcgagttggtcggtcccggggtcacccgctacgggaagcaggcctcgccacagactaagaaaaatggctttgtcagcccaacagatacccagatggtttaactcagttaagttgaggagcctcattaatgctgcacaactcacaaaacgttttactagaccagcaagaacactgttacatggcttttctgctcagcctcagatatcctctgacaattgctttctccagtggggatttaagacttacaggacttcctccttatggaatagttcccagtctactagctcaagtagtcaggagaataattctgcccaaagcagtctgcttccttccatgaatgaacagtcacagaagacacaaaatatatccagctttgattctgagctgtttctagaagaactggatgaattgcctccattgtctccaatgcagccaatttcagaggaagaggctattcagattattgcagaccctccattgccaccagcttcattcacacttcgagactatgtggatcattctgagactctgcagaagttggttcttctaggcgtggatttgtccaagatagaaaaacatccagaagcagcaaacctccttctgagactggattttgaaaaagacattaagcaaatgcttctgtttcttaaagatgtgggtatagaggataaccaactgggagcattcctgacaaaaaatcatgcaattttctctgaagaccttgaaaatctgaagaccagggtggcttatctgcattcaaaaaatttcagtaaagcagatgttgcacagatggtcagaaaagcaccatttttgctgaacttttcagtggaaagactggataacagattgggattttttcagaaagaacttgaacttagtgtgaagaagactagagatctggtagttcgtctcccaaggctgctaactggaagtctggaacccgtgaaagaaaatatgaaggtttatcgtcttgaacttggttttaaacataacgaaattcaacatatgatcaccagaatcccaaagatgttaactgcaaataaaatgaaacttaccgagacgtttgattttgtgcacaatgtgatgagcattccccaccacatcattgtcaagttcccacaggtatttaatacaaggctgtttaaggtcaaagaaagacacttgtttcttacctatttaggaagagcacagtatgatccagcaaaacctaactacatctctttggacaaactagtatctattcctgatgaaatattttgtgaagagattgccaaagcatcagtacaggactttgaaaaattcttaaaaacgctttagatttttatgtatgttaaaatgcagtattgtaaagtgaatatatatatgaataaatgaatatatttttaaatgccaaaaaaaaaaaaaaaaaa

SEQ ID NO: 4142 - DNA, 1604 bp, Homo Sapiens
  NM_015944
gtgggcgcggtctcagctctcggctggggttcgtcactgggcgcgggatttggccgccgcggggctccggagccgctcgctcccgacacggctcacgatgcgcggcgagcagggcgcggcgggggcccgcgtgctccagttcactaactgccggatcctgcgcggagggaaactgctcagggaggatctgtgggtgcgcggaggccgcatcttggacccagagaagctgttctttgaggagcggcgcgtggccgacgagcggcgggactgcgggggccgcatcttggctcccggattcatcgacgtgcagatcaacggtggatttggtgttgacttctctcaagccacggaggacgtgggttcgggggttgccctcgtggcccggaggatcctgtcgcacggcgtcacctccttctgccccaccctggtcacttccccaccggaggtttatcacaaggttgttcctcagatccctgtgaagagtggtggtccccatggggcaggggtcctcgggctgcacctggagggccccttcatcagccgggagaagcggggcgcgcaccccgaggcccacctccgctccttcgaggccgatgccttccaggacttgctggccacctacgggcccctggacaatgtccgcatcgtgacgctggccccagagttgggccgtagccacgaagtgatccgggcgctgacggcccgtggcatctgcgtgtccctagggcactcagtggctgacctgcgggcggcagaggatgctgtgtggagcggagccaccttcatcacccacctcttcaacgccatgctgcctttccaccaccgcgacccaggcatcgtggggctcctgaccagcgaccggctgcccgcaggccgctgcatcttctatgggatgattgcagatggcacgcacaccaaccccgccgccctgcggatcgcccaccgtgcccatccccaggggctggtgctggtcaccgatgccatccctgccttgggcctgggcaacggccggcacacgctgggacagcaggaagtggaagtggacggtctgacggcctacgtggcaggtgagcgccctgacccactgggtcccaggtcccagcccgcatgccaggtggcccacgacccccccagagcctgccctctctgctctcaaggcaccaagacgctgagtggcagcatagccccaatggacgtctgtgtccggcacttcctgcaggccacaggctgcagcatggagtcggccctggaggctgcatccctgcaccccgcccagttgctggggctggagaagagtaaggggaccctggactttggtgctgacgcagacttcgtggtgctcgacgactcccttcacgtccaggccacctacatctcgggtgagctggtgtggcaggcggacgcagctaggcagtgacaaggacctcggctgagaggacacctggccgcagcgggatgccatcagggccgggtggttggggagctggtctccagggagtgagtcgggagccctgctggattgatgcccagggcctgtgcggccgccctggaggcggtggctgggataaacgtgcacccagcaggaaaaaaaaaaaaaaaaaaaa

SEQ ID NO: 4143 - DNA, 2941 bp, Homo Sapiens
  NM_015946
gatttggcccggagaacgagatcaccctctcaatgaaaggcagatgtccctttaaggtttgcttctacagcccgtggactttagcctaaacacggacccgcgaagctggctttatttgtccatgtctcggacagagcctgggaagctgccagtgagatttcagagaccaagagcgcgaaggggcgggcgatgtggcaatccgtctgggatgtgaaaagcgtggagcgcatttagaggaattcgacgaaaacacaggaaatcactcctctcccgctcctgggcgccgctgccactggggcagaggactgggaaccgcggcagcgggataagtggcccagccagagagcgcagctcccgcgcccggtcctgccctgcgaaccagcgcggccccctggcgctgaggctgctccggccatggcccctcggccccgcgcccgcccaggggtcgctgtcgcctgctgctggctcctcactgacagggatggaagagaaaacttaggaagttgaagtttggcattaaaataaaggactcgccaccactctgtgcaccttcttgagggagttcattcgtccggagcgcctcacagcttagtgcgcctgcgcacgcgcgaactgcggccccgcctctcctttggggacgggagacgtgcgtcgggtcgcgggacgggggctgcgcatgcgccttcatttcgtcagcccgctgttgcgtgctgccagcgggaactgtgtaggggtagattttcgctgcagtgttccccgagcctgttagacgcagcgcgccgggagactgagagaggaaaggatagaggaagtgctgccctaggctgcatgagtcgaagcaagcgtgtttccttcccgccaggcaagtgcccttagaaaccgggccccgcccccttcctggcctgcattcccatcccctctcccggggcggaggtgaggacctccttggttcctttggttctgtcagtgagccccttccttggccatgaagctcgtgaggaagaacatcgagaaggacaatgcgggccaggtgaccctggtccccgaggagcctgaggacatgtggcacacttacaacctcgtgcaggtgggcgacagcctgcgcgcctccaccatccgcaaggtacagacagagtcctccacgggcagcgtgggcagcaaccgggtccgcactaccctcactctctgcgtggaggccatcgacttcgactctcaagcctgccagctgcgggttaaggggaccaacatccaagagaatgagtatgtcaagatgggggcttaccacaccatcgagctggagcccaaccgccagttcaccctggccaagaagcagtgggatagtgtggtactggagcgcatcgagcaggcctgtgacccagcctggagcgctgatgtggcggctgtggtcatgcaggaaggcctcgcccatatctgcttagtcactcccagcatgaccctcactcgggccaaggtggaggtgaacatccctaggaaaaggaaaggcaattgctctcagcatgaccgggccttggagcggttctatgaacaggtggtccaggctatccagcgccacatacactttgatgttgtaaagtgcatcctggtggccagcccaggatttgtgagggagcagttctgcgactacctgtttcaacaagcagtgaagaccgacaacaaactgctcctggaaaaccggtccaaatttcttcaggtacatgcctcctccggacacaagtactccctgaaagaggccctttgtgaccctactgtggctagccgcctttcagacactaaagctgctggggaagtcaaagccttggatgacttctataaaatgttacagcatgaaccggatcgagctttctatggactcaagcaggtggagaaggccaatgaagccatggcaattgacacattgctcatcagcgatgagctcttcaggcatcaggatgtagccacacggagccggtatgtgaggctggtggacagtgtgaaagagaatgcaggcaccgttaggatattctctagtcttcacgtttctggggaacagctcagccagttgactggggtagctgccattctccgcttccctgttcccgaactttctgaccaagagggtgattccagttctgaagaggattaatgattgaaacttaaaattgagacaatcttgtgtttcctaaactgttacagtacatttctcagcatccttgtgacagaaagctgcaagaatggcactttttgattcatacagggatttcttatgtctttggctacactagatattttgtgattggcaagacatgtatttaaacaataaactaaaaggaaataatctccacgtactaccatcttgattaaattgtgtaattttttataggaattatgagttatctgtagtacttggaaacagaaaatgtgtgtatttaaagacgatgcctatgcagtatattgtttgggatagattgcaaaatttcacactgcatgctttgaaacagttttccttagaaaaagcttttgctatcttatcctgtttacattatttctttattttaattctgcttggtgttcttgcattgcatttaatgatcccttttctccccacctccacacactacattttttttagatttaaatagttttactattttaaatgattgccgtacaattagtagacttgaagacaagttttaaatatttttcttcaaaggcttgttaaaccaatcatgttaaaaggaaattcttggttttggtttgttgttgttagcattagtcatatttgatttagagggtaacttaaatcagttatttttagctttttagaactttgatctgctagggattgtcaaaataatctccttgaggcatctttatttttaaaatgagattaaagtatgtgatttgcttgttatgtggctaaaaaaaaaaaaaaaaaaaaaaa

SEQ ID NO: 4144 - DNA, 1292 bp, Homo Sapiens
  NM_015950
atccagcttgggctccagttttctgcccgcctccttttacgttattgcggagcgacggcgccggacagtcaacgtcatctaggagcaccgagcagcttggctaaaagtaagggtgtcgtgctgatggccctgtgcgcactgacccgcgctctgcgctctctgaacctggcgcccccgaccgtcgccgcccctgccccgagtctgttccccgccgcccagatgatgaacaatggcctcctccaacagccctctgccttgatgttgctcccctgccgcccagttcttacttctgtggcccttaatgccaactttgtgtcctggaagagtcgtaccaagtacaccattacaccagtgaagatgaggaagtctgggggccgagaccacacaggccgaatccgggtgcatggtattggcgggggccacaagcaacgttatcgaatgattgactttctgcgtttccggcctgaggagaccaagtcaggaccctttgaggagaaggttatccaagtccgctatgatccctgtaggtcagcagacatagctctggttgctgggggcagccggaaacgctggatcatcgccacagaaaacatgcaggctggagatacaatcttgaactctaaccacataggccgaatggcagttgctgctcgggaaggggatgcgcatcctcttggggctctgcctgtggggaccctcatcaacaacgtggaaagtgagccaggccggggtgcccaatatatccgagctgcagggacgtgtggtgtgctactgcggaaggtgaatggcacagccattatccagctgccctctaagaggcagatgcaggtgctggaaacgtgcgtagcaacagtaggccgagtatccaacgttgatcataacaaacgggtcattggcaaggcaggtcgcaaccgctggctgggcaagaggcctaacagtgggcggtggcaccgcaaggggggctgggctggccgaaagattcggccactaccccccatgaagagttacgtgaagctgccttctgcttctgcccaaagctgatatccctgtactctaataaaatgccccccccccccgttttaatctgttactgtggttttgttttgggtgttttttgttttttttgttgttgttttttttttgcgggggaggggatggtacagactaaacgtggggaaaagaagtaaaaagtgtggaagagaaagtacaggacactgggtctgtccccaccccaattcccttacaagtaatggagccggggatggaaataaatgacgtccaaggtcaaaaaa

SEQ ID NO: 4145 - DNA, 1116 bp, Homo Sapiens
  NM_015953
aagcgaccgagggactgggagtcgttagtgagagtttcactcttgttgcctaggctggagtgcaatggtgcgatcttggctcatcacgaccttcgcctcccaggttcaagtgattgtcccatttcagcctcccgagtagctgggattacaggatgacgcggcatggcaagaactgcaccgcaggggccgtctacacctaccacgagaagaagaaggacacagcggcctcgggctatgggacccagaacattcgactgagccgggatgccgtgaaggacttcgactgctgttgtctctccctgcagccttgccacgatcctgttgtcaccccagatggctacctgtatgagcgtgaggccatcctggagtacattctgcaccagaagaaggagattgcccggcagatgaaggcctacgagaagcagcggggcacccggcgcgaggagcagaaggagcttcagcgggcggcctcgcaggaccatgtgcggggcttcctggagaaggagtcggctatcgtgagccggcccctcaaccctttcacagccaaggccctctcgggcaccagcccagatgatgtccaacctgggcccagtgtgggtcctccaagtaaggacaaggacaaagtgctgcccagcttctggatcccgtcgctgacgcccgaagccaaggccaccaagctggagaagccgtcccgcacggtgacctgccccatgtcagggaagcccctgcgcatgtcggacctgacgcccgtgcacttcacaccgctagacagctccgtggaccgcgtggggctcatcacccgcagcgagcgctacgtgtgtgccgtgacccgcgacagcctgagcaacgccaccccctgcgctgtgctgcggccctctggggctgtggtcaccctcgaatgcgtggagaagctgattcggaaggacatggtggaccctgtgactggagacaaactcacagaccgcgacatcatcgtgctgcagcggggcggtaccggcttcgcgggctccggagtgaagctgcaagcggagaaatcacggccggtgatgcaggcctgagtgtgtgcgggagaccaaataaaccggcttgggtgcgcaaaaaaaaaaaaaaaaaaaa

SEQ ID NO: 4146 - DNA, 1741 bp, Homo Sapiens
  NM_015959
gtacgtttgcgatatagcccaatagcagtcgttatggtgggggaggcggggcgagacctacgacgccggcgagcagtggccgttacggccgaaaagatggcggtcttggcacctctaattgctctcgtgtattcggtgccgcgactttcacgatggctcgcccaaccttactaccttctgtcggccctgctctctgctgccttcctactcgtgaggaaactgccgccgctctgccacggtctgcccacccaacgcgaagacggtaacccgtgtgactttgactggagagaagtggagatcctgatgtttctcagtgccattgtgatgatgaagaaccgcagatccatcactgtggagcaacatataggcaacattttcatgtttagtaaagtggccaacacaattcttttcttccgcttggatattcgcatgggcctactttacatcacactctgcatagtgttcctgatgacgtgcaaaccccccctatatatgggccctgagtatatcaagtacttcaatgataaaaccattgatgaggaactagaacgggacaagagggtcacttggattgtggagttctttgccaattggtctaatgactgccaatcatttgcccctatctatgctgacctctcccttaaatacaactgtacagggctaaattttgggaaggtggatgttggacgctatactgatgttagtacgcggtacaaagtgagcacatcacccctcaccaagcaactccctaccctgatcctgttccaaggtggcaaggaggcaatgcggcggccacagattgacaagaaaggacgggctgtctcatggaccttctctgaggagaatgtgatccgagaatttaacttaaatgagctataccagcgggccaagaaactatcaaaggctggagacaatatccctgaggagcagcctgtggcttcaacccccaccacagtgtcagatggggaaaacaagaaggataaataagatcctcactttggcagtgcttcctctcctgtcaattccaggctctttccataaccacaagcctgaggctgcagccttttatttatgttttccctttggctgtgactgggtggggcagcatgcagcttctgattttaaagaggcatctagggaattgtcaggcaccctacaggaaggcctgccatgctgtggccaactgtttcactggagcaagaaagagatctcataggacggagggggaaatggtttccctccaagcttgggtcagtgtgttaactgcttatcagctattcagacatctccatggtttctccatgaaactctgtggtttcatcattccttcttagttgacctgcacagcttggttagacctagatttaaccctaaggtaagatgctggggtatagaacgctaagaattttcccccaaggactcttgcttccttaagcccttctggcttcgtttatggtcttcattaaaagtataagcctaactttgtcgctagtcctaaggagaaacctttaaccacaaagtttttatcattgaagacaatattgaacaaccccctattttgtggggattgagaaggggtgaatagaggcttgagactttcctttgtgtggtaggacttggaggagaaatcccctggactttcactaaccctctgacatactccccacacccagttgatggctttccgtaataaaaagattgggatttccttttgaaaaaaaaaaaaaaaaaaaaaaaaaaa

SEQ ID NO: 4147 - DNA, 1378 bp, Homo Sapiens
  NM_015960
ctccgctttcgcgggggctgctggggcgtaggtgtcggggacgcgcgcacgggcgcgcgcagctgttgacgcgcttcttagctggtgcgcgccggagcccaaattccaagtggaaactgcaggcgcacgagggaggaacgcgtggagcatgaaaaggcagggggcctcctctgagcgaaaacgagcgcggataccgtccgggaaggccggagcagcaaatggatttctcatggaagtttgtgttgattcagtggaatcagctgtgaatgcagaaagaggaggtgctgatcggattgaattatgttctggtttatcagaggggggaactacacccagcatgggtgtccttcaagtagtgaagcagagtgttcagatcccagtttttgtgatgattcggccacggggaggtgattttttgtattcagatcgtgaaattgaggtgatgaaggctgacattcgtcttgccaagctttatggtgctgatggtttggtttttggggcattgactgaagatggacacattgacaaagagctgtgtatgtcccttatggctatttgccgccctctgccagtcactttccaccgagcctttgacatggttcatgatccaatggcagctctggagaccctcttaaccttgggatttgaacgcgtgttgaccagtggatgtgacagttcagcattagaagggctacccctaataaagcgactcattgagcaggcaaaaggcaggattgtggtaatgccaggaggtggtataacagacagaaatctacaaaggatccttgagggttcaggtgctacagaattccactgttctgctcggtctactagagactcgggaatgaagtttcgaaattcatctgttgccatgggagcctcactttcttgctcagaatattccctaaaggtaacagatgtgaccaaagtaaggactttgaatgctatcgcaaagaacatcctggtgtagccagacctctctgagagacatggatatcacaggatgaaggtagaactataatctgcaattctctatgacacagctttaaccttcttctctggccaggacagtcgcaatctttgttttaagtttcacatggccatggagaatgtgcccaagaagaaaaagaatttgaaacagagatacagtcacttcctttgcttagtcttaccagtgattgtcatcatggttaaagctggtctgtgcttcttccatagacagaagcttagtctgttttcagtggaattaattgatgaactgggaaaattttaactgcatggtatgaattcagagtgtgacttaagggtcaattcaaagcagtattttgacttttcatttgtaaaataaaaatttccactattacagtaaaaaaaaaaa

SEQ ID NO: 4148 - DNA, 1055 bp, Homo Sapiens
  NM_015964
ggcggagccgcctgggctgcagtcccacccgggagccggcagggagcggagctgcggagccgcctggtctcccgcgtccatcggtccattcctgcgtcgttctgtccttccgaacgcacacttcaggagcagccgcgagggtggcatggcagcgagcacagacatggctgggctggaggagagcttccgcaagtttgccatccatggtgaccccaaggccagtgggcaagagatgaatggcaagaactgggccaagctgtgcaaggactgcaaggtggctgacggaaagtccgtgacagggaccgatgtggacatcgtcttctccaaagtcaaggggaagtctgctcgggtcatcaactatgaggagttcaagaaggccctggaagagctggcgaccaagagattcaaggggaagagcaaggaggaggccttcgatgccatctgccagctggtggcaggcaaagagccagccaatgtgggcgtcactaaagcaaaaacagggggtgctgtagaccggctgacggacaccagcagatacacgggctcccacaaggagcgcttcgatgagagcggcaagggcaagggcattgcgggacggcaggacatcctggacgacagtggctacgtgagcgcctacaagaatgcaggcacctacgatgccaaggtgaagaagtgaggcttgggaagaccgccctgccaagtgcggctgcccctgccagaggctcaggcctgggtctaaggggcacgtggagcaagagatcctggtcccctccctgctggacctgccacccagagcttcctgcctagtcccactgggctggcccaccaggcctctgacccaggctgctctgcggccccttcctcctcctcttcctgctccaacttctgtccacctggggacagtctgtgcctgtagcctcatgaccccaacccagccccaggcatggctaacccctgactgcttgcctcatatttaagctgctgctctggccaagtgcctaattttaacccagacctcaataaagacaccttttgtaccaaaaaaaaaaaaaaaa

SEQ ID NO: 4149 - DNA, 3672 bp, Homo Sapiens
  NM_015967
agtaaaccacagccttcagcatgctctgctcaggcggcagcagtggctttttggaggtgtctcggccatgacacacatttgacatgccctccctcaacctacttatagactatttttcttgctctgcagcatggaccaaagagaaattctgcagaagttcctggatgaggcccaaagcaagaaaattactaaagaggagtttgccaatgaatttctgaagctgaaaaggcaatctaccaagtacaaggcagacaaaacctatcctacaactgtggctgagaagcccaagaatatcaagaaaaacagatataaggatattttgccctatgattatagccgggtagaactatccctgataacctctgatgaggattccagctacatcaatgccaacttcattaagggagtttatggacccaaggcttatattgccacccagggtcctttatctacaaccctcctggacttctggaggatgatttgggaatatagtgtccttatcattgttatggcatgcatggagtatgaaatgggaaagaaaaagtgtgagcgctactgggctgagccaggagagatgcagctggaatttggccctttctctgtatcctgtgaagctgaaaaaaggaaatctgattatataatcaggactctaaaagttaagttcaatagtgaaactcgaactatctaccagtttcattacaagaattggccagaccatgatgtaccttcatctatagaccctattcttgagctcatctgggatgtacgttgttaccaagaggatgacagtgttcccatatgcattcactgcagtgctggctgtggaaggactggtgttatttgtgctattgattatacatggatgttgctaaaagatgggataattcctgagaacttcagtgttttcagtttgatccgggaaatgcggacacagaggccttcattagttcaaacgcaggaacaatatgaactggtctacaatgctgtattagaactatttaagagacagatggatgttatcagagataaacattctggaacagagagtcaagcaaagcattgtattcctgagaaaaatcacactctccaagcagactcttattctcctaatttaccaaaaagtaccacaaaagcagcaaaaatgatgaaccaacaaaggacaaaaatggaaatcaaagaatcttcttcctttgactttaggacttctgaaataagtgcaaaagaagagctagttttgcaccctgctaaatcaagcacttcttttgactttctggagctaaattacagttttgacaaaaatgctgacacaaccatgaaatggcagacaaaggcatttccaatagttggggagcctcttcagaagcatcaaagtttggatttgggctctcttttgtttgagggatgttctaattctaaacctgtaaatgcagcaggaagatattttaattcaaaggtgccaataacacggaccaaatcaactccttttgaattgatacagcagagagaaaccaaggaggtggacagcaaggaaaacttttcttatttggaatctcaaccacatgattcttgttttgtagagatgcaggctcaaaaagtaatgcatgtttcttcagcagaactgaattattcactgccatatgactctaaacaccaaatacgtaatgcctctaatgtaaagcaccatgactctagtgctcttggtgtatattcttacatacctttagtggaaaatccttatttttcatcatggcctccaagtggtaccagttctaagatgtctcttgatttacctgagaagcaagatggaactgtttttccttcttctctgttgccaacatcctctacatccctcttctcttattacaattcacatgattctttatcactgaattctccaaccaatatttcctcactattgaaccaggagtcagctgtactagcaactgctccaaggatagatgatgaaatcccccctccacttcctgtacggacacctgaatcatttattgtggttgaggaagctggagaattctcaccaaatgttcccaaatccttatcctcagctgtgaaggtaaaaattggaacatcactggaatggggtggaacatctgaaccaaagaaatttgatgactctgtgatacttagaccaagcaagagtgtaaaactccgaagtcctaaatcagaactacatcaagatcgttcttctcccccacctcctctcccagaaagaactctagagtccttctttcttgccgatgaagattgtatgcaggcccaatctatagaaacatattctactagctatcctgacaccatggaaaattcaacatcttcaaaacagacactgaagactcctggaaaaagtttcacaaggagtaagagtttgaaaattttgcgaaacatgaaaaagagtatctgtaattcttgcccaccaaacaagcctgcagaatctgttcagtcaaataactccagctcatttctgaattttggttttgcaaaccgtttttcaaaacccaaaggaccaaggaatccaccaccaacttggaatatttaataaaactccagatttataataatatgggctgcaagtacacctgcaaataaaactactagaatactgctagttaaaataagtgctctatatgcataatatcaaatatgaagatatgctaatgtgttaatagcttttaaaagaaaagcaaaatgccaataagtgccagttttgcattttcatatcatttgcattgagttgaaaactgcaaataaaagtttgtcacttgagcttatgtacagaatgctatatgagaaacacttttagaatggatttatttttcatttttgccagttatttttattttcttttacttttctacataaacataaacttcaaaaggtttgtaagatttggatctcaactaatttctacattgccagaatatactataaaaagttaaaaaaaaaacttactttgtgggttgcaatacaaactgctcttgacaatgactattccctgacagttatttttgcctaaatggagtataccttgtaaatcttcccaaatgttgtggaaaactggaatattaagaaaatgagaaattatatttattagaataaaatgtgcaaataatgacaattatttgaatgtaacaaggaattcaactgaaatcctgataagttttaaccaaagtcattaaattaccaattctagaaaagtaatcaatgaaatataatagctatcttttggtagcaaaagatataaattgtatatgtttatacaggatctttcagatcatgtgcaatttttatctaaccaatcagaaatactagtttaaaatgaatttctatatgaatatggatctgccataagaaaatctagttcaactctaattttatgtagtaaataaattggcaggtaattgtttttacaaagaatccacctgacttcccctaatgcattaaaaatatttttatttaaataactttatttataacttttagaaacatgtagtattgtttaaacatcatttgttcttcagtatttttcatttggaagtccaatagggcaaattgaatgaagtattattatctgtctcttgtagtacaatgtatccaacagacactcaataaactttttggttgttaaactgaaaaaaaaaaaaaaaaaaaaaaaaa

SEQ ID NO: 4150 - DNA, 600 bp, Homo Sapiens
  NM_015969
agtcttggcggaggtgaccaaagccacgtaatgtccgtagttcgctcatccgtccatgccagatggattgtggggaaggtgattgggacaaaaatgcaaaagactgctaaagtgagagtgaccaggcttgttctggatccctatttattaaagtattttaataagcggaaaacctactttgctcacgatgcccttcagcagtgcacagttggggatattgtgcttctcagagctttacctgttccacgagcaaagcatgtgaaacatgaactggctgagatcgttttcaaagttggaaaagtcatagatccagtgacaggaaagccctgtgctggaactacctacctggagagtccgttgagttcggaaaccacccagctaagcaaaaatctggaagaactcaatatctcttcagcacagtgaagcgggagtggaagaaggatctaaagggaaaaactgacatgtttatgttatggaaaaagaaatttttctaagtttcatcacaaactgtgtccagtttctctgtggtgtttatgaaatagctaaaagcaaatgaagtaaagggcatactatggtttttcacaaaaaaaaaaaaaaaaa

SEQ ID NO: 4151 - DNA, 725 bp, Homo Sapiens
  NM_015972
ccttccttcctgcttcgcctccgcgcctcgcgctatgggacagagcccccgatccgccagcaccacctgaggatccagaaaccgccccagcgatggaagaggatcaggagctggagagaaaaatatctggattgaagacctcaatggctgaaggcgagaggaagacagccctggaaatggtccaggcagctggaacagatagacactgtgtgacatttgtattgcacgaggaagaccataccctaggaaattctctacgttacatgatcatgaagaacccggaagtggaattttgtggttacactacgacccatccttcagagagcaaaattaatttacgcattcagactcgaggtacccttccagctgttgagccatttcagagaggcctgaatgagctcatgaatgtctgccaacatgtgcttgacaagtttgaggccagcataaaggactataaggatcaaaaagcaagcagaaatgaatccacattctagtcctttatgcagtatacaaggagaactgtcctgtaggatattctcttcctgatggtgcagaacccagaattagaagtttgtggttacagcatactctgtccttcagaaaggcgtgattctagctgttgaccccttgcagctgttggaatctctgcaagaacctctgtattcttctaataaattccctcttttatttaaaaaaaaaaaaaaaaaaaaaaaaaaaaaaaaaaa

SEQ ID NO: 4152 - DNA, 1516 bp, Homo Sapiens
  NM_015974
gccctccccggagcccagagctcgcagctccgccggcgcctggtcccagcgcccgcggcgccgcgtccccggcccaaccatggcgtcctccgcggccggctgcgtggtgatcgttggcagtggagtcattgggcgaagctgggccatgctgtttgccagtggaggcttccaggtgaaactctatgacattgagcaacagcagataaggaacgccctggaaaacatcagaaaggagatgaagttgctggagcaggcaggttctctgaaaggctccctgagtgtggaagagcagctgtcactcatcagtggttgtcccaatatccaagaagcagtagagggtgccatgcacattcaggaatgtgttccagaagatctagaactgaagaagaagatttttgctcagttagattccatcattgatgatcgagtgatcttaagcagttccacttcttgtctcatgccttccaagttgtttgctggcttggtccatgtgaagcaatgcatcgtggctcatcctgtgaatccgccatactacatcccgctggttgagctggtcccccacccggagacggcccctacgacagtggacagaacccacgccctgatgaagaagattggacagtgccccatgcgagtccagaaggaggtggccggcttcgttctgaaccgcctgcaatatgcaatcatcagcgaggcctggcggctagtggaggaaggaatcgtgtctcctagtgacctggaccttgtcatgtcagaagggttgggcatgcggtatgcattcattggacccctggaaaccatgcatctcaatgcagaaggtatgttaagctactgcgacagatacagcgaaggcataaaacatgtcctacagacttttggacccattccagagttttccagggccactgctgagaaggttaaccaggacatgtgcatgaaggtccctgatgacccggagcacttagctgccaggaggcagtggagggacgagtgcctcatgagactcgccaagttgaagagtcaagtgcagccccagtgaatttcttgtaatgcagcttccactcctctcattggaggccctatttgggaacactgcaagcccttaatcagccctctgtgacataggtagcagcccacggagatcctaagctggctgtcttgtgtgcagcctgagtggggtggtgcaggccggtagtctgcccgtcactttggatcatagccctgggcctggcggcacagcagcacttgcgttctcggggctgtcgatttcctgccacctgggcagataacctggagattttcaccttttcttttcagcttgattgcatttgactatattttacagccagtgattgtagtttcatgttaatatgtggcaaaatatttttgtaattattttctaatccctttctgagtactctggggccctgcatttatgaggcacctaccttcattttgctaacgcttattctgaataaaagtttttgattccttaaagacaaaaaaaaaaaaaaaa

SEQ ID NO: 4153 - DNA, 3998 bp, Homo Sapiens
  NM_015983
gcggctcccggcgtgcagcttggtggcggctgagccggcagcgggccgcctcaggcagccccggccgggccgcccgggtccccggcagcggggtaggatggcgctaaagcggatccagaaggaattaaccgacttgcagagggatcctcctgcccagtgttctgcaggacctgtcggtgatgacttgttccactggcaggccaccatcatgggcccgaatgacagtccttaccaaggaggtgttttcttcctgaccatccactttcctacagattacccgttcaagcccccaaaggttgctttcacaaccaaaatttatcaccctaatatcaacagcaatggcagcatctgccttgatatcctgcggtctcagtggtctccagcgttgactgtgtcaaaagttctcttgtccatctgctcgctgctctgcgaccccaaccccgatgaccccctggtgccagagatagcacacacctacaaggccgacagagagaagtacaacagactagcaagagagtggacacaaaaatatgctatgtaagtgccttggaggttttacatgagacactgtccaagagaagctggcagagaggtcttcccttaaaactttgggctgttggctgagccattcaaagagcatcatctgttcttcaaacaaatgttggtcacccactctctccagctgcagcatgttggtgccattttcagcaattacggctttgacagtgccacctctttgatgccaaatcagcaaccattgttgttatgatctgcagtcttcctggtgacactggaatctctctctctgccgcctcagtttgtctgctggtctcttggggggccaggccctgcacgtctctcctacccggcctcaaatggtgctgctgcccatgatggtaccacaccagggcctcagcctggcccctcaccacataccctttgccttttagaactcagtgccatcctgggtgcccagggcagagcaggctttgttcgcacctcatctgctgcagaaccacatcctgaggagtctcagcttatcctggagggaattgggaacagtgtcactgggaagtgaaggcctagccctgtggcttccaccagtctcctcctgcagtgccacgtggtggcatttctcgcctcacaccaagaagcagcaagtggaaaatttcaggatacaaagcacataacaccccataagagatgattatgtttttagaagcaagagcaaaattatgaaacctctagagatttgggtcatgttactccatttgatgaagattctcactaccgcccgctcctcccataggagcctacactaagtccaagtgtgagccattcacagactagaacacaaggagggagagagactcttaaacgtaaataaaaatgcaattcactcacaactctaaatgataattgacatttcagcctctttcttttaggcaaaacagaagatacacactattaacagttatttgaagccttaaattacaatagcctgttaggtgatcggctttctgccttggctttctgatgcagcacattttaagatttgcctttaaagctttgagccttgagattaggttagttaggaagaggacaacaaagggaagagattattctaataaaacttccacagagggaagaaaattgaggagcttcagatctctaaagccaaattcaacctgatctttctaggttggttataaagctggtccacttccaggaagtgatgtgtaggtgaataggaacaaaaggtgaagaagcagtaaaactgtgaccaagtggccagatggggcttttgccggctgattgaaaggaagtctacagacctaacataagcagtcagccaaaggtggctgtgggaggttgatttcttccagaaacttccaagttgtggctacaaatttattgccagatattttcccactgagaatactgaggttattcacataatcacttccttaacaaaggaagaagcacttttaacttgggctgcattccctttgtgagggtccacatttaggatcctcctgctaccataaggccccttttggggttctttgggtgtggctgcatctcaccatgttgaggattgccttttttttttttttttttttttttttttaacacagagccttgctctgtctcccaggctggagtgcagtggtgcgatcttggctcactgcaacctctgcctcccaggttcaagcaattctcctgcctcagcctcccaagtagccggaattacaggcatgtgccaccatgctgggctaatttttgtatttttagtggagacggtgtttcaccatgttggccaggctgttcttgaactcctggcctcaagtgacccgcccacattggcctcccaaagtgctgggattacaggcgtgagcccccgtgcccagcaaggattgctgttttaattcttgtatcttcgttgcttctttggtctttgcttaaacaaaacaataaagcttaatagttggggagaatgctgttaccagtgtcctctaggaaggctgttagcatatggctctactgagcagcagtgccatctggtgcctgagatcatgtgcttcaggcagttgtcacactgcatctacagccaagcatcacagaaacacttcactcatgtggtcagggaaggtgggactgattcacatgttagagacaggtcagatgggaaaattaaggcccaacttggtgttggggaataaccatactctggtctttcaagtgtagtagctgatgattcccaagaaactgatgaattttctgagtccagacaaaatttccccaagcctgctctctctgttggatatacataatagagaaagtcaaatcagccctttggggtttgtggtaaaaattcactcacccattgaagcctaaggtggctttgtaccttccagatctctcagcaaatcccctgggcagaaatgtcacctgcttgccatgtctttgaggggttcaggtcagcctggagaacaggctccttaggtcaaaaaccttgttttaagagccactgtggtacagtcaatgtaacccacttgtgcagaagccatgcttccaaggaaggtctcaggttgacaactagacatcaaatctgagaagccaactgtggagtaatgtgtttttttctctgtggacaagagtgatcagaaaggtgcttgatcttgaacaattgatccatgatgaaaaaatgaccattagctctcccccagaagcgtctgtgtttgctgaatggagctgagattttgatccgctatcagactccagaaagatccaggagttccaagaacatggcaaagagtcaaaatcttaggacaaggaattaaaatgccagaatgcaaatgtccaacaggcctggtagctcacagctatcaacaccctagaattccacactgcctcactgcagttgctcaaggatgggtatgtttctgtctctgaaattcgggaaaaagccttaagtgccagagaaggtgcttccaagactgtctgcagaattcctttcctagggtctgtctctggtacccaaaagggcagagaaggaaccctaagattagcatagagccactcatctctcctcccctccccaccccttcttcccctgcttccattccccatggctctctcctctgactgtgaaacacttcctctccagcagtgttgggaaagttctggacctctactggatctagccataaatggtggtcttcagaaaaatggagattgtggctgccagcacccacaagacagcagcctcatgccatgcaggcagcaagccatcctgaacagcgttcctcccagagtctgtttcctcacctgctgttcactggtgagaggaaaagggacttgttctcccttgaccagttttctagttttcctgttcccaccctggtctttgcctgatgacagagaaactttctaaaaaaaaacaaaaacaaaagctataaaaaatctgcaaaacaccctaaaaaaaaaaaaaaaaa

SEQ ID NO: 4154 - DNA, 1823 bp, Homo Sapiens
  NM_015994
attgcgcagccgcagggaagctggatggggaggggttgggaggcgaaccggaattgaggggtggttccgcggtgcgcgcgcctcgacatccgggcaacgcctctgttctgtcctcccccttcgtcgcctgtgacaaccggaagcggaagtgaaaatgggtgtccctgctgcctcttagcaacaagaggggtcaagtgacacaaccagctgactcccgtagaggaagacactgtggaggccagttctggagctattgcagcctcggttgcccggccggggacccgagccgaaaagttatcgtcagaatgtcgggcaaagaccgaattgaaatctttccctcgcgaatggcacagaccatcatgaaggctcgtttaaagggagcacagacaggtcgaaacctcctgaagaaaaaatctgatgccttaactcttcgatttcgacagatcctaaagaagataatagagactaaaatgttgatgggcgaagtgatgagagaagctgccttttcactagctgaagccaagttcacagcaggtgacttcagcactacagttatccaaaatgtcaataaagcgcaagtgaagattcgagcgaagaaagataatgtagcaggtgttactttgccagtatttgaacattaccatgaaggaactgacagttatgaactgactggtttagccagaggtggggaacagttggctaaattaaagaggaattatgccaaagcagtggaactactggtggaactagcttctctgcagacttcttttgttactttggatgaagctattaagataaccaacaggcgtgtaaatgccattgaacatgtcatcattccccggattgaacgtactcttgcttatatcatcacagagctggatgagagagagcgagaagagttctataggttaaagaaaatacaagagaagaaaaagattctaaaggaaaaatctgagaaggacttggagcaaaggagagcagctggagaggtgttggagcctgctaatcttctggctgaagagaaggacgaggatcttctatttgaataatctttcctgttctggttctttgagaaaccctaacactggcttcattttaattcacagtgtgtaggtttgatttgtgtggctatttattttttggcctaagaatttcactggttgtaaaatttacctagatgtctatttatgggattacttttgcagaatcataatttagcaaccatttatcatggatgaaagagatctgtaaaacctgcccaggaacttacagaatttactttgcagaagcgttatcatactccatttacatctgtgttacacgtgatctgcttaccaagcatattaggaaatacctcttaggaagcattagcggtctcaggccaattactgtggagcagctttcattcctacccacttgcaaaccttggcgctgttgtctgagattgctgcagccattcttgttaccatggtacttctcaaactttgtgaaaacctgcacttttccttgcatgacaggttcctgtcttgtctgtcatgggagccattctgccaatttaaatgcgactgtggtataaacagtaaaatgatttaaaagtaagtcattccgtttttattaatttactgttaagtcatgttctcatgctcagatcagtagtgtcagccagagctttctctgcagacatgtaggaagtgggtagctatttttcccactccatgtattagagttttacaaaaaggcttacttttgagacaactgttgcattttggggtactaataaatgattgccgatgagttatgagggcaaaaaaaaaaaaaaaaaa

SEQ ID NO: 4155 - DNA, 2151 bp, Homo Sapiens
  NM_015999
ggcagagcccgcgaggaggtgacgcggctgcggaggtgacgcgggaggtcgcgcgccccttccggcgcggggagggcgctgaagatcggggccgctcggccgcaggccgcctccagcgccgcgggatgtagcgcgggggaccgcggcccccagcagagcccgcctgcccggcttgtctaccatcagagggagatctctgccccctggggctgagagaccccaacctttccccaagctgaagctgcagggtattgaggtaccagccagatgtcttcccacaaaggatctgtggtggcacaggggaatggggctcctgccagtaacagggaagctgacacggtggaactggctgaactgggacccctgctagaagagaagggcaaacgggtaatcgccaacccacccaaagctgaagaagagcaaacatgcccagtgccccaggaagaagaggaggaggtgcgggtactgacacttcccctgcaagcccaccacgccatggagaagatggaagagtttgtgtacaaggtctgggagggacgttggagggtcatcccatatgatgtgctccctgactggctaaaggacaacgactatctgctacatggtcatagacctcccatgccctcctttcgggcttgcttcaagagcatcttccgcattcatacagaaactggcaacatctggacccatctgcttggtttcgtgctgtttctctttttgggaatcttgaccatgctcagaccaaatatgtacttcatggcccctctacaggagaaggtggtttttgggatgttctttttgggtgcagtgctctgcctcagcttctcctggctctttcacaccgtctattgtcattcagagaaagtctctcggactttttccaaactggactattcagggattgctcttctaattatggggagctttgtcccctggctctattattccttctactgctccccacagccacggctcatctacctctccatcgtctgtgtcctgggcatttctgccatcattgtggcgcagtgggaccggtttgccactcctaagcaccggcagacaagagcaggcgtgttcctgggacttggcttgagtggcgtcgtgcccaccatgcactttactatcgctgagggctttgtcaaggccaccacagtgggccagatgggctggttcttcctcatggctgtgatgtacatcactggagctggcctttatgctgctcgaattcctgagcgcttctttcctggaaaatttgacatatggttccagtctcatcagattttccatgtcctggtggtggcagcagcctttgtccacttctatggagtctccaaccttcaggaattccgttacggcctagaaggcggctgtactgatgacacccttctctgagccttcccacctgcggggtggaggaggaacttcccaagtgcttttaaaaataacttctttgctgaagtgagaggaagagtctgagttgtctgtttctagaagaaacctcttagagaattcagtaccaaccaagcttcagcccactttcacacccactgggcaataaactttccatttccattctcctagctggggatggggcatggtcaaacttagccatcccctcctcagcaaggcatctaccggcccctcacagagacagtactttgaaactcatgttgagattttaccctctcctccaaccattttgggaaaattatggactgggactcttcagaaattctgtcttttcttctggaagaaaatgtccctcccttacccccatccttaactttgtatcctggcttataacaggccatccatttttgtagcacacttttcaaaaacaattatataccctggtcccatctttctagggcctggatctgcttatagagcaggaagaataaagccaccaacttttacctagcccggctaatcatggaagtgtgtccaggcttcaagtaacttgagttttaattttttttttttcttggcagagtaatgtaaaatttaaatggggaaagatatttaatatttaatactaagctttaaaaagaaacctgctatcattgctatgtatcttgatgcaaagactatgatgttaataaaagaaagtacagaagacacttggcattcaaaaaaaaaaaaaaaaaa

SEQ ID NO: 4156 - DNA, 1893 bp, Homo Sapiens
  NM_016001
gcgcagcgaggttccacgtgagcgcctgcgtttctcctcaaacctaacgatgccgccggagcggaggagacgaatgaaactggaccggagaaccggagcgaagccgaagcggaagcccggaatgaggccggactggaaagccggagcggggccaggcgggcctccccaaaagcctgccccttcatcccagcggaaaccgccggcccggccgagcgcggcggccgctgcgattgcagtcgcggcggcggaggaagagagacggctccggcagcggaaccgcctgaggctggaggaggacaaaccggccgtggagcggtgcttggaggagctggtcttcggcgacgtcgagaacgacgaggacgcgttgctgcggcgtctgcgaggcccgagggttcaagaacatgaagactcgggtgactcagaagtggagaatgaagcaaaaggtaattttccacctcaaaagaagccagtttgggtggatgaagaagatgaagatgaggaaatggttgacatgatgaacaatcggtttcggaaggatatgatgaaaaatgctagtgaaagtaaactttcgaaagacaaccttaaaaagagacttaaagaagaattccaacatgccatgggaggagtacctgcctgggcagagactactaagcggaaaacatcttcagatgatgaaagtgaagaggatgaagatgatttgttgcaaaggactgggaatttcatatccacatcaacttctcttccaagaggaatcttgaagatgaagaactgccagcatgcgaatgctgaacgtcctactgttgctcggatctcatctgtgcagttccatcccggtgcacagattgtgatggttgctggattagataatgctgtatcactatttcaggttgatgggaaaacaaatcctaaaattcagagcatctatttggaaaggtttccaatctttaaggcttgttttagtgctaatggggaagaagttttagccacgagtacccacagcaaggttctttatgtctatgacatgctggctggaaagttaattcctgtgcatcaagtgagaggtttgaaagagaagatagtgaggagctttgaagtctccccagatgggtccttcttgctcataaatggcattgctggatatttgcatttgctagcaatgaagaccaaagaactgattggaagcatgaaaattaatggaagggttgcagcatccacattctcttcagatagtaagaaagtatacgcctcttcgggggatggagaagtttatgtttgggatgtgaactcaaggaagtgccttaacagatttgttgatgaaggcagtttatatggattaagcattgccacatctaggaatggacagtatgttgcttgtggttctaattgtggagtggtaaatatatacaatcaagattcttgtctccaagaaacaaacccaaagccaataaaagctataatgaacttggttacaggtgttacttctctgaccttcaatcctactacagaaatcttggcaattgcttcagaaaaaatgaaagaagcagtcagattggttcatcttccttcctgtacagtattttcaaacttcccagtcattaaaaataagaatatttctcatgttcataccatggatttttctccgagaagtggatactttgccttggggaatgaaaagggcaaggccctgatgtataggttgcaccattactcagacttctaaagagactatttgaagtccagttgagtcacaagagaagcctgtcttgatatatcatctcagaaactttcctgaatatgtgataatatatggaaaatgatttatagatccagctgtgcttaagagccagtaatgtcttaataaacatgtggcagcttttgtttgaaaaaaaaaaa

SEQ ID NO: 4157 - DNA, 5370 bp, Homo Sapiens
  NM_016006
cgcatgcgctggcggcctgcgccgccttaagtgccgcgccagcccggggcggcccagtcggcctgtcagccggcttcgagataagtcccggcgcttgcgcggcggcggctatggcggcggaggaggaggaggtggactctgccgacaccggagagaggtcaggatggctaactggttggctccccacatggtgccctacgtctatatcacaccttaaagaagctgaagagaagatgttaaaatgtgtgccttgcacatacaaaaaagaacctgttcgtatatctaatggaaataaaatatggacactgaagttctctcataatatttcaaataagactccacttgtccttctccatggttttggaggaggtcttgggctctgggcactgaattttggagatctttgcaccaacagacctgtctatgcttttgacctattgggttttggacgaagtagtagacccaggtttgacagtgatgcagaagaagtggagaatcagtttgtggaatccattgaagagtggagatgtgccctaggattggacaaaatgatcttgcttgggcacaacctaggtggattcttggctgctgcttactcgctgaagtacccatcaagggttaatcatctcattttagtggagccttggggtttccctgaacgaccagaccttgctgatcaagacagaccaattccagtttggatcagagccttgggagcagcattgactccctttaaccctttagctggcctaaggattgcaggaccctttggtttaagtctagtgcagcgtttaaggcctgatttcaaacgaaagtattcttcaatgttcgaagacgatactgtgacagaatacatctaccactgtaatgtgcagactccaagtggtgagacagctttcaagaatatgactattccttatggatgggcaaaaaggccaatgctccagcgaattggtaaaatgcaccctgacattccagtttcagtgatctttggcgcccgatcctgcatagatggcaattctggcaccagcatccagtccttacgaccacattcatatgtgaagacaatagctattcttggggcaggacattatgtatatgcagatcaaccagaagaattcaaccagaaagtaaaggagatctgcgacactgtggactgaacacactgaagctctgatgggaaaacctggtgactgatatagttgttcagcaataattcatagtctgtgatgaagagtagtgaatacaacacacaaccaggcagccttcttgactatactttgcacatgttttctttaggaattcactcacacatttaaaccagttagtgccttctagaagaatggctttcctttctcctacacaaaattgaaatatacaagtctctaaatataatacctttaaataaaaggttatttgtccctctgatgtactgaaaaactgtaatttttcagctgaaaattttttaatctaactttgctagttatttttatattgcaatctatattaccaatttaggaagtgatttctgagtctcttacactgtaaaggtgcactttattttctttgtcttccccatcatgtatttattgtgtcttgataactgatattaatctaaattcaatgtgtttttatgtaaaaatttgtcagttgtttagaatatttcactttgtttttgaaacggagtgacaaggcagatttttggttagaggacgggagttgatcactatcattactttttctagtttacctgttttttatatttaaggctgctaagccatgttcagcattttaaatgtggtctatcctgacatacagtgtataacaacataactccttggaacctcctatgtgtggtataattctactcttccaaggaacatgacttcaatactttcagtgattcaggtactgaaaagccttacctaaaaggctgttctttgtttccccctttcatactattcttttccatgacccaggatgcagcaaatgaaacagatttcttctcttaaggggatattaagactgttacttcctagtaagccaagtaataccatatttttattaacatctaacttttgtagatgggtgctaaaattgcatacattttaaccactaaaatagaaaaacaagtggtgctattatgtctcatggcaccagaaatgagctagcacttgggtttgttgttgctgttgtttattaagagtattgtgttaattaaatcattacatacttgaagttatattacaaaaattctagaaggttgattgaactatttttttaggaactaccatcaagtgtagcattttcttgcagttttaaaatgaggaaaacttctttgaaactgtgaaatgctccatgtggtaactggctgctgagaaaacccttcaccaaaaaaataaataaaaattgaataggattgtcatcaagaaggcatctttcgctaacgttgcttgtctaggagaaaggtagctatgtaaataaaaacagtgaactagagcaaatagtggtttaatggttttgttattgcatttttaaaatggttaattagggaatttgtagttgttaggaaatgtaaggttgtgtcactgttgattaactgccagaaagactgaatgttctattttcaacatttctcccctataaaagaatagacaaattatactgaagcatgatataaacatcttcccaatgaacaatttgtctcacttgtcagattaactaggttagtgcaggaagcaacatgagcgccaagatgtgttgtctgatttctctaccttaagaacaataatagtctttttagttagtattttggatggccaggtttcaaacctgtatgtggtacaaataatttgggtaatatttttgtatttttgttttacacactctctaatctcaattatcctttgctgggagaatgacaggtttcacttatacaggaaggtttttgcacaggaaatttggtcccagcccttggaaggaagaagttccttcgtttacttagtgaatggagtttctggccgcagatgtgccaagtgattgaagaaagatataccccaatatcaagtgataatttattttcctacagactgaatttgctttatttgaaagatgttgtaactctttttaaagttagattttaccctgaggtatagtatatgtaattttgtgaagattgagctggaagggaagttcacaatcctcacatttaaaaaaatatagtgggtgctaaatgttttcttaaaaatctagtacagcatttgatctttgttatgcacagcatacttttattttacagaataaattttcctgtgatagtcacaacaagacagctgtatagtttcttgagtcttttgtatggaccagtctctgtataatagttaactacaggactgtggatccagcaaatgttcagtaaatgctgctgttgttcttagggaaggctactctgggtgttgtggccgccatacatggctttacctgggtccatgcattcccttaagatgacttctgttttcttcttttttcttctgattttccaaaaaaaaaaaagccttgcctaaggttggttttagaatatgatttgcagaacacttttgaaatgtcttcattcatatatgtaatatatatttatacttaaagggccatacgcgatttcaataaaacaagaagtactggaaagaataaacaaaaatagccagaagatgcctagaaaagaacaatgtggaaggagggataaccctattaaatattataacataatgtttacaatatgagaaagtctaggaatttagtacatgataaagcatctcattcagagaaaaaggctttaaaaatggtgttgagagaagtgtggttaaccatttggaaaaaaaaataaaattgaatcgatttctcacaggatacacaggataaaatctgaatagaacaaagacccaatttttaaaatgaaaccctctttctaactagaagaaaacatagatgaattattgtataatctgacagtgagaaaaactttcctaggactgaaaattcagaagcaataaaaagagaagtctatagaagaattttcagccagatggaatggctcatggctgtaatcccagcattttgggaggctgaggcagaaggactgcttgagaccaggaattcaaaaccaacctgggcaacctagtaggactggctctaccaaaaaaaaaaaaaaaaaaaaattaagtacctggcctgggttccacctacttgggaggctgaggtaggaggactgtgagcccaggagtttgaggatgcagtaagccactgcactccagcctgggtgacagagaagaaaaaagatttttttggatagctgaaaatatttgcagcatttatcacagagggctaattgtagccctatatatgaagaattttaaactatgagaagaacccgaagaataggcaaaaggatgtgaacagacagttaacagaaaatagaatgcaaatggtctttaaacatacaaggatatgcataaaaagacaaatgcaaaataaaataaaataatggaaatacctttcttacctgtgagattggggaaaatccaagttaggcaatgcactctgttgagacaatagggaaacaggcactccaaaaattacaaatccctgtggatggtatttgttaactagcaaagttaaatgagtatatccttcaacctggcagacccagttctaagaatccatatgagatgcacttgcaagaatatgaaatagtatatgcacaaagatcttgattacagcactgtttctaatagctacagactggaagccagccaaatctccattgatagggaattgatggaaggaactagggtatatctatacaatgggatactacacagctgtagaaaggactgcgaactatttttgtagttctggtctggagaaatctccagaatataggaaatgaaaaatgtaaagcacagaagagaatgtatggtgtgctgtctgttgtataacgaagagacaaatggaaaaaatatgtatttgctttttttgtaaagcaatagaagaattagttataccaataactaataaaatgatctccttgttagtggtggtagggagctagacaaggatggcaactatttctgtatcttacataccttttattttgaggccctgtcaatgttttatataataaacattttttgaaaaggcaactcttaaaactaaaacaaacttaacagtctgtcaagttggtgatataaccccacagaagacttacttcaagtgacttgaaaacttagtattttgtctgtactttgctaatggaatatatcctacagaccaaacaaccacaaataaatcttaaactgcaaaaaaaaaaaaaaaaaa

SEQ ID NO: 4158 - DNA, 1409 bp, Homo Sapiens
  NM_016008
agaaggcctcactcccagactccttgcggagctcgccgcctgattctaggctggtcactactccgagcctgtgacgtttgcggcagccaggccgtcgacgatgcccagtgaaactctctgggaaattgcaaaagctgaagtggaaaaaaggggaattaatggaagtgaaggtgatggagctgaaattgcagaaaaatttgttttcttcattggcagtaaaaatgggggaaagactactattattctaaggtgtcttgacagagatgaaccaccaaaaccaaccttagctttggaatatacatatggaagaagagcaaaagggcacaacacaccaaaagatatcgctcacttttgggaactcggtggaggaacctctttattggacttaatcagcatacccatcacaggtgacaccttacggacgttttctcttgttctcgttctggatctttcaaaacctaatgatctctggcccaccatggaaaatctcttgcaagccacaaaaagccatgtagacaaagtgataatgaaactgggaaagacaaatgctaaagcagtttctgaaatgagacagaagatctggaataatatgccgaaggatcatcctgatcatgaattaattgacccatttccggtacctctggtcataattggaagtaaatatgatgtttttcaggattttgagtctgagaagagaaaggtaatatgcaagacacttcgatttgttgcacattattatggagcatcattaatgtttaccagtaaatcagaagctctattactaaaaatacgtggagttatcaaccagttggcatttggcattgacaaaagcaaatcaatatgtgtggatcagaataaaccgctgtttatcacagcaggattggattctttcggtcaaataggatctcctcctgttcctgaaaatgacattggaaagcttcatgcccactcacctatggagttgtggaaaaaagtgtatgaaaagctctttccaccaaagagtattaacacgctgaaagatatcaaggaccctgcgagagatcctcagtatgctgaaaatgaagtcgatgagatgagaattcagaaggatctggaactggaacagtacaaaagaagttcttccaagtcttggaaacaaatcgagcttgattcttgaacctatttcaattattgtatatttatttcttcttttccaaatacaaataagattatactgtgaattaactattgtggcaatatgtgaagaaagttaaactgtataatttgttaaaggacaagctggatttcttggactagtgcatctccctgtatatcttgaagctttttaaaaggaaaaattattgtagaaccacgtgtaattttttttaaaataaaagaatcttctactacctacctctaaaaaaaaaaaa

SEQ ID NO: 4159 - DNA, 6373 bp, Homo Sapiens
  NM_016009
ttgtttttcccttgggacccgggtccacacggcggggtcgcccgtccatctccggctcgcccgcggggcccatcgtcgacgttagcggccgttctccgagccgactgacccatccttggcgctgccgccgcgcgcttgttctcctccctcgccccgccttcatcctccccgttcacggaaacgacagctgcggctgcggggctggcgccgcctccctccacctaccacgtctgccctcgccgctctagccctgcgccccagcccggccgcggcacctccgcctcgccgccgctaggtcggccggctccgcccggctgccgcctaggatgaatatcatggacttcaacgtgaagaagctggcggccgacgcaggcaccttcctcagtcgcgccgtgcagttcacagaagaaaagcttggccaggctgagaagacagaattggatgctcacttagagaacctccttagcaaagctgaatgtaccaaaatatggacagaaaaaataatgaaacaaactgaagtgttattgcagccaaatccaaatgccaggatagaagaatttgtttatgagaaactggatagaaaagctccaagtcgtataaacaacccagaacttttgggacaatatatgattgatgcagggactgagtttggcccaggaacagcttatggtaatgcccttattaaatgtggagaaacccaaaaaagaattggaacagcagacagagaactgattcaaacgtcagccttaaattttcttactcctttaagaaactttatagaaggagattacaaaacaattgctaaagaaaggaaactattgcaaaataagagactggatttggatgctgcaaaaacgagactaaaaaaggcaaaagctgcagaaactagaaattcatctgaacaggaattaagaataactcaaagtgaatttgatcgtcaagcagagattaccagacttctgctagagggaatcagcagtacacatgcccatcaccttcgctgtctgaatgactttgtagaagcccagatgacttactatgcacagtgttaccagtatatgttggacctccagaaacaactgggaagttttccatccaattatcttagtaacaacaatcagacttctgtgacacctgtaccatcagttttaccaaatgcgattggttcttctgccatggcttcaacaagtggcctagtaatcacctctccttccaacctcagtgaccttaaggagtgtagtggcagcagaaaggccagggttctctatgattatgatgcagcaaacagtactgaattatcacttctggcagatgaggtgatcactgtgttcagtgttgttggaatggattcagactggctaatgggggaaaggggaaaccagaagggcaaggtgccaattacctacttagaactgctcaattaagtaggtggactatggaaaggttgcccatcatgactttgtatttatatacaattaactctaaataaagcaggttaagtatcttccatgttaatgtgttaagagactgaaaataccagccatcagaaactggcctttctgccaataaagttgcatggtaaatatttcattacagaatttatgttagagctttcatgccaagaatgttttcttacaaaattctctttttattgaggtttcactaataagcagcttctacttttgagcctcaacttaaagcagaactgttttctactggatttttcattaacagcaagctttttcttttatgtaaaataaatctattgtgaattgatatcagcgactcatttattaggtataaataatagccaaagaataaaattaaaatttattttaaactttcggtcttaaaaagagctgtaggatataaacctcttttgtgaaaagtagaattttctgaatgctttcatagacaaaaacgcatttaaactatgtttacctggttttccaacagaaatcaaatgattttaatattatgttttgatgggttattttcagagttgtttggttttttaaacactactgaatggtttcttttaaatttaagaacaactagttcttgaaaagcaataccgtatttctctgataaatttgtagttaaggttctagaaaatctaggacaaatttacttcattaaacataaagtttttaagattattcagttggcacaatttaatgcataattgggattggatccatttactgtactgtggtacagtaaagagaatgtgttcttattgaacagcagatttgtatacaaatacggaataatgcaactacattataaattgtatacgaacaaaataaattgggtcactctgagcttactattaaaacattgaaaatttattaatgaacacaggctatcttgatgaggatctctgcttatgaaacacatactaatgaaattattagtgacacattggaagctagaaaattgctgttggggccattgctataaatcattgtttccatgttaagacttctgttctaattcattcattcaacaaacatttgttgagggccagatactgtgctggtcaactggggatactgtcctgaacaatatgcacacagttcttgcccctgcagagcttaaagaccattaaaggatacagaaaattaagcaattatcctatagtaggattcgtggtgtgatggggaaaatacaaggtactgtatttgggagtcatgtaactccagttttgggagtgagagagggtctggggaagaactgttccagataaaaagatgtgtaaccaagatagcatagcacattctgacaactaaagcaatttactctaacttaagcatgaagtacaaaagtatagttcatttattgagggaatgttaagctattaaaatgatactttttggtacttttaaaaaaatgaatacttaaacaccgttttaaaattttgtgttaagagctcctaataagaacttggtaaacatgttgacaatttaactcacagtctaaactttaaaagtagtagttacccttttatttctgtgccatgagacaaattcttctgcagttttatagttgtacaagatgttttgactcactctcaattgccatattcttaaagaaaccctgaaaagctgctcaagctggtcagttttctgtaaaaccaagtaaatgaaattttctctcccctcagaaaggaagttctacagcctagagtaccatctattgtgttttataagtccagatttaggctttgaaagatcataccaaaacttcagatcgacttaaacagcaactatgaattaggtttatgggaaatgtagtaatacaggggaaagaatatcggtaatggagtgaaatggtcctgggttcaaatccagtcttcctcacatattgtgctctttaagcttcaaatgagatgtataactgccttttccttaccagtaaaatgaggacaataattatgacaccatagggtggttgtgaggattagcaaatgttatcttgtatttcaggtgcctttcagggaaaggcttggcacatagtaaacacatcctgtaaatatcagtttccccttgttagcccctgtagcatcctgacctaccaagtctataggccttgcatatcactgtgcaccagagatacctcttttacatctgggctctgttttctctctatcaatcctatcctccaccctctttaaatcagaccccaggtttaaccttcccacagtcagtataaatcatttttcagaactttcagctttccatcaagtgaaagttgattttagttacccagtaatgtacagaaaccttcaataatgttaagcttcaaaggcttctggtacgtttgtctaccacagaaccaccacaatatatatgcttgttcttaggtttattgctttttattttaatggggtttggttgtttgggttttattttggttttggcttattttaaagtcaagtttagtttttactcaggtaaaggcctgaagtttcttgggcgtggaagaaaaagcttgggaagcctattaattcatggtgcagttcagaattgtttaaataagctctgtgccactgagcttaatctgaaagtatagtgacatgtgaaggatgcacatatgaatgaaaaactaaaataattgtaggctcttctataaatgaaaaaaaaagtgattggattgtgtctacctttttcctcaaagtaatctaacctaaacggtcatggtgttaaaactttttatggtgctaatcagaaaaattgatgttgcaagaaatgaggtctcaaaaatgggaatgtgcctcctcactctgcgtcacatgggaaataaatcctgaggccaggatcaccagtggggtagagtcatcttcatagtctcctgttatcctccccctgaacaaagaacaaagtgagactgggaagctagtgttggggaaacatttctgggataaactgtggagtggagaagacaatggagggcaaggcaaaaacccacagacttgtttacccatagaggccccactcacctccatgctgacagaattccagaaaaattccttccctatctcccaaacacctgaaattctgaaatattgccctactatttagcactttaagcttcagtgaggtgctgtaatggagagatagcttcatagtttagcctatagccaactttgcctcaagacctccagataagatgaagtggcttttacctcatgtgagtctcaaacgctggagagagagttccacaaccacccctgccctttctcccatattacgctcattagaaagtctactcagggctgggtgccgtggctcatgcctgtaatcccagcactttggaggctgaggcgggtggatcatctgaggtcaggagttcgagaccagcctggccaacatggggaaaccctgtctctactgaaaatataaaaattagccgggcatggtggcgtgcacctgtaattccagctactcgggaggctgaggcaggagaatcacttgaaccccagaggcagaggctacagtgagccaagattgcaccactgcactccaacctgggtgatagaataagactcttgtctcaaggaaagaaaaaatgtctactcagtagagcagtgattggcaaagtgtgagaccccagaccggcaatattggcatctcctggagacttgtttaaaatgctgattactattttcaagaactttctaccttcatttttacttattttttgttttcaagggctcatggaatcagtcttccatgtgacagctttttaaatattttaagacaaaaactgagtcttctaatcttaattgtgttctagcagtagtcattgtaattatagttatttttataatttatttgtttagtgtatatctgtcactctagaatgtaggctccctgagataaaaactataattcttttgatggcagttacattcccaactcttagcacaagatctaggacatagtatgaactcaataaatttttgttgaatgaaagaaaaatgcaaatttataagccttttcagagacctactgaatcaaactctgagagtggagcccagcaatctgttgtaaaagctgtttgagtaatactgttgcactctaagcttgagaaccactgcaatagaactaagagaacattcatttcaccttcaggcctattctctgacatcacttgaaaaatcctctctgccttctgtaacccttaaccaacaacagtgccctgtccatgtaggggaaacttctgggctgtattacaagtgggtaggaaggtataaggatatcatagtgggaagtattgcttagaatgccagtacttgtttgctgtggaaggtttctaggaatggattgcttagtctaaagtaagcactaccaccatccacgttttcactcaacacagtgccttttaattggtgactaacatcaaaacaccttgacaaaccgttaaaacagtatcagaaaccatgtgtacatccctgtgcctcttagattgctaagttctgctctcattcttacttcaaaggacactttttaaagaattgttaatgcttttttataatacaagtcatagccctgttggcaaaaagaaaaaagattcagtgagaaagaaaaatcactgataattccatcatccagggagaaccactgttatttaagtatatggccttccagacttttctgtgcatttatagatatttttaatgggatcaaagtgtacatactgttttgtaactttttttcactcaacaataccatgactgtcttgctgtgtcaagtatatttctacatctcttaatggctgcatgatattccatcatatgtgccacattttattaaactactgttcaatttttaggtttccaactttcattaataaagtgctttaaagaaca

SEQ ID NO: 4160 - DNA, 3352 bp, Homo Sapiens
  NM_016010
ggaatgttagcgggtgggaggtgcggctgggttgctacagccagagctgggcggtggcgggcgctgctgaaggagtctcgctgagctcgaggaggtggcgcgatggagggactggaagagaatggaggtgttgtccaagttggagaattgttaccttgcaagatttgtggaagaacattctttccagtagcattaaaaaaacatggacccatttgccagaagactgcaactaaaaaacggaagacttttgattcaagcagacagagagctgaaggaactgatattccaacagtaaaacctctcaaaccgaggccagaaccaccaaagaaaccatctaattggagaaggaaacatgaagaattcattgctaccataagagcagctaaaggccttgatcaggccctcaaagagggtggcaaacttcctcctcctcctccaccttcttatgatcctgattatattcaatgtccatattgtcagaggagattcaatgaaaatgcagctgatagacatataaatttctgtaaagaacaggcagcacgtattagtaataaagggaaattttctacagataccaaaggaaaaccaacttctcggacacaggtgtataagccacccgcacttaaaaagtcaaattctcctggaactgcatcatcaggatcttcacgattaccgcagccaagtggcgctggcaaaactgttgtaggtgttccttcaggtaaagtgtcttcaagtagcagctctttgggaaacaaacttcagaccttatctccctctcataaagggatagcagcccctcatgcaggagctaatgtcaaaccccgaaattccacaccacctagtttggcaagaaatcctgccccaggtgtgcttacaaacaaaagaaaaacatatactgagagctacatagccaggccagatggggactgtgcatcttcccttaatggtggaaatattaaaggcattgaaggacattcacctggaaacttaccaaaattctgccatgagtgtgggactaaataccctgtagaatgggccaaattttgctgtgaatgtggcattcgaagaatgattctatgaatagaatctcaaaaaaaaaaaaaagccaagttcagagtttatgattattgctgcttggacagctagagcacatcctctagttagtttgtgctaaaaatactcgaaataccatttccagttaattttgaagtgtaatcttttggctatataatgtgtgtatgtttatatgtgtacatatactgtatataataaatatctgataccccagactgtgtcattcaaggaaatattcacttatctgtcagaaaataatttcaaatggaacaattaatttaggtgttacttttctgttgttgttaaagcacgttaagtacatttccacaaactctcatactctagtgcttagcccttcaagctttaggataagtataactttgagcaaaaaatttggataaacatttgtattattggtgcctatcttcagatagtatcatagtaggatagatgctgggaattttgtaattaaagagaacagttttagttaccattaggtatgttaaggtcactcctgtagagcatgtcaacaaattatttcataaatccgaaaaactaagagaaaaaaaaacccctctattagttacgtaatttaaacatcttacttgttttgtaaaagtgtaattatgcaatttccttttcaaatacacaagactaaaaatacaaatctatcttgttctatttataactgattttttttagttctgtatgtattcgttgaacatatttttttacttccaattgtttttccagatttcacttttcctctttttccataacccgtgaagatagttttaatttgctagttcattttttgctgtatttgaaaatgtaattatttaatatagaaggcacagaattccctgcaaaatcttacatgtttaaaaacatataattttttgtatctgaatttagaataaatcattttaatgcatcttaaatcacgtcacctaatcataatagttgtggtaactaatcattagtgcagagcatgcagataaaaaatatttgaatttttttttcttggaagtacatgtagttatgagtaggttaagagaatatctaattttcctactctttttttcatctttagcatttaatgttgaaacaccattcacgtcacattaaggacccactgaaaatgtattgttttaatgcataattgacttacctaattaaacatacacacaaatttaattatttttttctctttaacctgatcacgacacagctcttaatcattgtcactttcagtatatcatagtagttagtagtagattgccttgatggcagtaattctgtagtaatttctattcaatcaaacctaagagagctttgatcttactgtaaaggtacaaacaaatctcttatataattcctagcttttttttttgtttatgattctgatcaactataagacacaatgtaaagaattgtggcttataatttatctgaaatttattagcttagtttagtttgggcaggagttacaaacttaataggaattgtcattttacttacagtttatttcctgattagttgttaatttttttcccctcagttatctttattcagtcttattggtcaaaacaaagaaacaaatagtccatcaactaaaataagctgtaatgaatttagaagatgaatgcatatattagatttccatttaaatcacttctgttataaatcatataaagaactttaaacttgttttatctaatactgagcactgtttttttgtcaagtatttttttaagaccacataattctttttgtctgctcaaggaaaggatagataaataattggcacacatttgtttctcactgaattttacagtagtaaattaatgttataatgtaccacatggagatgagttggtaagaaatcatctagttccagagcccagagattataaacagtaggtgaaatagatttatgacttacgaaatatgttgtgacaatatatttaaatgcatttttatattacttgcatattctcacattgatttgtgcaatagttcagttttaaaaaaaatcttcctatgcatcatgtattttatttttatttattttcacaagtatttgacagtatggtagaataaaagatgattgtaagattaaaaatgtaaaaattgcttatgtattattctgaattgtgttaggttgaaaaagatgattgtggtgactattatttcttgtccactatttgttttttgttttttcaccaataatgtcttcatatttgaacctattcaataaagacatgaagcataaaaa

SEQ ID NO: 4161 - DNA, 1474 bp, Homo Sapiens
  NM_016013
aagcggcggcaggccggcggttggtgtgtcccgggtgtggggaggcgacagagccctggcacttgagggttgagggggcctccccagcgcggcgaaccgtctagcctccggaggccaggccgtgagtgcgggaggtatacgccaaggcggaagaattttgccactcactacctgtgtgacctcgggtaaattagccttggaacgtcagtttcttcgtctctataattgaaataataatagtacctctctcaggattgttgtgagccgtcagtgaaacacttagagcagtttctggcacatggtagaattgggctatttgctgaagcttcttggtggcccttgctagcccaggaagaaacttacattttgatttttttgtaccatggctttggttcacaaattgctgcgtggtacttattttctcagaaaattctctaagccaacttctgccttgtatccatttttgggtattcgctttgcagagtattccagtagtcttcagaaaccagtggcttctcctggcaaagcctcctcacagaggaagactgaaggggatttgcaaggagatcaccagaaagaagttgctttggatataacttcttctgaggagaagcctgatgttagtttcgataaagcaattagagatgaagcaatataccattttaggcttttgaaggatgaaattgtggatcattggagaggaccggaaggccaccctctgcatgaggtcttgctggaacaagccaaggttgtctggcaattccgggggaaagaagatttggataagtggacagtgacttctgataagacgattggaggcagaagtgaagtgtttttgaaaatgggcaagaataaccaaagtgcactgctatatggaactctgagctctgaggcgcctcaggacggggagtctacccgaagtgggtactgtgcaatgatatccaggattccaaggggtgcttttgagaggaagatgtcttacgattggtcccagttcaatactctgtatctccgtgtacgtggggatggtcggccttggatggtgaatatcaaggaggacacagatttcttccagaggacgaatcagatgtatagttacttcatgttcacccgcgggggaccctactggcaggaggtcaagattcctttttccaaatttttcttctctaatcgaggaagaatccgggatgttcagcatgagcttccgcttgataagatctcttctataggattcaccttggctgataaagtggatggtccattcttcctggagatagattttattggcgtgtttactgatccagctcatacagaagaatttgcctatgaaaattctccagagcttaacccaaggctttttaaataaagatcatatggtagttttgttttactaatctaagggtactagcatctacaatgatatagacaaaataaaatatttctttaatggcatccaaaaaaaaaaaaaaaaaaa

SEQ ID NO: 4162 - DNA, 6263 bp, Homo Sapiens
  NM_016018
gctgacgtcgccggggcccggcgtcgcgtcagggctggccggcggcggaggcggcggcggcggcggcgatggcagcggaccctgagcgagcttgagggctcggacccagctccctcccgcgaaaccttgggcggatccggcgctgcggccccagctcgctccgctcctgctccctccccggccgctgcctgggcggaggcagaggcagaggcccgggctggccgccctgctcgtgccccagctcggccccggacggcccggctgctgtgcagagaggaggccgagtcggtagtgaaaagagaatactgaagaataggatctcaagatgagtaaaaagcccccaaatcgccctggaatcacttttgagattggtgctcgtttggaggcactggactacttacaaaaatggtatccatcacgaattgaaaaaattgactatgaggagggcaagatgttggtccattttgagcgctggagtcatcgttatgatgagtggatttactgggatagcaatagattgcgaccccttgagagaccagcactaagaaaagaagggctaaaagatgaggaagatttctttgattttaaagctggagaagaagttctggctcgttggacagactgtcgctattaccctgccaagattgaagcaattaacaaagaaggaacatttacagttcagttttatgatggagtaattcgttgtttaaaaagaatgcacattaaagccatgcccgaggatgctaaggggcaggtgaaatcccagcatccactaagctggtgttgtcctatcgacccagctggatcgtgtaaccagtctatgggaagtgaggattggatagctttagtcaaagcagctgctgcagctgcagccaagaacaaaacagggagtaaacctcgaaccagcgctaacagcaataaagataaggataaagatgagagaaagtggtttaaagtaccttcaaagaaggaggaaacttcaacttgtatagccacaccagacgtagagaagaaggaagatctgcctacatctagtgaaacatttggacttcatgtagagaacgttccaaagatggtctttccacagccagagagcacattatcaaacaagaggaaaaataatcaaggcaactcgtttcaggcaaagagagctcgacttaacaagattactggtttgttggcatccaaagctgttggggttgatggtgctgaaaaaaaggaagactacaatgaaacagctccaatgctggagcaggcgatttcacctaaacctcaaagtcagaaaaaaaatgaagctgacattagcagttctgccaacactcagaaacctgcactgttatcctcaactttgtcttcagggaaggctcgcagcaagaaatgcaaacatgaatctggagattcttctgggtgtataaaaccccctaaatcaccactttccccagaattaatacaagtcgaggatttgacgcttgtatctcagctttcttcttcagtgataaataaaactagtcctccacagcctgtgaatccccctagacctttcaagcatagtgagcggagaagaagatctcagcgtttagccaccttacccatgcctgatgattctgtagaaaaggtttcttctccctctccagccactgatgggaaagtattctccatcagttctcaaaatcagcaagaatcttcagtaccagaggtgcctgatgttgcacatttgccacttgagaagctgggaccctgtctccctcttgacttaagtcgtggttcagaagttacagcaccggtagcctcagattcctcttaccgtaatgaatgtcccagggcagaaaaagaggatacacagatgcttccaaatccttcttccaaagcaatagctgatggaagaggagctccagcagcagcaggaatatcgaaaacagaaaaaaaagtgaaattggaagacaaaagctcaacagcatttggtaagagaaaagaaaaagataaggaaagaagagagaagagagacaaagatcactacagaccaaaacagaagaagaagaaaaaaaagaaaaagaaatctaagcaacatgactattcagactatgaagacagttccctcgaatttttggaaaggtgctcttctccactaactcgatcttctgggagttctctggcttcacgaagcatgtttacggagaaaactacaacctatcagtacccaagggcaattctatccgttgatcttagtggtgaaaacttatcagatgtagacttcctagatgattcttcaacggagagtttgcttctgagtggggatgaatacaatcaggactttgattcaaccaattttgaggaatctcaggatgaggatgatgctcttaatgaaattgtgcgatgtatttgtgagatggatgaggagaatggcttcatgatccagtgtgaagagtgcttgtgttggcaacacagcgtgtgcatggggctgctggaggagagcattccagagcagtacatctgctatatctgccgggacccaccaggtcagaggtggagtgcaaaatatcgttatgataaggagtggttgaataatgggagaatgtgcgggttatcatttttcaaagaaaattattctcatctcaatgccaaaaagatagtttctacacatcacctgcttgctgatgtctatggtgttacagaagtgctacacgggctacagctgaagattggaatactaaagaataaacatcatcctgaccttcatctctgggcttgttccgggaagcgaaaagaccaagatcaaataatagctggggtggagaaaaaaatagctcaagacacagttaatcgagaagaaaagaaatatgtacagaaccataaagaaccacctcgtttgcccctaaaaatggaaggaacttatataacaagtgagcatagctatcaaaagccacaaagttttggtcaggactgtaaatctctcgcagaccctgggagctcagatgatgatgatgttagtagtttggaagaagaacaagaattccacatgagaagtaaaaacagtttacagtactcagcaaaagaacatggaatgcctgaaaagaatccagctgaagggaatacagtatttgtttataatgataaaaagggcaccgaagacccaggagactcacatcttcagtggcagctcaatctccttacacacatagaaaatgtgcagaacgaagttaccagcaggatggacctaatagaaaaagaagtcgatgttctggaaagctggcttgatttcacaggggagttggagccaccagatcctcttgcaagattgccccaacttaaacgccacataaaacagctcctaattgacatgggcaaagtacagcagatagcaactctttgctctgtatgacaacagtgaacacttaatgaaagaatgtggctttcttcagtcaaagcatttttattatccacgtgatggctaagtggataatttaaaagcttagtaatgtctggtcattcactgatttgtgatgtcaataggatggcaccttggaaagaaaaatgaagaacaactttatcaaggaagctagtatttaaaaacaaattcatgagcaagctgcaaatgagaatgtgttatatgccaaggaacaatgaagtagaatataatgtatactaagggatttcaagttctcagaatttttgagtagttgcttacgtgaagctcaagatacctgtagaaagaaatatggtatatttgtatagtttttaatagaaagatctatgtttataaaccagcacttggccaaaaacaaaattgtaaaggaaatttaaattctggagaattctacagggttgctctaagaactgtcttctcagcagttgatccagctgtacggaaatttagggtatttaaacttttaaaggatcatgagctgtttcttgggcgatgaatgttctcaatcagaaaactgacagtagaaatctcacttctggggaaaacagttgtggaattcttacttcattatgaatgtatttaaaaaacaaacaccaaataattggaatatattgcaggcattaagctcattaaaaacaaactggcttgcagaagggtccgatgtgccaagtgatcatgattctgctggaaagaggattttaaatattgtgggagttctcccaccctaagtcttacataatgccaccagtccatccaaaacctatatatcacctatactatatatatcatatatatagttgaatggcagtattcaggctcaacgtacagtttgatcctgagtatgcttggtgtttgccttcagaaaaaaaaaaatacattgtaaataacctcagctgggatgaggagtgacagaatatcaaaataatttgtggctgtggatttttttaactgctagtagtggaatactggaaaagcttcatttctgaagatgaattttatttttaaaaaatacatgcacactcaaaacttttagctttgatcacaagtggacaaatttctgaaaccaaaggcaactaagttgctgtgttagctcttgctggattttgagcctaggtcctactgtctgccagtactcatgtgagttgtatgtgcccccagtgctacatacgcaggtatgcgtaagtgtgtatgcttgttttaaacaaacactcaacgtacatatgtacataatctacacatatttatatcacatatctagttttattactatagactatacgaattggtggttaacatgaaatgttaccttttaacagactgtttttaaaaattaaaaatgtatgtataggttttgaaatttttttaaaaggggagaaagactgttaagaggaggctatttgatgacataacacttgaatattttatgcctcattctgtttatcagttctcgcaatctgtataaatgcattttagaactgatagacagtaaacttgaatttatctttgataagaatacatgccactgtacattcagatattatttaaatttgcaaacacattgttctatatgtaagggtactgtatgtaaaactctgtattaaaactattccacatatcctaaaatttcagcttgcctttttgcggccttatattttgatgtaaagattaaaagaatgtgcaaaacagtcagaaatttttattgccttttgagattctccaacttgacaaatgtgccaaagatcaacagacagaaaatatcatcctgtgtatttacttgtcatactttaactttgtgaaagatcttactgataaatgaaaagctttagcagaggtggtattgtggggtaattgcttaaatttacatatcaaagtaaaaaagtagtgcctgtattccatgtgtggagtaaatttgctaatgtctatattttatgattgatactattatttttcctttgcattttaaaatagtggctctaatattttccctgtcatggctacattctagacattgaatttatatcttctttttttcagatacggagcaaatagcatccttaacctatgaataatggtgttgcctagattcttgtcacacacacagaagaccctttgtacctagtaacattcatcctcttgattcctggtgaacacggttaaattcatgcacatttgttcttgtagtttctaaaaattagatcaatttatttgttagccagcaaattgaaaattccattattagattaatgaaatttttgctctgcttatatgtatacgaactggaaatctgaatttttaaatttagatctttaaatcaaattatttttatgcatattttcatttaatatagagtataccaatcgattgaagcctttcacaagtagtgcgctgagcttttcttattgaagagagtgaattagtttctgagaagtcagtctattgtgaaaagtttcagatgagattattttcttttagtctttttaaatatcactatatgtatttaaatagaagcaataaactagagagagtgtttcttgaaaagacaatgttttatttgccaccaggcagaacagaatgagcattggtagagaaggctccctcttggtatgttactgataaacttgtacttcctcatacttgtttgtggttctactgacttatttccaaacttaagagtaatgtacttcgaaaacaacttggttattctttaaatttcaggtaaaaccccttttcctaacactcatcttatttccactgtcttatttcctctcagatgttcatatttcacatgttcaaaatgaagcgtactatttcccctccaataaacgaagtctcctgccaa

SEQ ID NO: 4163 - DNA, 2818 bp, Homo Sapiens
  NM_016020
gagcggcggtgaaggtcctgggtgaggtagggttggatggtgcttgccgcgtatcatggctgcctccggaaaactcagcacttgccgtctccctccgttgcccacgattcgagaaatcattaagttgttaagactgcaagcagcgaagcagctatcacagaatttcctcctggacttgaggctgacagataagattgtaaggaaagctggcaatctgacaaatgcttatgtttacgaagtgggccctgggccagggggaatcacaagatctattcttaatgccgacgtcgctgaacttctggtggttgaaaaggacactcgatttattcctggattacagatgctttctgatgcagcacctgggaaactgagaattgttcatggagatgtcttgacatttaaggtagaaaaggctttttcagaaagtcttaaaagaccctgggaagatgatcctccaaatgtacatattattggaaatctgccttttagtgtttcaactccactgattatcaagtggcttgaaaatatttcctgtagagatggaccttttgtttatggcagaactcagatgactttgacttttcaaaaggaagtggcagagagacttgcagccaatacaggaagcaaacagcgtagtcgcctctctgttatggctcagtacctctgcaatgttcgacacatctttacgattccaggacaagcttttgtccccaaaccagaggtggacgtgggcgtggtgcacttcactcccttgatacagcccaagatagagcagccattcaagctggtggaaaaagtggttcagaatgtatttcagttccgaaggaaatactgccatcgagggctcagaatgttattccctgaagcgcagcgcttggaaagcacgggcaggctgttagagttggcagacatagaccctactcttcggccccgccagctctccatctcacactttaagagcctctgtgatgtatacagaaaaatgtgtgatgaagacccacaactctttgcatataatttcagagaagaactcaagcgaagaaaaagcaaaaatgaagaaaaagaagaggatgacgcagagaattacagactctagctgctgcctgggggcgagcagcctaccagatgtcgatttgcactacgtggagcttcttatataggtactcttttgtctttacagaatgacgatacaaatgccaatgaccagatgtgacttattttccttttactatacagcttggcagagaaaataaatatcatcaaataagatacagtacaagctttcttttaatatatactgtatagatagttatgacatgtttagtataaacagcatctattacaatctatcttacaaaaatgaagtatctgcacattttgcccctaaaccacattaaaataacttaaatatgctttaaataaagcaaaaactaacaaacagctgaaagaaaatgcccagaggattttaaaaaatggccctttgaaaactattaatcacgacttccccagccttactttttccacataacttaattattagaatgtaattttaaggatcctaaatcatttgatacctgctcaaagtggatataaactaagtaatttacagattctgaccagtttcatctaggtttctgatccacaataaattaaaataacttaaatctttacaaccattttgtgggaaaatgtatactgcacaaaacccaggaatgaacagtttttttttttttttttttttgcaatttccactttaccaccagtttaaaagtaaaatgaggaatttaacccatatctggattgaatcatactatgattttccgtggctctctgtttcataaaaacactcctcactgacaacagatgttaaactctggacactgaattctcgctctagaacagaatttaggtcgatggtggcattttcagactgactgtcaagggactggtgacggatctgcgccttgagcaaagttcctctgtccctcttggtgctgttggcttttcgtttaatggggcagaagtgcccccggaccagtttgggctgctctcctcctttctgaccctcacccgactccgggccaggctgctgctcagcctcggggtgaacgtctgggtcctcggaaatcctcagtctctggaactgaatttcgatgtctttagtagggctgccctgcttcacagtctgacggtggtcatcatcttcatcgctcaggatgtcactctctttgatgagattgtcggcaaaatctgccaagccggggtgtgggtatttcccgggagaagtgctcttggagtcctgcctgccctcagccgtggggcagccgctgctctgggtgccgctgctcaagctgccctcgtcagagtccagcaaggttcccttgccagtctcaccggtccactcgttgctggaggaattcttcaggacttttaaagacctggatgaagctacagtgagaaaaacacatttcgctgtgatacagaaacaggttacacaatgtgtaatgtttgcctcaaagcttgtgtaagatttaacattaagattttattttatgatatgacttcagttagcaactatcctggtaattaggcaaaaatgtagctactgaaaacatggacatttttgacttaggtttacagttgtaagttaggcaattcagcatttttagattaccagagctcaattatgtaaatagaactagacactagaaactactacatgggctaagattcttattttgccaaggagtaagttgaaaagttaattggtaataataaatctaggctcctttctttcactaaaaaaaaaaaaaaaaaa

SEQ ID NO: 4164 - DNA, 4360 bp, Homo Sapiens
  NM_016021
gcggccgcggcagggctgggcctgcgactacccgaggaggctgacctccagcccgggcgcccggttcagcgccgccccggccggcgccggtgcctgccaggcactcagggaggcgggggcgcagtggaggaggcggcgccatcgcgaagcgagcgcctcgcccgcactcagccttgccaccccgcccgcagtccaggctggactgggcggcatttgccgaggctcctcggccaggccccgtccgcccgagccgcgctgagacccgggcagcggccgcgtggagaggaggtggcagcggcccgggaggccggagccaagccagcgacccaccatggagacccgctacaacctgaagagtccggctgttaaacgtttaatgaaagaagcggcagaattgaaagatccaacagatcattaccatgcgcagcctttagaggataacctttttgaatggcacttcacggttagagggcccccagactccgattttgatggaggagtttatcacgggcggatagtactgccaccagagtatcccatgaaaccaccaagcattattctcctaacggctaatggtcgatttgaagtgggcaagaaaatctgtttgagcatctcaggccatcatcctgaaacttggcagccttcgtggagtataaggacagcattattagccatcattgggtttatgccaacaaaaggagagggagccataggttctctagattacactcctgaggaaagaagagcacttgccaaaaaatcacaagatttctgttgtgaaggatgtggctctgccatgaaggatgtcctgttgcctttaaaatctggaagcgattcaagccaagctgaccaagaagccaaagaactggctaggcaaataagctttaaggcagaagtcaattcatctggaaagactatctctgagtcagacttaaaccactctttttcactaactgatttacaagatgatatacctacaacattccagggtgctacggccagtacatcgtacggactccagaattcctcagcagcatcctttcatcaacctacccaacctgtagctaagaatacctccatgagccctcgacagcgccgggcccagcagcagagtcagagaaggttgtctacttcaccagatgtaatccagggccaccagccaagagacaaccacactgatcatggtgggtcagctgtactgattgtcatcctgactttggcattggcagctcttatattccgacgaatatatctggcaaacgaatacatatttgactttgagttataatatggttttgtgacttatgagctgtgactcaactgcttcattaaacattctgcattgggtataatctaagaattgtttacaaaaagattattttgtatttacccttcattcctttttttgatccttgtaagtttagtataaatatatctagacattcagactgtgtctagcagttacgtcctgcttaaagggactagaagtcaaagttccttgtctcactatttgatctgctttgcagggaaataacttgttttttctcatgtttcatcttctttttatgtaaatttgtaatactttcctatattgccctttgaaatttttggataaaagatgatgttttaagttccaatgagtattactagttactcaataccacttattgagtactctgtttctacgtatgtagaatgtatagggatagaagagttgaaaagggaaagcaaaactcctcaagtagcttccttaaaatgtcattcataggagatgtactggaattgctcattctgtgactttatttgtgtcctaaacattcttcagtgaaaataattttatttcagtcaaacatttatgaggaaatgagatcacatctttgtcactggatgctacttgaagagggagtactttgtaaccactttgatatgctgttatcaccaccccctgccctctgctgccataatcacacaaatttaaaaagaaagaaaacagtcttccatagatttttaaggaagaaagggcccaagccaggagatcgcttggttttcttccagaagttaaatggggggatctgaagatttgaatgtttggtctgctttgaaatgtatgtcttttgggatgtattatatgcctagctttataatcagtataaattttaattattccaggaatatgcataatattgaaatatttcatgtcctattttaatagaaaacctcagggcccaagtaacagtgatagaagttagaaaaacctttacttagaattgtccacctagtcagagcccaagaaagaattttcagtggaaaaatcaatatataacttagtgctagctagcgccacagactctagtagataatattatcatcataatggctggtgaaaccatataatcacagaaaaacattgccttcagcatgttcagttcgcagcactgagggcactcttgagggtgttgttaatgaagatttaatttttaaatacaggtggttccaagctttcaaataggttatgctccaaaagtgttatttgtaagttaatttttttacaagtcaaacaatgttggaagtggtatttaggttctagatcggtccacgaaagttagcccatatgtatatcttgaatagtataggggagggtattcataaagtccttatgtggttttaactaagtgaaattatggacaagagaaataattgtaaaatcgtcttaaaggaaaatttaatttttactcctgtttatgggacattcgttctattaactgtcagacacaatttctgttttcatctgagagccagttttcctttatttctacatctaaaataagaacatattgtacactattatataatacagaattgtcttaaactttaataaattcgcattttaaaggtgtttacagattattttttatatctgtagctgaatttgttaaagtctaaaaagctcaaggactttatgaagatctcattatatgaggaaaatcataggttaccattttataactctattgccataagaaaatacactctaaaatcttgatttgaaacatattagaaaccttgattcagtgctcagtggtctcctagtaagaagtcaccgacggtagcgtcatatgagaagaaagaaatccccaccacctcaacctctgctgagattgtgtgctaggaacagccttccctccgtttcccctcagtcaaacttgagccagcctctggatcgatgtgatcttattgcatgtttccatggggtgtacctatactttaagccaatcctgctgcattcactgctaagttaaataaaaagccaagaagattttgcactgtgcagatcctttgctatctgacttgcatctcttcccccacctgtcagctagccacctgcttgtttgtgttgggatattttttagcacctgaagcaccatctgaaaggggcaccattttcttcttccctttgatctcacatatgctccctaaaaatccttaagttgtcaatctgatccccagtgtgaggttaatgagcaaaattggtctttggggccctttttgtccaagccccactgaaaggcctcttcagaaaactattatctttaaagccctactttaactccttaattccagcatacagctaaaactggatgtatattctggcaagtaaaggctgaggactcctctttaatcctcagatctagataactcatgacattttatttgaccaacatagcacatgatgagatatcaaggtaattaaaatagcatgcttgaaaaaaaaatacgtaatctgtttcacctgtaactgtttaagccaataaacttttcaaaatttatgtaatgtggggcttttatgtagcactttacgttttcatgctgcttattgttttattctactgaaaaaaatgaatttcaagattctcaacttttttaatttcaaaaattgtttattgttttgactataggaatacaaaatttcctattttgggagaataagaactctttttgtcatttttggctatgaataaactttctggtcttttgagaccacccatttttatagatcagaatcagaaaacaggtaaacctcactcacacatttggactcatttgaacaaaaatctaggccaaaatactgaaaagcctatgtgtttttttaattggaagtatatgtaaggttaatgcatttagtgaacgtgactaacaaagactaatgtgcacattaacagatgtactttttaaggttttatgggaggctgtgcattgctcaaaagctgttgggaacgccttctgaacagttgccttcagaactagtttgagctgctcaataaaaccagtgactttactcataaaaaaaaaaaaaaaaaaa

SEQ ID NO: 4165 - DNA, 3306 bp, Homo Sapiens
  NM_016023
gcgcacgcgcagcaccccatttaagtttctcgtctttgcagtggctttgcttagatccggtgccgccttgaaggcggggctgggtcccagccgtagccaatggagccccgggtgagggttgaggggtggaaggtgcctactagccggtgcaggtttcttctagcgcgtgtgctggggtacctggtcgtcatggaggcggtattgaccgaagagcttgatgaggaagagcagctgctgagaaggcatcgcaaagagaagaaggagttgcaagccaaaattcagggcatgaagaatgctgttcccaagaatgacaagaagaggaggaagcaactcaccgaagatgtggccaagttggaaaaagaaatggaacagaaacatagagaggaactggagcaattgaagctgactactaaggagaataagatagattctgttgctgttaacatttcaaacttggtgcttgagaatcagccacctcggatatcaaaagcacaaaagagacgggaaaagaaagctgcattggaaaaggagcgagaagaacggatagctgaagctgaaattgaaaacttaacaggagccagacatatggaaagtgagaaacttgctcaaatattggcagctagacagttagaaattaaacagattccatctgatggccactgtatgtataaagccattgaagatcaactgaaagaaaaggattgtgctctgactgtggttgccttgagaagtcagaccgctgagtatatgcaaagccatgtggaagactttctgccatttttaacaaaccctaatacaggagatatgtatactccagaagaatttcagaagtactgtgaagatattgtaaacacagctgcatggggaggtcagcttgagctaagagctctgtctcacattttacaaacaccaatagagataatacaggcagattctcctcccattatagttggtgaagaatattcaaaaaaaccactaatacttgtatatatgagacatgcatatggcttaggagaacattataattcggttacacggttggtaaacatagttactgaaaattgcagctaatttatacaatgttgtacaattatgttttaatacagtgtgctgaactgagtatttctaccaagtgttgggttgttctaaatgctactgaaaaacacaactaccttatatcagttttatggcaaagctactaacaggtgtttttagaaatatgtcagagataaactttaaccagtgtcttcttagtggaattttaaaaatttgttaagttcattgtagagaacaccattcatagaccaagatggtcccctattagctgatattttcatttatgtaagatcctggacattctgttttgtgttggaacaaattttcaatgtttttaattctcccttttctgcctgttcctaaaaactttcaaaataaccatttcaatgtaatttgtcttgaagaagtttacccaatatctttgtcattgcaataatgtagtatggtgatggtcaatttaattattgcttataaaatgaacttgattgcagtaaccatggtatcgatgagactaatgcagtgaagctttattactaatatatatagccttatcaaagcaagctaagaagcttgctttaataattaataatttaaaaatatttatttagatgggattcagttgtttaaagaagtgagataaattcaaaggtaaataggtattctctgtcaaatttaaatctctaaagaattagagattagttttttatttgtgtataatttaaaaaagacctaataggttactgtctttttaatgcatttgttattctttcgtattttttaagcatcggactggagttagtaccatcatctcttgagtctttcataactacacatttttatatttccttttgtgttttctactttgctttccttgaaggaacaagcattttgtggcctttaccttgtgcaattttagggagtagcagtgtaaaaggtccaagaccacatttacttgaaattcttcctcttttctgatttgtcttaccagatatttcccttcttgcctcattctctaggatttgaataaaacctttgccacttattttattagccttattaatgtcacctttccttcaactcaaatatttgagaaattttatgttacatatatgaatgaagttgaaagctactgtttggaagctaagacttgtatagagtagttttgtatatgaatggttgttctagctcagatttcaggttactcacaacagtattctttctaagaggatatatacaaatgtctctcataatttatgtaaggaaatattatgaaaatgagacttttttagtttgatgtgtgtttcccaaactagagataaaactagtaagatttagtatcgtttataacatttgaatttttgctccatgagtacaactaatttttataagtaaatattgggtttatatgaaaaatggggtgtcagtcttttcacacgcccagcaggtaacaatgtgggaagctggcagggtcattgatagcaagtaagtacttcctgaaggctttccagttcaaaagattacaagccattctgcctgccaaacaaattatattctgaagatgcctgttttgtaacccttgatgtgaattttttggtgtctgaaatttacaaaagaatgaaattgaaattgtaaaacactaaatgctttgggtttattttgaagtaatctgttactttaaaatgtcaacattaggaagccataaaacaagatattatgaaacccagtattataaatgttatctacatctaaagtattttaaaataacttattggcagctttattctttttttccttacaagatttagaatctttttggttatatgtctatttttcaattttgttatatttttaatttaagtggccaatgtggttatgaacaagatttgtatggtcagcttctgttctttcctaaaacttcagataaatatcattttagctataacctaaaaaagtgtttaaataaaatgacagatgttaatttaaaagcagcatatgctaatttactttttcatatgatgatggtctaatggaagttacatatgctttcttttgtcctaactctgaaaagtatatgtcagagttctggaatatgtctttagccaagaattttattcacttaaatttgtttacaacttgtataaagcaaaaaagaatgtgtgtaactatagtgaacgcatagttttgcttatattatgtgatgtttgccaaaaaaagaataaaaaatgaatgaattaaatcaacaaaaaaaaa

SEQ ID NO: 4166 - DNA, 1528 bp, Homo Sapiens
  NM_016024
gcgcatgcgctgcgctgcctttcccgggcgctgattcctgagtgctgagcgcgaacccgaggagatgaaccctttaactaaggtgaagctgatcaacgagctgaatgaacgagaggtccagcttggggtggccgataaggtgtcctggcactccgagtacaaggacagcgcctggatcttcctgggagggcttccttatgaactgactgaaggggacatcatctgtgtgttctcacaatatggggagattgttaacattaatctcgtgcgggacaagaaaactgggaaatccaaaggattctgtttcctctgctatgaagaccagaggagcacaattctggccgtcgacaattttaatgggatcaagatcaaaggaagaactatccgagtggatcatgtgtctaactatcgggctcctaaggactcagaagaaatagatgatgtgaccagacaactccaggagaagggctgtggggctcgtaccccctcaccaagtttgtctgagagctctgaagatgaaaaaccaacaaaaaagcacaaaaaagacaaaaaggaaaaaaagaaaaaaaagaaagaaaaagagaaagccgaccgggaggtacaggcagagcaaccatcctcttcgtcacccagacgcaagacagtaaaggaaaaggatgacactggccctaagaagcacagcagcaagaactcagagagagctcagaagtcagagcccagggaggggcagaagctccccaaatccaggacggcctactctggtggagcagaggacctagagagggagctgaagaaggagaaacccaagcacgagcacaagtcctcaagcaggagggaggcaagagaagaaaagaccaggattagggacagagggcggagctcagatgcacattctagctggtataatgggcgttctgaagggcgtagttatagaagtagaagtaggagccgagataaatcccataggcataaaagggcccgacgctcccgggagcgggagtcttcgaatcccagtgaccgttggcgtcactgaagacttcagctgcacagtagatttggaaataattatgttttttaaatgcagtcaaattcagttgggtggttactatttttgtatctaaaacttctggggctggattcttttaatcccttgactatttagagtcattgggagggctgcagtttcaacagctagatatcctggatattgtttgcaccatccattgtccctgtaccagagtatgtatcctgaactttggttcataaatatggctcttgaacccatagaccccagttgaagatggaattttcaggaaagggaaaatactagataattctagaattctagtcttcgtgttagatgtttatagcccagcatcttgggacctttccagttactaggtttggacagcttgatgtgaacgaatgggataggatttttaaaatcagccagctccatgcccaaaccttcctgtttgcagaactttttaatgtcttttctttttcattaaaacttttttgttcgata

SEQ ID NO: 4167 - DNA, 3212 bp, Homo Sapiens
  NM_016025
ggaagggaagggggaggtgccgaggctgcgcgccggctgctcctccccacccccagcctttgccctgaagggggctggatgggcaaggcggccgcgatggctcgagctcgggcggtggcggcggtggccggaggcggcggtgcctcctcctcctcgccccggcgccggcggtgatccgagcgagcggccgcggcccccgatgagactgctggcgggctggctgtgcctgagcctggcgtccgtgtggctggcgcggaggatgtggacgctgcggagcccgctcacccgctccctgtacgtgaacatgactagcggcccgggtgggccggcggcggccgcgggcggcaggaaggagaaccaccagtggtatgtgtgcaacagagagaaattatgcgaatcactccaggctgtctttgttcagagttaccttgatcaaggaacacagatcttcttaaacaacagcattgagaaatcgggctggctatttatccaattatatcattcttttgtgtcatctgtttttagcctgtttatgtctagaacatctatcaatgggttgctaggaagaggctcaatgtttgtgttttcaccagatcagtttcagagactgcttaaaattaatccagactggaaaacccacagacttcttgatttaggtgctggagatggagaagtcacaaaaatcatgagccctcattttgaagaaatctatgccactgagctttctgaaactatgatatggcagcttcagaaaaagaaatacagagtccttggtataaatgaatggcagaatacggggttccagtatgatgtcatcagctgcctgaacttgctggaccgctgtgatcagcccctgactttgttaaaagatatcagaagtgtcttggagccaactagaggcagggtcatccttgcccttgtcctcccctttcatccctatgtggaaaacgtaggtggcaagtgggagaaaccatcagaaattttggaaatcaaaggacagaactgggaagaacaagtgaatagtctgcctgaagttttcagaaaagctggttttgttatcgaagctttcaccagactaccatacctgtgtgaaggcgacatgtataatgactactacgttctggatgacgctgtctttgttctcaaaccagtataaacacgtggaggtcgaagtcttcagagtccgcaccctccgggatgtgcccttggaagagggtctgtgttcacaattacgtgaagggaggacccttggggaccgccattctaaatatcatgtaggaatttaaaaagccaaaatactaattatttctttgtagtgtgtaaaggaatgtttttaaaagacaaaaacccaactctttgtggatttttatcaactctttactcagagccactctccaatgcaggtcacactccaattatgatggaagatattttttatacttaattgcagtagggactcattcccagacaaagcaatagtcacgacttcatggaaccaatcaatggattgttttttgaagactggcaataaagctgtccattcaattccaaatactggttttaaggtatagccactgatattctttcatgtttagaaattctttctgttattattcaagaaaatgtttttaatcatgctaataaacttttttggagatgactttggcatcatgtttgaattcatataaagctcccctagcattttttattggtttggcttcaggagtacccaaatagtagcattatgagaatgacgcagacaatttgaataggggggaaggaaggcttcagacttgggggaaggggagattattgcaaattgcagtgaacactgagtcagtaaaaaaaaaaaacagaaacaaaaacccagcctcattcagatacagaacttcagggacccctccccccacccccccagttaatgctgctgtgaaaaatgcaaaataacctggttctgactttgtgatcactcatgtcccatacactgaactttgtttttttctggacaatctcaggttctcagaattgaaacattcagttttgtctactgacaaaatgcaactaaaaatgttttaattcaacttcttactctacacttatatacctctctcccagagcttggctcttccctgaaatccttaaaggagtttattatttgccaagaatatggtttgatgaagaccgtgtcagactcatgcattctggaatccgtgagtgcctccaaccataaacccagaaatgctgccatagaggaacccattagcaagatcaataaccatcgtggatattccaaagagcagagcatttaacccagaatctgaaatctcagtaataacagaaatgtcaatatgagattgtggttattaacaatatgttatcctcactactttatttcttttttcatccaggtgtttcattaagtattctcatttatatgctcatagaagtcatcagatcaacacattcactccaacacctgggtataaaggcgaattaaaacctgaagaattactttattattcattaagaactgcattcccacatcctcacaccaatatcttccactgttactgtgcagtcataataagagttgggttatgtgatttatgcaaaattgttattggtgtgttctaatgatttttttccaggaattcaagtaagtgaagtacaaatacttagcaccatagattgtaaaaatagaaagaggaaatgagaaaacttaatgtcgttcttgtacagttgagttttgcttctttataaactgtctgttaaaatcaggggttgctgttagactgtcaagcagaagtgatggatgttcaaggaggcaggttgccccaaagtgttttctaactttcaagtagagaactttatgctctaataagaaaaatacaactcattcttaaccacccccccaaaacagagaaaacacatacatttatgcattttaaagataaaaagtagtttctcaaaaaaatctgaagttctctgaaaaccagcttattaaaagtgctgttttgtggtgaaaattgaaaccaaatccactcacatttcctatcgggtcttgaaattcttggtggtgtgtcaccattccactagatggcagtgttgcttactgagtgtcaatggcttttttccccgtaaatggaatcatgtttttctcccccaaagtacaataaagctgccttgtctgcaccaaaaaaaaaaaaaaaaaa

SEQ ID NO: 4168 - DNA, 2587 bp, Homo Sapiens
  NM_016026
aatttgaattggggcgtgtctagaaagagaagccatagtcggcgagcaacgctggagcatcccgctctggtgccgctgcagccggcagagatggttgagctcatgttcccgctgttgctcctccttctgcccttccttctgtatatggctgcgccccaaatcaggaaaatgctgtccagtggggtgtgtacatcaactgttcagcttcctgggaaagtagttgtggtcacaggagctaatacaggtatcgggaaggagacagccaaagagctggctcagagaggagctcgagtatatttagcttgccgggatgtggaaaagggggaattggtggccaaagagatccagaccacgacagggaaccagcaggtgttggtgcggaaactggacctgtctgatactaagtctattcgagcttttgctaagggcttcttagctgaggaaaagcacctccacgttttgatcaacaatgcaggagtgatgatgtgtccgtactcgaagacagcagatggctttgagatgcacataggagtcaaccacttgggtcacttcctcctaacccatctgctgctagagaaactaaaggaatcagccccatcaaggatagtaaatgtgtcttccctcgcacatcacctgggaaggatccacttccataacctgcagggcgagaaattctacaatgcaggcctggcctactgtcacagcaagctagccaacatcctcttcacccaggaactggcccggagactaaaaggctctggcgttacgacgtattctgtacaccctggcacagtccaatctgaactggttcggcactcatctttcatgagatggatgtggtggcttttctcctttttcatcaagactcctcagcagggagcccagaccagcctgcactgtgccttaacagaaggtcttgagattctaagtgggaatcatttcagtgactgtcatgtggcatgggtctctgcccaagctcgtaatgagactatagcaaggcggctgtgggacgtcagttgtgacctgctgggcctcccaatagactaacaggcagtgccagttggacccaagagaagactgcagcagactacacagtacttcttgtcaaaatgattctccttcaaggttttcaaaacctttagcacaaagagagcaaaaccttccagccttgcctgcttggtgtccagttaaaactcagtgtactgccagattcgtctaaatgtctgtcatgtccagatttactttgcttctgttactgccagagttactagagatatcataataggataagaagaccctcatatgacctgcacagctcattttccttctgaaagaaactactacctaggagaatctaagctatagcagggatgatttatgcaaatttgaactagcttctttgttcacaattcagttcctcccaaccaaccagtcttcacttcaagagggccacactgcaacctcagcttaacatgaataacaaagactggctcaggagcagggcttgcccaggcatggtggatcaccggaggtcagtagttcaagaccagcctggccaacatggtgaaaccccacctctactaaaaattgtgtatatctttgtgtgtcttcctgtttatgtgtgccaagggagtattttcacaaagttcaaaacagccacaataatcagagatggagcaaaccagtgccatccagtctttatgcaaatgaaatgctgcaaagggaagcagattctgtatatgttggtaactacccaccaagagcacatgggtagcagggaagaagtaaaaaaagagaaggagaatactggaagataatgcacaaaatgaagggactagttaaggattaactagccctttaaggattaactagttaaggattaatagcaaaagatattaaatatgctaacatagctatggaggaattgagggcaagcacccaggactgatgaggtcttaacaaaaaccagtgtggcaaaaaaaaaaaaaaaaaaaaaaaaaaaaatcctaaaaacaaacaaacaaaaaaaacaattcttcattcagaaaaattatcttagggactgatattggtaattatggtcaatttaataatattttggggcatttccttacattgtcttgacaagattaaaatgtctgtgccaaaattttgtattttatttggagacttcttatcaaaagtaatgctgccaaaggaagtctaaggaattagtagtgttcccatcacttgtttggagtgtgctattctaaaagattttgatttcctggaatgacaattatattttaactttggtgggggaaagagttataggaccacagtcttcacttctgatacttgtaaattaatcttttattgcacttgttttgaccattaagctatatgtttagaaatggtcattttacggaaaaattagaaaaattctgataatagtgcagaataaatgaattaatgttttacttaatttatattgaactgtcaatgacaaataaaaattctttttgattattttttgttttcatttaccagaataaaaactaagaattaaaagtttgattacagtcaaaaaaaaaaaaaaaaaaaaaaa

SEQ ID NO: 4169 - DNA, 1553 bp, Homo Sapiens
  NM_016027
acgtggacgctactcgctatccccggcctgttggcttcttccgcgctggagtatccagataggcgacacgccggcgggcggctgaggcgggaatggctgctgtactgcagcgcgtcgagcggctgtccaatcgagtcgtgcgtgtgttgggctgtaacccgggtcccatgaccctccaaggcaccaacacctacctagtggggaccggccccaggagaatcctcattgacactggagaaccagcaattccagaatacatcagctgtttaaagcaggctctaactgaatttaacacagcaatccaggaaattgtagtgactcactggcaccgagatcattctggaggcataggagatatttgtaaaagcatcaataatgacactacctattgcattaaaaaactcccacggaatcctcagagagaagaaattataggaaatggagagcaacaatatgtttatctgaaagatggagatgtgattaagactgagggagccactctaagagttctatatacccctggccacactgatgatcacatggctctactcttagaagaggaaaatgctatcttttctggagattgcatcctaggggaaggaacaacggtatttgaagacctctatgattatatgaactctttaaaagagttattgaaaatcaaagctgatattatatatccaggacatggcccagtaattcataatgctgaagctaaaattcaacaatacatttctcacagaaatattcgagagcagcaaattcttacattatttcgtgagaactttgagaaatcatttacagtaatggagcttgtaaaaattatttacaagaatactcctgagaatttacatgaaatggctaaacataatctcttacttcatttgaaaaaactagaaaaagaaggaaaaatatttagcaacacagatcctgacaagaaatggaaagctcatctttagtttcagattaaagaaagctttgttttattttgctttcagagaatggtatgttttcttaactataggttattttatagagaatataaaagtataaaacattaaaaataaccctagatatactttaaaataatgttatatttatgctaaaatatgtaaattacactatacaaccatatgataggttatttctctaaccttgtcttctaacgttttaccaaaaattcataatctaatagtttatcagttttcaatagattaaataaaatgattactttaaaaataataaaatttatctaatttaaagttgatattatttttggccgttagttatctattactagtgatcagttatactgttttctatagctactttatttaacagcacagatttctatgcacctttactctttcctcaacccttgtctctatctgtacataattgctttgtcttgatgtttctatcaactatatcatgactatctattggttccataactctgtatcatgtgtattttcttattctggtataccacaaatgattcatgcaaatgaatttttggtgattgaaaaatattaaattcccaatttaaagta

SEQ ID NO: 4170 - DNA, 1404 bp, Homo Sapiens
  NM_016029
tggggccgcgagtgctgagcccggcgcgcccgagccgctcctcctcccggcctgctccctgggcggagccggggcagtgcggctctgggctggccgaaggggtggcgctgcgatcccgcagggcagcgacgcgactctggtgcgggccgtcttcttccccccgagctgggcgtgcgcggccgcaatgaactgggagctgctgctgtggctgctggtgctgtgcgcgctgctcctgctcttggtgcagctgctgcgcttcctgagggctgacggcgacctgacgctactatgggccgagtggcagggacgacgcccagaatgggagctgactgatatggtggtgtgggtgactggagcctcgagtggaattggtgaggagctggcttaccagttgtctaaactaggagtttctcttgtgctgtcagccagaagagtgcatgagctggaaagggtgaaaagaagatgcctagagaatggcaatttaaaagaaaaagatatacttgttttgccccttgacctgaccgacactggttcccatgaagcggctaccaaagctgttctccaggagtttggtagaatcgacattctggtcaacaatggtggaatgtcccagcgttctctgtgcatggataccagcttggatgtctacagaaagctaatagagcttaactacttagggacggtgtccttgacaaaatgtgttctgcctcacatgatcgagaggaagcaaggaaagattgttactgtgaatagcatcctgggtatcatatctgtacctctttccattggatactgtgctagcaagcatgctctccggggtttttttaatggccttcgaacagaacttgccacatacccaggtataatagtttctaacatttgcccaggacctgtgcaatcaaatattgtggagaattccctagctggagaagtcacaaagactataggcaataatggagaccagtcccacaagatgacaaccagtcgttgtgtgcggctgatgttaatcagcatggccaatgatttgaaagaagtttggatctcagaacaacctttcttgttagtaacatatttgtggcaatacatgccaacctgggcctggtggataaccaacaagatggggaagaaaaggattgagaactttaagagtggtgtggatgcagactcttcttattttaaaatctttaagacaaaacatgactgaaaagagcacctgtacttttcaagccactggagggagaaatggaaaacatgaaaacagcaatcttcttatgcttctgaataatcaaagactaatttgtgattttactttttaatagatatgactttgcttccaacatggaatgaaataaaaaataaataataaaagattgccatgaatcttgcaaaaaaaaaaaaaaaaaa

SEQ ID NO: 4171 - DNA, 1510 bp, Homo Sapiens
  NM_016034
cgcggatggcgacggaaggggaggccgctcggcctggcctggagggagacctcgctctgccccgcgtcccagccatggcgacatcctcggccgcgctgccccgaatactcggcgcgggtgcccgggccccgtcgcgctggttgggctttctcgggaaggcgaccccccggcctgctcggccgagccgcaggacgcttggaagcgcgacggcccttatgatccgcgagtcggaggacagcaccgatttcaacgacaagattttgaatgagcccctcaagcactctgacttcttcaatgtcaaggaactgttttccgtgagaagcctcttcgatgcccgagtccatctgggacacaaagctggctgtcggcacaggtttatggagccgtacatctttgggagccgcctggaccacgacatcatcgacctggaacagacagccacgcacctccagctggccttgaacttcaccgcccacatggcctaccgcaagggcatcatcttgtttataagccgcaaccggcagttctcgtacctgattgagaacatggcccgtgactgtggcgagtacgcccacactcgctacttcaggggcggcatgctgaccaacgcgcgcctcctctttggccccacggtccgcctgccggacctcatcatcttcctgcacacgctcaacaacatctttgagccacacgtggccgtgagagacgcagccaagatgaacatccccacagtgggcatcgtggacaccaactgcaacccctgcctcatcacctaccctgtacccggcaatgacgactctccgctggctgtgcacctctactgcaggctcttccagacggccatcacccgggccaaggagaagcggcagcaggttgaggctctctatcgcctgcagggccagaaggagcccggggaccaggggccagcccaccctcctggggctgacatgagccattccctgtgatgttcactctcctcccaaagcaaaccacagccaagcctgtctgagctgggagtccccttccccagccctgggtcagcggcatcctcagtcgttgttacttactcagctgatgtcacagtgcagacatccaccgttccaccacagaaccagtggctgagcggaccaacgttgccatgtgcgtttgctctgtggggaacagagcacagagggtgagcgacatgtgcagaacggccccttggctgcagttaggacctcagtggctggtatggccaagctgctagaagatgctgctgtccctgtgatcccagcagccctcccttcaccgtgacccctgacctttgtcaggaaggtgcagtttttcttctcaatctaaatgcctttcaggtgggccgcttccttggctacctggttccagggggctgttttgtaatgagatgctgctggcaggccactcagaggctcccagctgggttggtgggacagccaggccagatgacctgattccagcaaaaataaaactcagatttgggcaaaatgagaaaaaa

SEQ ID NO: 4172 - DNA, 1156 bp, Homo Sapiens
  NM_016041
ggggacggtggggaagatggcgtaccagagcttgcggctggagtacctgcagatcccaccggtcagccgcgcctacaccactgcctgcgtcctcaccaccgccgccgtgcagttggaattgatcacaccttttcagttgtacttcaatcctgaattaatctttaaacactttcaaatatggagattaatcaccaacttcttattttttgggccagttggattcaattttttatttaacatgatttttctatatcgttactgtcgaatgctagaagaaggctctttccgaggtcggacagcagactttgtatttatgttcctttttggtggattcttaatgaccctttttggtctgtttgtgagcttagttttcttgggccaggcctttacaataatgctcgtctatgtgtggagccgaaggaacccctatgtccgcatgaacttcttcggccttctcaacttccaggccccctttctgccctgggtgctcatgggattttccttgttgttggggaactcaatcattgtggaccttttgggtattgcagttggacacatatattttttcttggaagatgtatttcccaatcaacctggtggaataagaattctgaaaacaccatctattttgaaagctatttttgatacaccagatgaggatccaaattacaatccactacctgaggaacggccaggaggcttcgcctggggtgagggccagcggcttggaggttaaagcagcagtgccaataatgagacccagctgggaaggactcggtgatacccactgggatcttttatcctttgttgcaaaagtgtggacacttttgacagcttggcagattttaactccagaagcactttatgaaatggtacactgactaatccagaagacatttccaacagtttgccagtggttcctcactacactggtactgaaagtgtaatttcttagagccaaaaaactggagaaacaaatatcctgccacctctaacaagtacatgagtacttgatttttatggtataaggcagagccttttcttcctcttcttgatagatgaggccatggtgtaaatggaagtttcagagaggacaaaataaaacggaattccatttttctctcactaaaaaaaaaaaaaaaaaaaaaaaaaaaaa

SEQ ID NO: 4173 - DNA, 1150 bp, Homo Sapiens
  NM_016046
atcctggttttgggacagcggcaatcatggcgccacctgtgagatactgcatccccggcgaacgtctgtgtaacttggaggagggcagcccgggcagcggcacctacacccgccacggctacatcttttcgtcgcttgccggctgtctgatgaagagcagcgagaatggcgcgcttccagtggtgtctgtagtgagagaaacagagtcccagttactgccagatgtgggagctattgtaacctgtaaggtctctagcatcaattcacgctttgccaaagtacacatcctgtatgtggggtccatgcctcttaagaactcttttcgaggaactatccgcaaggaagatgtccgagcaactgaaaaagacaaggttgaaatttataagagtttccgcccaggtgacattgtcttggccaaagtgatctccttaggtgatgcacagtccaactacctgctaaccaccgccgagaacgagctgggagtggtggtagcccacagtgagtcaggtatccagatggttcccatcagctggtgtgagatgcagtgccctaagacccacactaaagaattccggaaagtagcccgagtacaacccgaattcttgcagacctaagaagccactttttaccctatggaagggggtaagctgttcctgagtataacaccaagatgctgctgtctttattcaaacacctggcgtcggccaacagccacttccagaaaaatcttccagtttacgctgtagatggaacatgtttctgtgaacctatcagtggatttcattctcttgagtaataaatcttatcttttcaaggcaccaacaaacaaaactgtgatattggaaatagcctatccctcctgacagtccttataaatacatattttttgctatgataaaacttttttactaaaaggatgttatagagtctgttgtcttaagcagagaaagacatctaaatggtgtcaggacatttcagtacttctgcttattgagtacttactgtgctaggcactgagtcaggtgctttacatacgtccccttcatttaggtacattgtgatttaatgaaaatttgaggacacgtggtgatacagatagcatgtgaggcaggcatggtggctcatgtttgtaaatcccagcactttggga

SEQ ID NO: 4174 - DNA, 783 bp, Homo Sapiens
  NM_016047
cgagtctcgctcaggctcggttttaccccggagtctattcgaagggggctgctacgtcagcgcgtctcagcgtaagacggcgctattccgctgtaacagcttccggcgggtcctggatgttgatgtcctgcatctaacgcggtgtaacccccgaagccgagcgagctccggaggaatttcagtatctgctacggtaacttcatcagcccgccaagatggcgatgcaagcggccaagagggcgaacattcgacttccacctgaagtaaatcggatattgtatataagaaatttgccatacaaaatcacagctgaagaaatgtatgatatatttgggaaatatggacctattcgtcaaatcagagtggggaacacacctgaaactagaggaacagcttatgtggtctatgaggacatctttgatgccaagaatgcatgtgatcacctatcgggattcaatgtttgtaacagataccttgtggttttgtactataatgccaacagggcatttcagaagatggacacaaagaagaaggaggaacagttgaagcttctcaaggagaaatatggcatcaacacagatccaccaaaataaatgttttctacattttcatttggactaaatcccacgaatgacaactaccacctttttttcctttttaattaatactaaatattgtgatttcttatttgaggttcaaaatgacctgcttgaaactttgatacatattggaatacattatgttaataaacttgtagctttttgtgaaacaaaaaaaaaaaaa

SEQ ID NO: 4175 - DNA, 1942 bp, Homo Sapiens
  NM_016048
gcagacgctcgggggaacatggcggctgcggagccggcggtccttgcgctccccaacagcggcgccgggggcgcgggggcgccgtcgggcacagtcccggtgctcttctgtttctcagtcttcgcgcgaccctcgtcggtgccacacggggcgggctacgagctgctcatccagaagttcctcagcctgtacggcgaccagatcgacatgcaccgcaaattcgtggtgcagctgttcgccgaggagtggggccagtacgtggacttgcccaagggcttcgcggtgagcgagcgctgcaaggtgcgcctcgtgccgttgcagatccagctcactaccctgggaaatcttacaccttcaagcactgtgtttttctgctgtgatatgcaggaaaggttcagaccagccatcaagtattttggggatattattagcgtgggacagagattgttgcaaggggcccggattttaggaattcctgttattgtaacagaacaataccctaaaggtcttgggagcacggttcaagaaattgatttaacaggtgtaaaactggtacttccaaagaccaagttttcaatggtattaccagaagtagaagcggcattagcagagattcccggagtcaggagtgttgtattatttggagtagaaactcatgtgtgcatccaacaaactgccctggagctagttggccgaggagtcgaggttcacattgttgctgatgccacctcatcaagaagcatgatggacaggatgtttgccctcgagcgtctcgctcgaaccgggatcatagtgaccacgagtgaggctgttctgcttcagctggtagctgataaggaccatccaaaattcaaggaaattcagaatctaattaaggcgagtgctccagagtcgggtctgctttccaaagtataggacatttgaagaactggtatgctactcactggtgaaggacagtcaggtgaaggactgtaagcccacacaagctcttcttatctctactagaattaaaatgttaagtcaaaaacggctccttttttgcgcctcctagtgaaacttaaccagctagaccatttgagtaccagcatttagttacaaacgtcaaaggcttccggtgctgcttaccttccttttttgttaatgtgcttttatttattaaaaaaaattacaatgaagatgcctgttttgtctctactgtgtactctgatcgtatctttccaaagtgcagactcttgtgaagttttcttaaattgttcactttaaagaaaatgacgtaccaacaatgatttggcttttatattactgtaagatgttataatgttaatgtggatgtagtgcttttactttacagattgattggaataagattattgcatatgaatttacccacaggactctgaatcatgttacccactcccctcacaatgttgtccacttagtgagttgcattgatctatccgtaccaaatgatgttgaataattacatatctttcttgactatactgatttcttattttggtcactattactaaatctctgttaatattctctcttttaactgaaaagggatgggatagaagggtttgcaatgccatattattggtggagggctgttttaacatctttgaagtatggcttgctgaatatctttaccaacatcttgaatatatattctagtgtccacaagatttagcaaaaagataaagcttgggtggaatatcattttaaaatgttcatgttctgttctatattttcttcacctactctccaaatattgtaatgcaaaaagtctcagtaatgatttggtagtattaattttgtggtcattgtttctcttcgataaatttattttcattaaatacttgttagagggttttgaaatgtttttcaaatatgtgaaatgtgaaactgctgtcttttatattaaagtaattaaagaaaa

SEQ ID NO: 4176 - DNA, 1610 bp, Homo Sapiens
  NM_016050
cttgacctctggcccaagatggtggcgcccagagcttcgctcttgctgctcccctgaggtgaactgaagccagcagccccgcatcatgtcaaagctcggccgggccgcccggggcctcaggaagcccgaggtcggcggtgtgatccgggcgatcgtgcgggcaggcctggccatgcccgggcccccactaggcccagtgctgggtcagagaggcgtttccatcaaccagttttgcaaggagttcaatgagaggacaaaggacatcaaggaaggcattcctctgcctaccaagattttagtgaagcctgacaggacatttgaaattaagattggacagcccactgtttcctacttcctgaaggcagcagctgggattgaaaagggggcccggcaaacagggaaagaggtggcaggcctggtgaccttgaagcatgtgtatgagattgcccgcatcaaagctcaggatgaggcatttgccctgcaggatgtacccctgtcgtctgttgtccgctccatcatcgggtctgcccgttctctgggcattcgcgtggtgaaggacctcagttcagaagagcttgcagctttccagaaggaacgagccatcttcctggctgctcagaaggaggcagatttggctgcccaagaagaagctgccaagaagtgacccttgccccaccaactcccagatttcaaaggaggtagttgcaaaagctgtgcccaaggggaggaaggaggtcacaccaatatgatgatggttttcatgactttgaatgatatatttttgtacatctagctgtatcgaggcatcaggcctgaataaacatcctttcttacccactgtcatcttctatcttgggacctcagggaagggaaccagtactggtggtagccaatatgggcagacattaggaaattggggtcttcatactgcttctcagatgtgcaaactgaggttcagccaagcaaagtaacttgcccaggtccttttttttcttttttaagttataattttgttttattgcccaggttctgaattggtgccagaggtaggaatagaacccaggccttctcatttgaaatcctgtgttcttcccctccccagggtgggaactatggttgctagggctgaggtgtattgcttacttcttccatcaaaaatctcttttatctctgaacaacttgccacctctgcagaaacaagtccctgtggagatctcagttcagccccaggcagggttactacatggagtacccagatcccaggggctacttcaggcccttctactaagctcctgaccctggctctgggtcagatgttggctgaacatgaactattgtagggctgacagctacagaccacagaaagagcaaagcttcagtaggttcctgcctgatggagaagtcctcgggaagcccttggccttctatttcctcattgtcctttcagagaagagagcaggagttgggggagaaaggagattcgcatttactgaccatctgttatgtgctagacacttcattttacactgagaaaatatggaaagcatagataaacacctaaaagaaaataaaaacctcatgttatcccaccaaaaaaaaaaaaaaaaaaa

SEQ ID NO: 4177 - DNA, 7782 bp, Homo Sapiens
  NM_016052
actgtcaggtgacgcttccggcgcagaaaaatggcagccgccgctccggactcacgtgtgagtgaggaagaaaacctgaaaaagaccccaaagaagaagatgaaaatggtaactggagccgtagcgtcggtgctggaagacgaggccacagacacttctgatagtgaaggaagctgtggatcggaaaaggaccacttttattctgatgatgacgcaatagaagctgacagtgagggtgatgctgagccctgtgacaaagaaaatgaaaatgatggagaatcaagtgttgggactaatatgggctgggcagatgctatggctaaagtcctcaacaagaaaactcctgaaagtaaacctactattctggtcaaaaataagaagctggaaaaggaaaaagaaaagttaaagcaagaaagactagagaaaataaaacagcgtgataagaggctggagtgggaaatgatgtgcagagtaaagccagatgttgtccaagacaaagagacagagagaaatcttcagagaattgcaacaaggggtgtggtgcaattatttaatgctgttcagaaacatcaaaagaatgttgatgaaaaggttaaggaagctggaagttctatgagaaagcgtgctaagttgatatcaactgtttccaagaaagatttcatcagtgttttgagagggatggatggaagtacaaatgagactgcttcaagcaggaagaaaccaaaagccaaacagactgaagtgaaatcagaagaaggcccaggttggacgatcctacgtgatgatttcatgatgggagcatctatgaaagactgggacaaggaaagtgatgggccagatgacagcagaccagaatctgcaagtgactctgatacataaagcatcataggaaatacaattgcagtcgttttattttttctagaaaaatatgtcatcctctgatagttggggaattataaggataccatttgtaagaaagccaaaagacttttgccagatttcatatttccccttttcatgtacactttatatatacttcattaaaattatattttaaacccttgtataattttaagcattgttcctcagaacatttgtaaaaggatatatttctgcttgaccagcgagatgtgcattttgccaggatcatattggtcatgtctattggtgtattatttcagtatcaccaatgttttcagaaatacagtactaattcatcattaaactctttgaagttaatatttttctgccttctaacttatagactcaactatgtatctgtagtttttgggaatggttggtgttttttgctttgtgttgggaagttattgagaaaacctatataataaaatttaaaattatagtttttcagattttgggtcgtgattttagttttaggtaatctggaagatatgatttaagaaacaacagatttcaactttttttttttttttttttttttttttttttttttttttgagacggagtcttgctctgtggccccggatggaatgcagtggcgtgatctcggctcactgcaagcaccgcctcccaggttcacgccattctcccacctcaacctctcaagtagctgggactacaggtgcctgccaccacgcccagctaattttttgtttttgtatttttagtagagacggggtttcaccatgttagccaggatggtctcaatctcctgacctcgtgatccacccgcctcggcctcccaaagtgctgggattacaggcgtgagccactgcgcccggcccagatttcaacttttattttatttcctttcatttattaaataatataaataatgacagatttattttaggtgttagcctatttttgcatgagagatttacagaggtggaaattctcatgcttaacttatgcaatgagacaatttctcaggaagcaagtttgacatgctttagtctctctcttcttttttttcctcccaaatatttgagttagcttaaattcttttttatggactgcccaaccagtgaattgatgcacttagacaacaagtaatctgcagcagaatattgcatccaatttgagacttgattccatattattgccttaaaggctattaaattgggtgacttttagtatccagctgttaaaaagaggaaagactgtttaatatcattccaaaatttttgtgaaatgtggcccaagatctaaagtttttaagggaattatttttaataaatatgatctgtccctttttgaaaaggatccatcccttttcataataaaaataattccctcctaccacccagttgcacatacttgcatctgttatgtattgaaggataatcccccccaaaaaaactatccaagagcagagatgtttatattttgaaacccatttgagtgttacagtattatatgactaaagctgaatcagtctgtggcctggtatttgttatcataaaggaagatgtacacctaaggtatcaagtggttaaaacagcaaagtacaagatgcatttttgtatttattctaacttttgaacattagtgtctttcagtataaataaatgtgaacaaatatacctcagtagtaatacaggagaactaaatatcctgctataacttaatacagatacatatttcaatatgacttaacaaacacacaattttgaaaaaaaaaaaaaaaaagtgcagcaacttaaacacatttttctccccagaactaagattacacttaatttaatttaatgtgtttctgcgttatactagagttttgcaggaatttttctgaatagtacattcacatgatagatacggataaataccttatttactaaaatgttttgaaacatattttatagtccctcatttgatttgaaaaaatttgacaagatcttcacattgaaagtaaggacgagaatatttgcagatttccttcgttccaaaattattttattccaaagaaaaattgagttgccactatcaggaaaaaaaaaatgtatcacttctgttagaaggctatgaagtatatataaattatatgacaatttttatcatatagatttgatatcttctatgtattcgtatttttgcatcttgggtattaagcaaaataccatatgtataaatatgaaaccaggaatgtgcatattttagaaactaattgtgtatcttaagtgaatgttttgagtagttctgtcacccctattctaaatattttacctacaacatttaaattattctgatatcaatcagataaataatccgagtgtatttcatctttctacattgtctttgtggtttttgtttgtttgtttttgagacggtctcacactgtcacccaggctggagtgcagtggtgcaatctcagctcactgcaacctccacctcccaggttccagctatcctcccacctcagcctcccaagtagctaggactacaggtgtgcaccaccatgcccagctaattttttgtctttttgatgtagatggggttaccccatgttgcccaggctggttgtgaactcctgagctcaagggatccccccgcctcttgcctcccaaagtgcttggattacaggtgtgagccaccataccacctgtctttgaattttttaacgaggggaaagaaaactgcaattcctgcctccccatttatttaaacataacacctaggattttatttttggtaactacttagaataatatagtaggttacttatcttcggttagaaagaactatggaaaataggaaccaataatttggaagtattatttccttatttcatatatagaaataattatcttatttccttatttcatatatagaatattctagatacttggatggctggggttgatgttcttagtatttatcatagtttagcattggttgttatttttaagcatcagaatttgaaagccaatgataatacctgattaggactgaaaatagaattatcttagtagtttagcactttttataatggagttggagcactgaatttattttcaaattacctagaattctgcattgctcaaacattattcaattgattgcaaaatataccttggaaaccctttggatagaacagttcagagggttaccactagtacttagagcctaaagtcactcagtaggaggttctcaaaggtctatttgaaggcaatccaatttctttaaaataaaatattttttgccttttaaaacagatgggtgaagaaagggacgtataaattctgggaaacctcttatgttttcctcccatttccttctatgtctccattaatgtgctaacttgaaggaatttaacttcaaggaaagttgactgatgaagtttatgtagagctgtgaatattataatttgtcaatactttattgataatgttaactttgtttttatttggaaacattttttccagttgaccaaagcagaattcattctgttcttccctcaaattcatctattaggatcaatgtgattgacatttatctccactctgcatgtcactgatatggtatagacgctataagccctgtagatattatgggtatgaagactatttgaggtgaattggcagtgagagcaaattttggaaacaggagagagaactacttcgtgcctataaaaagctctctcactccttccccaagaaaacaggagtctgaattttggccagctgggtatttgaatcttactgactgttgcagcactggtagtcctggtaaattttttcagtgggcgagcttttctgaaatttgattaaacatattagtcaagggaatctgtgaatagatttagaagtagaatgtttgaggtggttgacaagacatttagaattgtgattaatgttttaataaaatgctaagttagaatgaataatcataattatatagatggaagatatattctaacagttcttaaataattttagattctctaaatttagagtgttttctagcttagagagcaatattaatattttttacctagtctactgaacataatttcagggagttagtatttaggactttttacctagagatgcggtaaaccttttaaatttaaatttgctttcttaaaatacctgttccaacattgctcacctttcttctccctcctttttgccctctccttcagtgggaggagcacatattcagctttctgttaaacactctttggttttcaactgagtaaggcaagcaaggatatatgttagaagagtgggcataatactttatattaaaattatagggactaaaagtctaaatcattgctgtcaataggactttttttgatgatggaaataatttatgtctgtgctgttcaatatggtagccactcgcagaggtgactactgagcatttcacgtgtggcttgtgatacagaggaactaaatttttaattttacttaattactttaaattttaaaagttacacgtggctagtgggtctatcccaactatgaagagaataaagctacagagcatctatctagtctaatgaaacaacagtgaatttgggaattgtaaatctgtcttaagctttttccataaacttttattgatataatttaggcatatacaaatactggtgaaattttattgattgaattattgttgacttttttttcagtatttatatttttaaaaagatatgtttctttataattaacttgtattgtagggtaaccattgtccttaaatgttaagccacttagttaataacaaatagcatttggttttttagcattatttatcatctgaggctttcagaattaatgcaccaaaccttaaatatttttgttgttctctaaaagaatgggtttatgatgcaccaaaaggacattttgagaactgccggagcaacagataccaccatgtaaggagtgaattcccatgtttttcacttatatctagaggcctacttatttaggaggtttcctaagtaagtgtatttagttgtaggaccttagagttgcctaggtccattctattctagcatatactcaacatactgccagagcaaatgtaggttgcagattcaggcaaaacacacacacacacacacacaaaaccctgaagagcacaatgagcattattagcacagccaatttaaaatgatgaggtgttaaccacatttgtataaataatagtttctctaaccctgaatcattatcctgcatttttaatgcaatcggttcataaacatcaaagtgaaaacaccaaatttgtaagaggtcaggaccaactggggctctaaatggagagacagctgagagctgtgtccctatgcgtgggtggccttgcagctgttgattcaccctcaggctaccagacagttgcctctttgcatttgcagaaccagacttcaatcttaggtaaaaatgtatccctcccatggacaggacataaacaatagattgacatcagctctgaaaacagtgcagcagccagactcagcagttgccctgaaatactgagaagtaccaagcataacatcaagactgtttctacacaataatatttgtctttgtacagcaacactgggttctcttaagtatattataaatataaaagctcaaagtccaaaaggttcaatgtgatgatatccttctctacaaatgccaggaacaccagggtagattgcatgagacatgactgccgtatcttggtccttactaggattcccaaatatactccttaataaccagtaaagttatatttacactggacattttaagaaataccagtgttcgttgttagatgagagacagcataattttggaatcacaactgagttcagagttcagttttgagtcctactagttttgtttccttgtgtaagtttcttaacctttgtaaggctagcatgtaaatcagatacaataatatatagttcagggtgtaaagattggattaatgtatgcagtgtctatctagcacagtgcctgttatgtagtagcgtgtcaagagatgttctctcttatgcatttggaggattaggtgctgcacctataggtttccattcatttctcatctatgtaattctgagtcttccttttctagatagaattccccccaacaaaaatttaaagtctaacaggtggtaggtgcttattgaggcccagcaattctacttctggaaaccttcctcaggaaaagattctgatgacagaaaatgctgtgtgaacagtattatatagaattgtttttaatagcaagaaattttttaaaacttacaagttcagtgatatgaggacatttacataaactatcgaaccaccagtcttctgtcaattccttttaaaatgatggttgtgaagactgatgaaaacacagtgtcaatgatatgttaactgaaaaagtaagattaaaaacattatggatagtataagtttcttaaatgccaacaatgcatgaggtgaatagaataagacttttttttaaagaatgtaatttttgacagtctgaaaagacaggccttatatttatattgagaaaaatgatcctgacatttaatgagacactaaaacagtttttattttttgcttacttattctgttctagaatccaaactctacatactgtttaatagagcattattgatattagctgtattagatgactgtatgaagagtcctgtttgctagaatcctactttatcttttaagttttgctaattaccctgcaatgaatgttgaacataaaaaatttgactccctttccatgtgtccactgtttccttgtgccttttgattaataaaactttatttttaagtgagaaaaaaaaaaaaa

SEQ ID NO: 4178 - DNA, 923 bp, Homo Sapiens
  NM_016053
agccgccgagtgattagtgagcggagaagctttcttccggcgggaagggccccggaggcgggcacttggggggaaagttgagacgtgattaccgggttgggcgggccccatctgggaggggtttgtgggtgaactcggggtccaccgcccgctgaggagatggatgaggacgggcttcctctcatggggtcaggcatagacctgaccaaggtgccagctattcaacagaaaagaacggtggcttttctaaaccaatttgtggtgcacactgtacagttcctcaaccgcttttctacagtttgtgaggagaaactggcagacctttcacttcgtatccaacaaattgaaacaactctcaatattttagatgcaaagttgtcatctatcccaggcctagatgatgtcacagttgaagtatctcctttaaatgtcaccagtgtcacaaatggagcacatcctgaagccacttcagagcaaccacagcagaacagtacacaagactctggactacaggaaagtgaagtatcagcagaaaatatcttaactgtagccaaggatccaagatatgccagatatctcaaaatggttcaagtgggtgtaccagtgatggcaataagaaacaaaatgatatcagaaggactagacccagatcttcttgagaggccagatgctccagtgcctgatggcgaaagtgagaaaactgtagaagaaagttcagatagcgaatcttcttttagtgattaagcttaattttgataagaattacatatgcatgcataggggtacatttacattctgtaagagattgagcctgaactctcttagtcataaaaacatcaaatggccacatgtccactaccaagcttcttctatgttaaaaaaataataataaagcagttttaacctgccagtaaaaaaaaaaa

SEQ ID NO: 4179 - DNA, 1831 bp, Homo Sapiens
  NM_016056
gggctcttcctcgcggaagtggggaggaggcggttgcggttagtggaccgggaccggtaggggtgctgttgccatcatggctgaccccgacccccggtaccctcgctcctcgatcgaggacgacttcaactatggcagcagcgtggcctccgccaccgtgcacatccgaatggcctttctgagaaaagtctacagcattctttctctgcaggttctcttaactacagtgacttcaacagtttttttatactttgagtctgtacggacatttgtacatgagagtcctgccttaattttgctgtttgccctcggatctctgggtttgatttttgcgttgattttaaacagacataagtatccccttaacctgtacctactttttggatttacgctgttggaagctctgactgtggcagttgttgttactttctatgatgtatatattattctgcaagctttcatactgactactacagtattttttggtttgactgtgtatactctacaatctaagaaggatttcagcaaatttggagcagggctgtttgctcttttgtggatattgtgcctgtcaggattcttgaagttttttttttatagtgagataatggagttggtcttagccgctgcaggagcccttcttttctgtggattcatcatctatgacacacactcactgatgcataaactgtcacctgaagagtacgtattagctgccatcagcctctacttggatatcatcaatctattcctgcacctgttacggtttctggaagcagttaataaaaagtaattaaaagtatctcagctcaactgaagaacaacaaaaaaaatttaacgagaaaaaaggattaaagtaattggaagcagtatatagaaactgtttcattaagtaataaagtttgaaacaatgattaaatactgttacaatctttatttgtatcatatgtaattttgagagctttaaaatcttactattctttatgatacctcatttctaaatccttgatttaggatctcagttaagagctatcaaaattctattaaaaatgcttttctggctgggcacagtggctcacgcctgtaatcccaccactttgggagaccgaggcaggtggatcacgaggtcaagaggttgagaccatcctggccaacatggtgaaaccccgtctctactaaaaatacaaaaattagctggatgtggtggcacacacctgtagtcccagctagtcaagaggctgaggccagagaatcgcttgaacctgggaggtggaggttgcattgagccaagatcacgccactgcattccagcctggtgacagagcgagactcagtctcaaaaaaaaaaaaaaaatttttcttcctaaattagccacgcatagcggttcgtttgcaattcaaaaataattttatgagtagataagaatatcagtttaccgttgtctagtgattttatctaaattttccctgaattattaagtaatattgatttggctttgattctgaagtagtagagtctttaccattataaactgtaaatctctttttgcttaaaaggaaaaaaatgtaaaagataaattccacagagaattattcagtattacattaaaatgttaatgactttttattttaaattgtactaacattaaaagttggcctgaaagtcagatattatgacaaaatttgacattaattgtttttaaagtatagatttcatttgaaattatagaatggtaatgtggttagaggacaccaaagatactgggtcatcagccattaagtatatctatttcaaaattaaaatatttgggaagtaaaaaaaaaaaaaaaa

SEQ ID NO: 4180 - DNA, 1900 bp, Homo Sapiens
  NM_016057
ttttgcggctccacgtcggcaccagctgcggggcaagatggaggcgctgattttggaaccttccctgtatactgtcaaagccatcctgattctggacaatgatggagatcgactttttgccaagtactatgacgacacctaccccagtgtcaaggagcaaaaggcctttgagaagaacattttcaacaagacccatcggactgacagtgaaattgccctcttggaaggcctgacagtggtatacaaaagcagtatagatctctatttctatgtgattggcagctcctatgaaaatgagctgatgcttatggctgttctgaactgtctcttcgactcattgagccagatgctgaggaaaaatgtagaaaagcgagcactgctggagaacatggaggggctgttcttggctgtggatgaaattgtagatggaggggtgatcctagagagtgatccccagcaggtggtacaccgggtggcattaaggggtgaagatgtcccccttacggagcagaccgtgtctcaggtgctgcagtcagccaaagaacagatcaagtggtcactccttcggtgaagacctcactgttcctggctcttcatcctcttcaaaaaatttgcatgtctgctgtgaattttcatctagttccccaatcgatgctctcagggtcatctcggggatcacagggatccttaaatctccattctgtttgtggttgccccctcaacctcccctacacccttcctattctttttcattcttcttgcagttctgggagtaaagctcccagcatatttagataatagggcaggggaagcaccctctttctttctagactggattatgctcacatgctcccttgccctgacatttttgtaaattctgtgccctttgctgtagctacacttcagattaaagtaggagaaagaatgtgctgagtgttttcctccctttgcctctacctggccctcatcccaacagcccagcaaggggagagagaaagagaattcttttctatagaacgagtgggggcggggatgggtagggatttatccaatctaagccctaaccccacttagtgacctcagtgttttcttccattccttcttactgccctgtcctctgccttggaagaggctttgggaatagttcatagggaagggacaacatggaagaaacagcgatttaaattgtattgaacagggcatataaaatgcattctgtaccctgatctggcatatagcttcaaaactgcagtggcgagtgtccatctcttagttagctaccttaactgtccacccttactacctgtgggatcgttgcctggtttgtcttctctgtgtcctggagcaaagccagttcctaaaactaaaactccattctagtcttgggaagaaaagtttctactcagaactggggaaggagtggaacttatgacttgggcctctaggctgtctctgtcccctcagctccccgacatgcatttactctctgccgtgggtctgcagtcgctgcaacctaccctctctctgcctcagccttacacccaagcagtaggtctgtgctctccctgtctctaggtcgctgagagaggtgcttttcttcataaaacctttggggtttggatttccccaggaagatggagaatggaatactcactcttgggtctaatctttccccttgacccagaacttcctccccacaaaaatgcctttaaaaaccttcctgagacttaagcattctgccccacttactaactgccagttctccagcactgaggtggggcagataacggggcatatttaagggggcatctttgtgtaaaagatgcatggagtcaggagaaaaccaccttcataaactgctctgtgcaaagaggaataaaacattttttccaaactgaaa

SEQ ID NO: 4181 - DNA, 1750 bp, Homo Sapiens
  NM_016059
cggtatcgccacttggagaccaccgcgaatgaagtttgcattttcctctgttcttgagcccagcttcttctcgtctcccaccccagcttcccggcattggaagaagggaccgtcctcttccttgtcttggccacccaaatcctggtatcgaaagggttgaacggaccggaagtgtgcagcagcgacgggtccccagctaatcgacgccggaagtagcaattactagacaagcattccgccgccggcttcgctatggcggcaattcccccagattcctggcagccacccaacgtttacttggagaccagcatgggaatcattgtgctggagctgtactggaagcatgctccaaagacctgtaagaactttgctgagttggctcgtcgaggttactacaatggcacaaaattccacagaattatcaaagacttcatgatccaaggaggtgacccaacagggacaggtcgaggtggtgcatctatctatggcaaacagtttgaagatgaacttcatccagacttgaaattcacgggggctggaattctcgcaatggccaatgcggggccagataccaatggcagccagttctttgtgaccctcgcccccacccagtggcttgacggcaaacacaccatttttggccgagtgtgtcagggcataggaatggtgaatcgcgtgggaatggtagaaacaaactcccaggaccgccctgtggacgacgtgaagatcattaaggcatacccttctgggtagacttgctaccctcttgagcagctcttctgagatggccccagtgaaccagcttctagatgacatagaatgacatgtaatgctaaattcattttggctttgcaagtcatgaagcttaggaggcctggcatcttgggtgagttagagatggaagtacattttaataggatgcttcttttctcttcccccagtgcctaggttgccagagcatttgcacaaatgcccctgtttatcaataggtgactacttactacacatgaaccataatgctgcttcttgtgcatgtctgctctgatatacgtcgaacaatgtagcagccactgtcatttctcagtggttttgcctaaccaaacttcttcctaaggagatttatattctggcctacacagcagtccttgatggctgacagccacagaattccaaaccaagtagtgtctgtcagccctcttaactctgtgcacgccctatttcagtcttttacatttgttcttctagggaatgtatgcatctctatatatattttccctctcaaaaccagaacatcaacagtgctgtttctgacacttcagacatcccacgcaaagccacattgaatttttgccaaatgaaaaacacatccaacaatcaagtttctaagaaggtgtcaagtggggaataataataatgtataataatcaagaaattagtttattaaaaggaagcagaagcattgaccattttttcccagagaagaggagaaatctgtagtgagcaaaggacagaccatgaatcctccttgagaagtagtactctcagaaaggagaagcgccactcaagttcttttaacccaagactttagagaaattaggtccaagatttttatatgttcagttgtttatgtataaaaataactttctggattttgtggggaggagcaggagaggaaggaagttaatacctatgtaatacatagaaacttccacaataaaatgccattgatggttgaaaaaaaaaaaaaaaa

SEQ ID NO: 4182 - DNA, 2281 bp, Homo Sapiens
  NM_016061
ggagagctgactgcgggggggcggagccacgccgggtgactgacgttgaggcccaaccagggagaggcggggccaaggccagggcctgactaaacctggagactcgggtggccgaggggcttcataccagctgaagagcgacaagccgctggcagccgcggatctcaccgccgctcagggtttttagaacttcagccataaaaatgggcagaattttccttgatcatatcggtggtacccgtctgttttcttgtgcaaactgtgatacgatcctgaccaaccgctcagaactcatctccactcgtttcacaggcgccactggcagagcatttctttttaacaaggtagttaacctgcagtacagtgaagttcaagatcgggtcatgctcactggccgccacatggttcgagatgtgagctgcaaaaactgcaatagcaaactgggatggatctatgagtttgccactgaagacagccagcgatataaggaaggccgcgtgatcctggaacgtgctctagttcgagagagtgagggctttgaggagcatgtaccatctgataactcttgaagatacagagagaaatccatcttttcccaggtctccttcactgaaaacaaaaatctacttacatacactgtcaccttagcatcagagtcggattaatgaactgcggaacaagaggttgtgagaatctaagatggaacctttctttctttctttctttttttttaaattttgtattttccatccaacagcagtgtgtagagagaatattatgcagatgccgttaattttttaccctatgtttacatcttgaggcagcagagtctgtctgcagctatgtggtgagctatgtaaggaaaaaaatctgggctgttagagtgaaaaagtgtgttttatgtcaattgtgaaaggaaaatgttaggagtatggtttttaaacttgggcttcattttaaacttttttttttaaacccagttatttcacttgatttgctagcttcagagaagagatccgaatctgtgcccagcgctaaaggctcagtgttagcatggcttgtgctggccggtgtgccatattcttgttggagatgaaccgtagcaccagagcccattcttccttgtcagtcttggcccaaagatgtcaccattcctagttatttgtcaccacataattggtgttgattggaaactttttctgagatgggacagaactgctgggttgtctttttccatgtaacttaagcatagtaatataaataaagtaatagttggatgcttttggtcctgtgttgcttttaaaaacaccttataaaagaggagagtatttgataagcaattttcatagtagtaaagttttttttcatctcttaaactaaattgaccatgcatataatattctttgtttaaatgaaagcatactgttgaaacccgcagtgttgcatttagaaaacagttgaacagaatgtcaatgtgcattcatgcaaaaaaacatttaatctgcatctgttttagaaaagggggaaatgaagcaacttgtctaaaaatactgctttacaaagcatttcagcctttccccctcagttttgcattgattttttgacaagtctgtagagcctaatagtttccatcaaaggcctagatctcttatttagcatttttttcagctcttctctcagaagttcagctgttgaaacgaaaactgtactttgtaccctcacatacaaagggatcaaatttgacctggtgttattttagccccaaatttatgacattacacaatattaaaatgtaaatgtttctttacccaaactacttctagatattctagtatttgcttctggtggaattaaatgacggtaaaattggctaattatttgaatgaatgaatggatggatgttttgcatgctcaatttctaggtcctttgtctagaaaggaaatttgcctcagttgaattagtgaaatatttctgtcgttgatattaaaagtgacttctgagtacagttaagttcctcctatttgccactgggctgttggttagaagcataggtaactgattaagtaggtatgatactgcatttgaaataagtggacacaaactatcctttctccaccatggactcaatctgagaacaacagcattcatttccattcatttccatactggcttttgattatatgcagattcctagtagcatgccttacctacagcactatgtgcatttgctgtcacaataaagtatattttgtcttgcaaaaaaaaaaaaaaaaaaaaaaa

SEQ ID NO: 4183 - DNA, 1615 bp, Homo Sapiens
  NM_016063
gaagtgggggaggaggaggaggagttggaaggggaggaggaagagggggagcaggaagaggggcagaaggaagaagaagagggggaggagaaagagatagaagagtaagaggagggggaagaaagacaaggggaaggggaggaggaggaggacggggaggagcttcgccgcggcctgctccgcccagccggggtcggtggccgcatggcttcggtctcctctgcgaccttctcgggccacggggctcggtccctactgcagttcctgcggctggtagggcagctcaagagagtcccacgaactggctgggtatacagaaatgtccagaggccggagagcgtttcagatcacatgtaccggatggcagttatggctatggtgatcaaagatgaccgtcttaacaaagaccgatgtgtacgcctagccctggttcatgatatggcagaatgcatcgttggggacatagcaccagcagataacatccccaaagaagaaaaacataggcgagaagaggaagctatgaagcagataacccagctcctaccagaggacctcagaaaggagctctatgaactttgggaagagtacgagacccaatctagtgcagaagccaaatttgtgaagcagctagaccaatgtgaaatgattcttcaagcatctgaatatgaagaccttgaacacaaacctgggagactgcaagacttctatgattccacagcaggaaaattcaatcaccctgagatagtccagcttgtttctgaacttgaggcagaaagaagcactaacatagctgcagctgccagtgagccacactcctgagacactctctaaattgctgcactcctgtaacaaacattatttttccatttcattgtattgtgttttgccattgttggtctgttgatttccctagatgtgagtctgtttgttttcaattgtctgaacttcagcaagaaatgtgatacaacttgggcactaaaagaagccacagaacaggaagcggtcatgaaagtgccatggatgaacactggaggtggcagtgcctgtttatgaactaaataaataaatattaaacacctaaaatattagaatatttattggagatttaaaatcatcttattctgacttaattaccgatatccccgaaggctaggttcattgaataatagaaaatttcattatgattgcttttaagaacagattcttcagctgatttagtgataagaatccagaaaagaaaatgtactagtgatgtattctctccccagatgaaattgctgccttattcagatttactctcttgagccagattttgaatttcactgcagactgcttcagacttctaatcataggcttgtaaacctactaataggctctgcccctcttcccaatactttttgtcatttagagatataaaccggggcatataaaaatgcaacttgtattcctttgtatatttttccctgtctgacttataaatcttgagacctttattgtaaaagcatgtatcatcaggtgagaaatataaataggaactggggtcattgagcctcaggtagggaatatatcaacccgatttcttcctctcttttcccttttataggataaataatcc

SEQ ID NO: 4184 - DNA, 1121 bp, Homo Sapiens
  NM_016067
agcgttctcctgcggaacctttgaacggggtactcgagcccacaggggaagagcagcggaaggggcctttcggaacgatttggaacgaaaggaagtggaagaaacgcggaaccatggccgctgtggttgctgtttgcggtggtctagggaggaagaagttgacacacttggtaacggctgctgtcagccttacacatcccgggactcacacggtgctttggagaagaggttgttcacaacaggtatccagcaatgaggacctgcccatttcaatggaaaatccttataaagaacctcttaagaaatgtatcttgtgtggaaagcatgtagattataagaatgtacagcttttgtcccagtttgtttctccatttactggatgcatttatggaaggcacattacaggtctttgtgggaagaaacagaaagaaatcacaaaagcaattaagagagctcaaataatggggtttatgccagttacatacaaggatcctgcatatctcaaggaccctaaagtttgtaacatcagatatcgggaataaattctatcacgttaccactaataaacttattttacagtaagtggttgtatgatgccaatactgactcaaaccaacctttggatagaaaagtgtttgaggagtgaggtaaagaatgacacttccccttcataccaatgtccattaagcagattgcttatttaaaatgttaacactcatcacattttatctatgttgaataaaagtggttctgtgtgattgtcatttatatctgatccccaaatagctcatacaataatccattcaatagaatggaattaaaactgttcagaatgattttccaactagcaaatataagtatgcctggttaagatatcttccctttgtagaaatgttacattgggatggatagtggtgctgtcacagaaggacaaaatattcctagacgagtctaccctcaaaccagtagtgtcttttacatgaagagatgatttacacctaatagacattgaatatgatagacatacatgtatatatgtatcagttctgagttccactggcctatcccaaatacactggattaccaggcttgtactgtattcaaaatgatagatttgctaa

SEQ ID NO: 4185 - DNA, 600 bp, Homo Sapiens
  NM_016069
ggcaatgcgcatgcccagcgccgtatcgcgcacgcgctctctgcggctttccttgacctctgacccgccgaccacgcttgatccccggccgcggggccaggaagtcggagtttgagccccggaggcagagcggctgccatggccaagtacctggcccagatcattgtgatgggcgtgcaggtggtgggcagggcctttgcacgggccttgcggcaggagtttgcagccagccgggccgcagctgatgcccgaggacgcgctggacaccggtctgcagccgcttccaacctctccggcctcagcctccaggaggcacagcagattctcaacgtgtccaagctgagccctgaggaggtccagaagaactatgaacacttatttaaggtgaatgataaatccgtgggtggctccttctacctgcagtcaaaggtggtccgcgcaaaggagcgcctggatgaggaactcaaaatccaggcccaggaggacagagaaaaagggcagatgccccatacgtgactgctcggctccccccgcccaccccgccgcctctaatttatagcttggtaataaatttcttttctgcaaaaaaaaaaaaaaaaa

SEQ ID NO: 4186 - DNA, 748 bp, Homo Sapiens
  NM_016071
gcaattactctcttccatattggttaacagtagaaggctcagtttctctgctcatcacacggccttcggcactgtagctttgggtggtgggctgcagattaattttgtaaccaccttaagaaaaatacggaactctaactccttgccactcaagaaatgtcctccctttcagaatatgccttccgcatgtctcgtctcagtgcccggctatttggtgaagtcaccaggcctactaattccaagtctatgaaagtggtgaaactgtttagtgaactgcccttggccaagaagaaggagacttatgattggtatccaaatcaccacacttacgctgaactcatgcagacgctccgatttcttggactctacagagatgagcatcaggattttatggatgagcaaaaacgactaaagaagcttcgtggaaaggagaaaccaaagaaaggagaagggaaaagagcagcaaaaaggaaatagtgttggtccctcaagagggagactttcttcctcagtggcggagagaagaaagtgcatttattgtctttccacctattggaggaatgtcatcttcctaaatgaagtttatttggaggaacacagtcatctccttggtgaaatctaatccggttacattgtggctggtttcttgaacacattctaactgtgcaaaattatcttggccttggccgtgtaatgtgaggtttacctgattctctaatgaaataaatacctaagttattgtttgaaa

SEQ ID NO: 4187 - DNA, 872 bp, Homo Sapiens
  NM_016074
tgcattttgctccggagcgtccagagtcctggccctgagcgggaatcgcagtggccgaggctgagcggcaggcggatcgccccgaccctcactcctggcgtctgagtctctggcgtagcccatgctgagtgggcggctggtcctgggtctggtctccatggctggccgcgtttgtttgtgccagggcagcgcgggatccggggccatcggtccggtggaggccgccattcgcacgaagttggaggaggccctgagccccgaggtgctagagcttcgcaacgagagcggtggccacgcggtcccgcctggcagtgagactcacttccgcgtggctgtggtgagctctcgtttcgagggactgagccccctacaacgacaccggctggtccacgcagcgctggccgaggagctgggaggtccggtccatgcgctggccatccaggcacggacccccgcccagtggagagagaactctcagctggacactagccccccatgcctgggtgggaacaagaaaactctaggaaccccctgaaccccaagagagggaggaccaggatccgaatgggctgggtgagcacgaattaccgaggccttccctttgatacagtccaggatttgtaagggatgaagacccctgggccccattctgttggggtccatacatactctccgaagatagcaacttgcttcaggtcaaagtgaacccgagaaaagagaagaatcactcactactgctcttgccctggactattcaggaagggcagcccggatgttccatgttaaatcgtgacagaattgcaccagacctgatgagttggaaacaatcctatacattaaaagaaattacactatgaaaaaaaaaaaaaaaa

SEQ ID NO: 4188 - DNA, 4427 bp, Homo Sapiens
  NM_016075
ggcctcggagggccggggctgggtggcagcggccatggaccgcttcgtttggaccagcggcctcctggagatcaacgagaccctggtgatccagcagcgcggggtgcgaatctacgatggcgaggagaagataaaatttgatgctgggactctccttcttagtacacaccgactgatttggagagatcagaaaaatcatgagtgttgcatggccattctcctttcccaaattgtgttcattgaagaacaggcggctggaattgggaagagtgccaaaatagtggttcatcttcacccagctcctcctaacaaagaacctggcccattccagagtagtaagaactcctacatcaaactctccttcaaagaacatggccagattgagttttacaggcgtttatcagaggaaatgacacaaagaagatgggagaatatgccagtttcccagtcattacaaacaaatagaggaccccagccaggaagaataagggctgtaggaattgtaggtattgaaaggaaactggaagaaaaaagaaaagaaactgacaaaaacatttctgaggcctttgaagacctcagcaaactaatgatcaaggctaaggaaatggtggaattatcaaaatcaattgctaataaaattaaagacaaacaaggtgacatcacagaagatgagaccatcaggtttaaatcctacttgctgagcatgggaatagctaacccagttaccagagaaacctacggctcaggcacacagtaccacatgcagctggccaaacaactggctggaatattgcaggtgcctttagaggaacgagggggaataatgtcactcacggaggtgtactgcttagtaaaccgagctcgaggaatggaattgctctcaccagaagatttagtgaatgcgtgcaagatgctggaagcactgaaattacctctcaggctccgtgtgtttgacagtggcgtcatggtaattgagcttcagtctcacaaggaagaggaaatggtggcctcggccctggagacagtttcagaaaagggatccctaacatcagaagagtttgctaagcttgtgggaatgtctgtcctcctagccaaagaaaggttgctgcttgcagagaagatgggccatctttgccgtgatgactcagtggaaggcctgcgtttttacccaaatttatttatgacacagagctaagggttttgtatttaaaatcctttttgtccatatgcttgcgtcatgtagaggttgtatgacattgagctaagagataaaccccgatcaattgagaatttattggaacttcacagtgcaatgtaaatctcttttaatttctcactaaatatggtccaggaaatttatttagtatacgcataggaaaattcagaaaagtgaatgccaatatgaatttaaaatcatgctatagtgcagaaccctcagagtttaacttggaatatagtggattttaacttgatcctcaaatctaatcattttataaagaagggaatttagttttgcagagaataaaaagagaagttgcatgttcagacaggttagattattattttggtgtaactgaaattcactgattgcacatgacaatgttgggacaaaatatactgcagcatgctatatgaggctcctccccagggcttttagaagcagtcatagacatgtcttcaacataccaaataaaatacctttaaaaatgaaataattttatttgacacatatatttatatatattctatctagtttctctttgtttttttaagtgatgatttcatgactggcatttaaagaatgcaactgtgtcattttgtttccaaatgctgtggattttgaaactgaactagagagctgtatagacatgcccagagttatgattacaaatttaggaggtagacggctcaggaattccctgggattgttgtgctggtggaatggcagagggaacttcacaggaaccttagtgttcttttacctcaaagccacagacaggaaatagaaagtggaaaagtaatatctccttttcttttccataaggagtttcaacactgaactttaaaaagtctatcatattccagcaatattttttctttgtcctttatgttgtaagttgtgtggaaaaactacttcggtaagaaatgttactgagataacaacaactggctaatactgcatgtagattgcttaggttttaaagtgactgcctgacttcacatgttattgctacagcctccagtatgttcgcattatctcaaactcagggaccccacaggacaggagacaccctttctgaaactgagttggaagtgaaagggtggtgatggttttggccaagcctgcgggagggaaagtattgtattgggagcacccttgggaccaggaagagggatgcccaggttcacactctgggacccctaagacattgtcagtgggtaaggtggagggccactgccagaggctgctgcagtgccctctgggaagtgccagggaccctcagctgcagacccaggggatcccaatcccttatctctgcctgaaaagtggctattgctgcttcgtatcctccagtgtcacaggaatgctgtgcctgagacatcccactttagtttttgttttccaaacctgtcactgactcttcattgtggtgacagatcctctggttcccccattgctcagcctcaggtttattttgagggtaactcagtgtctgactgcccaagtcttttaggggttagttggaccattgtgtaagcttgtttgtatgtctcacctctttctggttggtacttactgtctcacactgctctggcaaacttgtacacacacacacactctctctctctctcacctggctaaggcttttaaaattatgaagataaataatctgtttcaccagctggagtgagttgcaaggaagattgctggagctactcaatctagcgctaatggtttggattcattactgcaaacctacataatttaacatatttgtttactttagtgtgacaactgatgaaaaaaaatggagcaatctgaattgtataaaataacttaagaaggaagaaaagtgatatataaatatattttgcaaatgtcacattaatttaaaaatgagtatgattgattttatttttaaagtgggcattcttcactgtttcgagacctttgtatgtatttgtgtatttttatctttttttttcaggccattattataaggtgttattttggccctctaatgtagaagttatgtttaaatacaaccaatcaggccctaagtgcaaaaaagttctgtcttggtgcttatcactggtataattattatttttttgttttcctaactttgctcttaggagcatgagcctctttgtagctttatggtaatgcaatatttctggtcatttactgtcaaaaaatttttttacattgtgttagtgaagactgtgttttcagggttaaatgattggtatcaatgtatatagagtaaaattattgcaaaatttaaaaatgatttttcttggcattctttttaaatactctgaaacatatatgcaaatgagaaacctttaatcatactaaagccagttatgttaagaatttttcctttggattttataattaagagttgcttataaatacttatgacattgagctcttactgttttagttgtcttaaaacaatgggacatgtcatgaactggtttctttttttaaaaaattcttgatgtgaattccactgttacctgaccatgtatattcagatgaatgtactctttcttgttccttgttaccagattaatctgagagaatgtggattcatcctgtcatctttctcatactcaaatacttaaaatggttcttttgcccaaaagtctcagagtcttcattttggtacagtggagtcacaacttgtaaggtggttaggttttaaagaccgtgcctaaggacaaaattgagcatgctcagaatggtccttgaaaatctcctaaattaccaataaatttctctttgtagtcttaaagtttaaatccctgtggagtgatatgtaggtatgaatatattatgcttatattaagtacaaaaatacaaactgcatatcaagagattcttatagcattaataatttccatgcatgtgtctttttccagtaggtatggttgaatttatgtaaatttattgctaatcccatcccttacgatctagagtataagctgcgcaagggcagaagtttttatctggtttgttcatggatgtattctaagagctgagaacagggcctggacacaataagcattcaataaatatttactgaatgaatgaactcctacctatattcctatttataatttggctccactttatcctactttagctcccattcaattcaataaaaaaaacatttttttgaacacatagcaaaaaa

SEQ ID NO: 4189 - DNA, 1863 bp, Homo Sapiens
  NM_016080
agtgacgtcacggcccgtggcgcccttcgtggactgggctgtacggtgcgcgtgacggctgcgtgcggcgggaatcatggctgctcgcagagctctgcacttcgtattcaaagtgggaaaccgcttccagacggcgcgtttctatcgggacgtcctggggatgaaggttctgcggcatgaggaatttgaagaaggctgcaaagctgcctgtaatgggccttatgatgggaaatggagtaaaacaatggtgggatttgggcctgaggatgatcattttgtcgcagaactgacttacaattatggcgtcggagactacaagcttggcaatgactttatgggaatcacgctcgcttctagccaggctgtcagcaacgccaggaagctggagtggccactgacggaagttgcagaaggtgtttttgaaaccgaggccccgggaggatataagttctatttgcagaatcgcagtctgcctcagtcagatcctgtattaaaagtaactctagcagtgtctgatcttcaaaagtccttgaactactggtgtaatctactgggaatgaaaatttatgaaaaagatgaagaaaagcaaagggctttgctgggctatgctgataaccagtgtaagctggagctacagggcgtcaagggtggggtggaccatgcagcagcttttggaagaattgccttctcttgcccccagaaagagttgccagacttagaagacttgatgaaaagggagaaccagaagattctgactcccctggtgagcctggacaccccagggaaagcaacagtacaggtggtcattctggccgaccctgacggacatgaaatttgctttgtcggggatgaagcatttcgagaactttctaagatggatccagagggaagcaaattgttggatgatgcaatggcagcagataaaagtgacgagtggtttgccaaacacaataaacccaaagcttcaggttaacggaagacatgatgcagagcaagcctctgtgattcctgcccagcacctgtgaggcctgacgtgtcagttcccaataaatgctcttctgatttgtttcccgtacaggcaaggaggcttgggtagtgcagatttgtgtatttcaatctttgaaagctctgatgtaatttagaaatgaaatccaatcatgagtccaggtagagaacgcctgctgtaatctacactgttgctgggactgcgcattctgtatataactgtgttggatgagtgacagatgattgtccagactaggacagcggcatgaacatgactttggttgggattgcggatagttagggttacctctgaatcgtgtagcttttatgagagcagctgtgcaagtgaatccacattaatgccttgtcgtggtgccattcccagcgcctgacgatacgctcttctattgtcttattctggcaggttttgacgttttaaattttttaaagaaattttattccttggaccaaaaggtttggttaaccacccccctcttacttgctttcacattttgagtgtccagaggaaacagaaaggaatgagtgtgtgacgttgctgcacgcctgactctgtgcgagcttctttctgtgtatatattttgttttatttttttccgtgtatatttttaatcccgacagaacatcatgtgagatttctttaaaatggattaaacgatttcttcagcctgaaaaaaaaggttttgaaaatgttttcttgtagttttgtttggttctaaacaacaaataggttttaatcactcgaaatggaattatattgtgtattcattgaataaattttttttgaaagtaagcttctgaaatcaagctgtgaaaaaaaaaaaaaaaaaaaaaaaaaaa

SEQ ID NO: 4190 - DNA, 5809 bp, Homo Sapiens
  NM_016081
gtgaccacggaccaggcagtctctaatgaataggcaaggccacaacctccattctcccagaaaagaagaaatgctcatctgaaattcatcacctctctggagtcttcaaactgaccaagcattgaaaagaacacagtttcagaaaacagtttccagtgcctctggccttcctactgaaagcagacacagagtgcatgaagaccgttcaaatatgtcagggacctcctcccatgagtccttctatgactccctctcagacatgcaggaagaaagcaagaatactgacttcttcccgggcctttctgctttcctcagccaggaagagataaacaagagtcttgacctggcccggagagccatagccgactccgaaacagaagattttgactcggaaaaggagatctcgcagattttcagtacttctcctgcaagcctctgtgaacatccttcccataaggagaccaaattgggtgaacacgcctcgaggagacctcaggataacaggtcaacacctgtccagcctctggcagagaaacaaactaagagtatctcttcacctgtttcaaagaggaaacctgccatgtcacccctgctcaccaggcccagctacatccggagcctccgaaaggctgaaaagcgtggtgcaaaaactcccagcacaaacgtaaagcccaaaacgccacatcaaagaaagggtggcccccagagccagctgtgtgacaaggcagctaatttaattgaggagctaacatccatatttaaagccgcaaagccaagaaacagaagcccaaatggggagtcctcgtcaccagacagtgggtacctgtctcctaaaaatcagccgtcagccctgctgagtgcctcagccagccagagccctatggaagaccaaggggagatggaaagagaggtcaagtcccctggggccaggcattgctaccaggacaaccaggacttggcagtgccacacaaccgcaagtctcacccacagccccacagcgccctccacttcccagctgcacctcgattcatccaaaagctgaggagccaagaagtagcagaagggagccgagtttatctggagtgtagagtcactggaaaccccactcctcgagtcagatggttctgtgaagggaaagaactgcacaacactcctgatattcaaatccactgtgagggaggggacctccataccctgatcatagcagaggcctttgaggacgacacaggtcgctacacctgtttggctacgaatcccagcggctcagacacaacatctgctgaggtgttcattgaaggtgccagttcaacagattctgacagtgaaagtttagctttcaaatcaagagctggagctatgccacaagctcaaaagaaaacaacttctgtttccttgacaataggatcatcatctccaaagacaggggtgaccacagctgtgattcaaccactgtctgtccctgtgcaacaggttcacagtccaacttcatatctctgccgacctgatggaaccactactgcctactttcctcctgtttttacaaaggaactgcaaaacacagccgtggcggaaggccaggtggtggttctggagtgccgggtccgtggggcaccccctctgcaggtccagtggtttcggcaagggagtgaaatccaagactctccagatttccgaattctacagaaaaaacctagatctacagctgaacctgaggagatttgcaccctagttatcgctgagactttccctgaagatgcagggatctttacatgttcagcaagaaatgattatggatcagcaaccagcactgcccagctggttgtcacctcagccaacactgaaaactgtagttacgagtcaatgggagaatccaacaatgaccacttccaacactttccacctccccctccaatcttggagacaagttccttggagttggcttcaaagaaaccatctgagatccagcaggtgaacaaccctgagttaggcctgagcagggcagcccttcaaatgcaattcaatgctgctgagagggaaacgaacggagtccatcccagccgtggagtaaatggactgattaacggcaaagctaacagtaataaatctcttccaacaccagctgtcctgctttcacccactaaggagccaccacctctgcttgccaaaccaaaactaggatttccaaagaaggccagtagaactgctagaatagcctccgatgaggaaattcaaggcacaaaggatgctgttattcaagacctggaacgaaaacttcgcttcaaggaggacctcctgaacaatggccagccgaggttaacatacgaagaaagaatggctcgtcgactgctaggtgctgacagtgcaactgtctttaatattcaggagccagaagaggaaacagctaatcaggaatacaaagtctccagctgtgaacagagactcatcagtgaaatagagtacaggctagaaaggtctcctgtggatgaatcaggtgatgaagttcagtatggagatgtgcctgtggaaaatggaatggcaccattctttgagatgaagctgaaacattacaagatctttgagggaatgccagtaactttcacatgtagagtggctggaaatccaaagccaaagatctattggtttaaagatgggaagcagatctctccaaagagtgatcactacaccattcaaagagatctcgatgggacctgctccctccataccacagcctccaccctagatgatgatgggaattatacaattatggctgcaaaccctcagggccgcatcagttgtactggacggctaatggtacaggctgtcaaccaaagaggtcgaagtccccggtctccctcaggccatcctcatgtcagaaggcctcgttctagatcaagggacagtggagacgaaaatgaaccaattcaggagcgattcttcagacctcacttcttgcaggctcctggagatctgactgttcaagaaggaaaactctgcagaatggactgcaaagtcagtgggttaccaaccccagatctaagctggcaactagatggaaagcccgtacgccctgacagtgctcacaagatgctggtgcgtgagaacggggtgcactctctgatcatagagccagtcacgtcacgtgatgccggcatctacacatgtatagctaccaaccgagcaggacagaactcattcagcctggagcttgtggttgctgctaaagaagcacacaaaccccctgtgtttattgagaagctccaaaacacaggagttgctgatgggtacccagtgcggctggaatgtcgtgtattgggagtgccaccacctcagatattttggaagaaagaaaatgaatcactcactcacagcactgaccgagtgagcatgcaccaggacaaccacggctacatctgcctgctcattcagggagccacaaaagaagatgctgggtggtatactgtgtcagccaagaatgaagcagggattgtgtcctgtactgccaggctggacgtttacatttctcgacattaatagtgaaccacaccaggagaacaaatacccaacccagtggcatcagcagtcacagagcaccaagccaaaaaaagtacggccctcagccagtcgctatgcagcactttcggaccagggactagacatcaaagcagcgttccaacctgaggccaacccatctcacctgacactgaatactgccttggtagaaagtgaggacctgtaatccagcattcttgttaaagctgaaacactgaaacagccattgccttgaccaacatattcctttgtcacattatgtaaaaggcagaaacatacctttgactataagaaattaaaaaaaaaacaccaaaataatatttttcttacttgatataccaaacttagtttaagtagataatgctaatacaaatatacacattgcacagaaaatacacatttactgtccaatttaaaactttggaattgctgtgattaaagtgatcaaaatgccaaaatactaaaggaaatcaattgttcacaggtaactacaatttgtattatctacaagtgcctttaaacacaagatataggtgctgtgtagcctgatagtgtgaaatgtttaatgagggagttgtaccacaaacagtactacaatgattctgaagcacagtgtattcagacagatacagtgaaccaagtgcaatatgtaaggatgaaagaagaagagatgacaaagaaatccaagtaaatgccttgtctttgcaaatgtttttatattaaatcataaggaaggaactacttgccttaaatgttaatatcaaaagagttttctaacaaggttaataccttagttcttaacattttttttctttatgtgtagtgttttcatgctaccttggtaggaaacttatttacaaaccatattaaaaggctaatttaaatataaataatataaagtgctctgaataaagcagaaatatattacagttcattccacagaaagcatccaaaccacccaaatgaccaaggcatatatagtatttggaggaatcaggggtttggaaggagtagggaggagaatgaaggaaaatgcaaccagcatgattatagtgtgttcatttagataaaagtagaaggcacaggagaggtagcaaaggccaggcttttctttggttttcttcaaacataggtgaaaaaaacactgccattcacaagtcaaggaacccagggccagctggaagtgtggagcacacatgctgtggagcacacatgctgtggagattgcagtgtgtctgaggtttgtgtagtagtggaagattttaggtatgtagagcaagttgaaaatggattgagactgcatggtggcataaatgagaaattgcctgtagcatctagtctacttgaaggaagtggagacataaggagagacaaaaacaggtttgtgccataaagtattttttcaaagacaccaagatgtggtaaatgaaaattattagttcacttccctgctgccatgaaactttgccttaagaaggtgctggattccaaggtttgtaaaggcatctcggtaaagactgctttttgaatgcatatgattttgcatcagctagactgagttgattctgaccagacttgatggttttaagtcggaaccgataaattttaaaaaggagaaaaaataatttgacctagtagtataaaacatgaggctttaatggtactttgctatgaaaagaaaacactgtattccttatgcaaaacacatgtatctttcattatttataagtggcctctcttagctcagttactcaattcatacgtagtattttttaaaataattttatatctgtgtaccaccccatatatttcatattactgtttcacatgtacagctttctacttctttgtaagaacaccaaccaaccaaggtttaagtgattaataggcttgagcaccgggtggcagatgttctatgcagtgtggttcaagtttctttgaccgcacttatatgcattgctaatatggaatttaagataccatacacagtctctcatggacctatctctattgtagaattatgacttatgtcttacttgccaaatttttctgaatgtgacctttttttgctgatttgctgggtttgggattaactagcattattttgccacctttatattgtatttataaaaaaaaaagtactatcaatcaatcatactactttggattgttgtgctggtgtaatgtggatttaacatcaataaatatttgacaaataatagttgcagttttgtgaagcaaaataaatattcagtttta

SEQ ID NO: 4191 - DNA, 5732 bp, Homo Sapiens
  NM_016083
gcgccggcgccgcctcccgcacgctactccctctgccaccccttccttctccacttcttttccgcctccgcctcttcttgtctcccgcggcgccagcgccttcccttggcccgggcgggggcctcggctccctgcagagctctccgtagtcagtgggggatatttcgttctagcggacaaccagcccctgagctgggcgagaggtgccaagggagcttctgtcccgaggaccaggggatgcgaagggattgccccctgtgggtcactttctcagtcattttgagctcagcctaatcaaagactgaggttatgaagtcgatcctagatggccttgcagataccaccttccgcaccatcaccactgacctcctgtacgtgggctcaaatgacattcagtacgaagacatcaaaggtgacatggcatccaaattagggtacttcccacagaaattccctttaacttcctttaggggaagtcccttccaagagaagatgactgcgggagacaacccccagctagtcccagcagaccaggtgaacattacagaattttacaacaagtctctctcgtccttcaaggagaatgaggagaacatccagtgtggggagaacttcatggacatagagtgtttcatggtcctgaaccccagccagcagctggccattgcagtcctgtccctcacgctgggcaccttcacggtcctggagaacctcctggtgctgtgcgtcatcctccactcccgcagcctccgctgcaggccttcctaccacttcatcggcagcctggcggtggcagacctcctggggagtgtcatttttgtctacagcttcattgacttccacgtgttccaccgcaaagatagccgcaacgtgtttctgttcaaactgggtggggtcacggcctccttcactgcctccgtgggcagcctgttcctcacagccatcgacaggtacatatccattcacaggcccctggcctataagaggattgtcaccaggcccaaggccgtggtggcgttttgcctgatgtggaccatagccattgtgatcgccgtgctgcctctcctgggctggaactgcgagaaactgcaatctgtttgctcagacattttcccacacattgatgaaacctacctgatgttctggatcggggtcaccagcgtactgcttctgttcatcgtgtatgcgtacatgtatattctctggaaggctcacagccacgccgtccgcatgattcagcgtggcacccagaagagcatcatcatccacacgtctgaggatgggaaggtacaggtgacccggccagaccaagcccgcatggacattaggttagccaagaccctggtcctgatcctggtggtgttgatcatctgctggggccctctgcttgcaatcatggtgtatgatgtctttgggaagatgaacaagctcattaagacggtgtttgcattctgcagtatgctctgcctgctgaactccaccgtgaaccccatcatctatgctctgaggagtaaggacctgcgacacgctttccggagcatgtttccctcttgtgaaggcactgcgcagcctctggataacagcatgggggactcggactgcctgcacaaacacgcaaacaatgcagccagtgttcacagggccgcagaaagctgcatcaagagcacggtcaagattgccaaggtaaccatgtctgtgtccacagacacgtctgccgaggctctgtgagcctgatgcctccctggcagcacaggaaaagaatttttttttttaagctcaaaatctagaagagtctattgtctccttggttatatttttttaactttaccatgctcaatgaaaaggtgattgtcaccatgatcacttatcagtttgctaatgtttccatagtttaggtactcaaactccattctccaggggtttacagtgaagaaagcctgttgtttaagtgactgaacgatccttcaaagtctcaatgaaataggagggaaacctttggctacacaattggaagtctaagaacccatggaaaaatgccatcaaatgaataatgcctttgtaaccacaactttcactataatgtgaaatgtaactgtccgtagtatcagagatgtccatttttacaagttatagtactagagatattttgtaaaatgtattatgtcctgtgagatgtgtatcagtgtttatgtgctattaatatttgtttagttcagcaaaactgaaaggtagacttttatgagaacaatggacaagcagtggatacgtgtcaatgtgtgcactttttttctatattattgcccatgatataactttagaaataaaccttaatatttcttcaaatatctctatttaattttgacactgaaataaccgtaaaggtttatttttctgttacctcaacaagaagaatttgaagacttcaaaatattgagcagaattcattcatacttaaaaatttattagccctgcattttcataggaagacacattatcttctggactatagctgttctaatggattataatcagaatggaagagagaaagcatattgactttttttgagcgacatctctgactttctttagtctttagctattactggatctcttaagacagcatgtgttaatcttaatgtatatcgttatcactgtgcagttgctgtttacttgaatagtattgtgttcctatattccaggtttaagtagatttcatgcctgggtggccaaacaacagtcttcattttttttaattgaaaagaagtagtgtctggatcagtaaaattatactgtgtgtgagtgtgaatataaatgtgtgtatgtgtgtttctgtcctgtaactgttacagtaatgtcataaagtgagaaaactgtgaccaagtataaacttttaccacttgctgcactcttgcacatggattcagtttctaaaattgagttcttcctgtaatcttgttgataaaaatactgactccaaccattcaaaaatttcaccccatccctccttaagagattggatcaagtattactaaattgacctttaggtattacacaagaccagtgcttagcaaaaaataatgacaggcatccaaggaagggatgtatttgtagtgttattgccaggaaaggagagtactttggtttctgagcaccgaatattgagcaatatgtcagtcactaaaaggaagacagttctacagaaaaacaatggtaacatttttcaatagcgtgtgtagatagtatgcactatatacatcacgttaaagtaggactatcacacccagcccatgtggctaaaaaagctgaatcagacagtggatgagacacacaacggcagtgaagaaccgatacacttggcattgacgtctagctatgctgtatctgtgctttgcccacatgcccttggtgacagctgagcacccagctctgtcttggtaggtttgggctaaggaacaaatctctcctttgctcgtggttagcaagatacactcaagcatgaagataaacacagctgctttcttcttacaccccggtctcatgctccttaatggcgccatgggtgcttgttgggcctttttccagtaaggaatgatattgctgaagaatctacttaaccctgacaaattttaattataatctcttcttatacagataaaacatgactcctacaaggccccaaggtttacatagtctgaagtgaagtacagagctggcatctatctggtgatttctagctctcgagatacccaagcagcctgatggggcagttccccttcttacggttcacgctctaaggcaggatgtggcttatgagatactttgcattgtctgtctgcacaccttgaatctgcctgctggctcccttactttacctctctgtcatgtgcagatgaaggctcagggtgctagaggattagtaagatctctttctaaagacaggagagattatttacaagaagaactcaccagggtttagtttgcatttaagaattgccagtcttttgtcctgcatcatcttgaacattaatccacatgtttcagagctcaccaggcagtaccaatgctcttttcacagctatgaagagctagagaaattcttgttatggtagaaaaatttcacgattcatttttgaaactgcatttgtgcgtatgcagtgtagattttatagtgtgttgtgctttcaagatctaaatcatatataataaattaagggacaatggggctgacagcactaaacttggtgcttattgatattctaagaaatatctgtgaaatatcatcacgtatgttatacaaccttcatttaaaaaggtttaaaactagttagattcactttgacacttttcatatcatttcttaacccaagtgacgaaaacattgtccccaatgaatatactcattagaattaccatttgttaatatcactcattaattaaccccataattagatccattaatttaaatgatttaaatttaagtaagttttataaggtctgacatcagaggtatcttactttcctctgaggatgatgtacttgccctgaccatgcattttaccatcacacatgttcagaaagggccaaattcccaacctgctcattttttttttatcagagtcatgatgaatcagtcctagaatgtttcatttgcacaagtagggctgcctccaagaggaacctctgatttattttgtatgaaatatatgtgaaaggatatgaatctgagagatgctgtagacatctgtcctacacttgagatgatttccaagcctctctggcactttgagttaagtctatctggtattaaatgccaaggaccttttgctgcctaaatccactctgcaggaaataggcccaaccaccagatgagaattaggccctggatgagtagcgctatagttactgtcctgttgattaatttctgccatttcatgtccataaaagagaccacccatatcatgcacacaattagatttctcacactctaactgtatatttgtatgatattttaaaatctcctaaatgctgggcaatggctattaacaattaattgtcttgcactggccttctgatgaaatgttaacaatgcctattgtaatatagaaaaaaacattctatctactgatttgggctgaatgtatgtaaataggtttctaaaaagtcagatgtttgagcagtggcctacaaatcagtaattttcggatgggagagtttctttacattgccgtggcatcttaaaagctatcttcatgtaaattgactgtactaggcctactggggatcagagttcccaagaaaggaaaccttttcttgtatctggattcaaatttatttccaatgtttcaagcgggaaacatgactctttattgtctgtaaatctaacattattacttttcctcttagaagaatattgtattgttagatgtttgttgagctggtaacatcgttgcaaccactgcaatatcttcgttagtaatctgtataatactttgtatacaagtactggtaagattgttattaaatgtagcttcagtcattaaattactatagcaaagtagtacttcttctgtaatatttacaatgtattaagcccacagtatattttatttcaatgtaattaaactgttaacttattcaaagagaaaacatctcatcatgtctattgtccaaagttacctggaatcaaataaaaattctagattaccatgaagaacataaaaaaaaaaaaaaaa

SEQ ID NO: 4192 - DNA, 1429 bp, Homo Sapiens
  NM_016086
gccacttccgggagtcggaaaggaaagctgtgggaccatcctggcaaccccggtgtttggctgggttctagcgtagccgtctgtgtggccggtgggggacctgcggtcggagtgggagggccagtctgcacccaagaggtggaagaggacgggctttaggctggaagcgccttagaggagccatttttccaggtggggccccaggcagaggctccgacagggagcctggccatagtcgcgcagccggggaggtggagcgcgtcccagacccgagcccccgacctcagccaaacccattccttctgcccttggaggccagaggggactctgagctccggaaaggatgcctggtttgcttttatgtgaaccaacagagctttacaacatcctgaatcaggccacaaaactctccagattaacagaccccaactatctctgtttattggatgtccgttccaaatgggagtatgacgaaagccatgtgatcactgcccttcgagtgaagaagaaaaataatgaatatcttctcccggagtctgtggacctggagtgtgtgaagtactgcgtggtgtatgataacaacagcagcaccctggagatactcttaaaagatgatgatgatgattcagactctgatggtgatggcaaagatcttgtgcctcaagcagccattgagtatggcaggatcctgacccgcctcacccaccaccccgtctacatcctgaaagggggctatgagcgcttctcaggcacgtaccactttctccggacccagaagatcatctggatgcctcaggaactggatgcatttcagccataccccattgaaatcgtgccagggaaggtcttcgttggcaatttcagtcaagcctgtgaccccaagattcagaaggacttgaaaatcaaagcccatgtcaatgtctccatggatacagggcccttttttgcaggcgatgctgacaagcttctgcacatccggatagaagattccccggaagcccagattcttcccttcttacgccacatgtgtcacttcattgaaattcaccatcaccttggctctgtcattctgatcttttccacccaaggtatcagccgcagttgtgccgccatcatagcctacctcatgcatagtaacgagcagaccttgcagaggtcctgggcctatgtcaagaagtgcaaaaacaacatgtgtccaaatcggggattggtgagccagctgctggaatgggagaagactatccttggagattccatcacaaacatcatggatccgctctactgatcttctccgaggcccaccgaagggtactgaagagcctcacctgggggcattttgtgggtggagggccagagtgtgtatacccaggcttgtctggaaggagaaggcctttgctgcctgaaagtctcatgttaaaaaaaaaaaaaa

SEQ ID NO: 4193 - DNA, 3399 bp, Homo Sapiens
  NM_016089
gcattctaatccgtttcacacacggtgctgctacctcgtttgcttcgtgcgtgcgtgcgcgcgcagatgtgggccccgcgggagcagctactgggctggactgcggaagctctgcctgccaaggattctgcctggccctgggaagagaagcctagatatctgggaccagtgactttcgaggatgtggctgtgcttttcactgaggcagagtggaagagactgagccttgagcagaggaacctatacaaagaagtgatgctggaaaatctcaggaatctggtctcattggcagaatcaaagccagaagtccatacctgcccttcttgccctctggcctttggcagtcagcagttcctcagccaagatgagctacacaatcatcctattccaggtttccatgcaggaaatcaactccacccaggaaatccctgcccagaggatcagccacagtcacaacatccttctgataaaaatcacaggggggctgaagcagaagatcaacgagtggaaggaggcgtcagacccttgttttggagtacaaatgaaaggggggctttagtgggtttctctagcctgttccagagaccaccaataagctcttggggaggcaacagaatattagagatacagctcagtccagcccagaatgcaagctctgaggaagtagacagaatttccaagagggcagaaaccccagggtttggagcagtcacgtttggggagtgtgcactagcttttaaccagaagtcaaacctgttcagacagaaggcagtcacagcagaaaaatcttcagacaaaaggcagtcacaggtgtgcagggagtgtgggcgaggctttagcaggaagtcacagctcatcatacaccagaggacacacacaggagaaaagccttatgtctgcggagagtgtgggcgaggctttatagttgagtcagtcctccgcaaccacctgagtacacactccggggagaaaccttatgtgtgcagccattgtgggcgaggctttagctgcaagccatacctcatcagacatcagaggacacacacaagggagaaatcgtttatgtgcacagtgtgtgggcgaggctttcgtgaaaagtcagagctcattaagcaccagagaattcacacgggggataagccttatgtgtgcagagattgaggccgaggctttgtaaggagatcatgtctcaacacacaccagaggatacattcagatgagaagccttttgtttgcagagagtgtgggcgaggctttcgtgctaaatcaactctcctcctacaccagtggacacattcagaggtgaaacctcacgtgtgtgaggagtgtgggcatggatttagccagaagtcgtcgctcaaatcacatcggagaacacactcaggggagaagccttatgtgtgtggggaatgtgggcggggatttagccggaggatagtcctcaatggacactggaggacacacacgggagagaagccttacacgtgctttgagtgtgggcgaaactttagcctcaagtccgctcttagtgtacatcagaggatacactctggggagaagccttatgcatgcacggagtgtgggcaaggctttatcacgaaatcacagctcatcagacaccagaggacacacacaggagaaaagccttatgtctgcggagagtgtgggcgaggctttatagctcagtcaaccctccactaccaccggagtacacactccaaggaaaaaccttatgtgtgcagccagtgtgggcgaggcttttgtgataaatcaactctcctcgcacacgagcagacacattcaggggagaagccttatgtgtgtggggaatgtgggcggggatttggccggaagatactcctcaacagacactggaggacacacacaggagagaaaccttacgcatgcatcgagtgtgggcgaaactttagccacaagtccactctcagcttacatcagaggatacactcgggggagaagccttatgcatgcgtggagtgtgggcaaagctttaggagaaagtcacagctcatcatacaccagaagatacactcggggaaaagctttagaggtgcaaggagtgaggatgtgattttagcaacaagtcagccatcagccacaccagcggaaatgcttagggagaagccttgtttgtaaggtaatgtggacagagctgtacgtggacatcattacttgtcacgtgtcagaggacacactcgggagaaaccttcatggagtgagagtaaggtgttggctggaagtggccccttaagagatacttggagtcaaatctatccactgtacgcccaccccactcttgttctaagagctttggggacagtcttttgaccccttacattcctttagatgtgaagatgacagagatctaacttctgagagcagaggtgtcaagtgacggtccccttggaggaatggtctttgcatctgactacttccttctgcaactgtgttcttccattagcttccatgacactctcctgctttatttttttctacatctctagcctttgctgtttcctctcctaccccacctttagattttactcagagttcagtctccagccctacaatctgagggacacctttaccaggtccccttcctaaccctccagtcccaaatccaagattctttaaccacactctaaaagttcttcagactcaggacttaaacatagccacgccaccttggccttcaatgacagggatctagcaatgctgcatcatcagccttccaataccaggtttaagggtattttaaacacagctcctcttaaatcctccaatctcagtacccagtgttttagccatgctcgggtggctaaattacatccaggaatggtgccagggcctttagccatttgtctctcctcacactccagggcccatatggcccaggttctgacagtttgccttactcccttgggctggggctagccctacctgataccctgtgtcaatgagtgtaccttggagagctatccactcaggccccagtgcctctatttgctaagggactctgccacagaaaagaaggggagagatgttcatgtaacctcaaaatacttaggcttggttttgatgctagagaggaaaaaggacttggagagagagaaggaatggctggtccagaggcttttgtccactccctctcactggaagtggttgatctccagggaatccccaaggttagcctgcttaggggaagggctaggggtacctggaatgtaggatctcccccatgcctggcctaccaccctaatgtgtctggaattggtgggttcttggtcttgctgacttcaagaatgaagccgtggaccctcacggtgagtgttacaattcttaaaaaaaaaaaaaaaaaaaaaaaaaaaaaaaaaaaaa

SEQ ID NO: 4194 - DNA, 1970 bp, Homo Sapiens
  NM_016091
ccgagtggggctgaacttccggcctcaggacgcaggcgcgggccgctcatttcgctctttccggcggtgctcgcaagcgaggcagccatgtcttatcccgctgatgattatgagtctgaggcggcttatgacccctacgcttatcccagcgactatgatatgcacacaggagatccaaagcaggaccttgcttatgaacgtcagtatgaacagcaaacctatcaggtgatccctgaggtgatcaaaaacttcatccagtatttccacaaaactgtctcagatttgattgaccagaaagtgtatgagctacaggccagtcgtgtctccagtgatgtcattgaccagaaggtgtatgagatccaggacatctatgagaacagctggaccaagctgactgaaagattcttcaagaatacaccttggcccgaggctgaagccattgctccacaggttggcaatgatgctgtcttcctgattttatacaaagaattatactacaggcacatatatgccaaagtcagtgggggaccttccttggagcagaggtttgaatcctattacaactactgcaatctcttcaactacattcttaatgccgatggtcctgctccccttgaactacccaaccagtggctctgggatattatcgatgagttcatctaccagtttcagtcattcagtcagtaccgctgtaagactgccaagaagtcagaggaggagattgactttcttcgttccaatcccaaaatctggaatgttcatagtgtcctcaatgtccttcattccctggtagacaaatccaacatcaaccgacagttggaggtatacacaagcggaggtgaccctgagagtgtggctggggagtatgggcggcactccctctacaaaatgcttggttacttcagcctggtcgggcttctccgcctgcactccctgttaggagattactaccaggccatcaaggtgctggagaacatcgaactgaacaagaagagtatgtattcccgtgtgccagagtgccaggtcaccacatactattatgttgggtttgcatatttgatgatgcgtcgttaccaggatgccatccgggtcttcgccaacatcctcctctacatccagaggaccaagagcatgttccagaggaccacgtacaagtatgagatgattaacaagcagaatgagcagatgcatgcgctgctggccattgccctcacgatgtaccccatgcgtattgatgagagcattcacctccagctgcgggagaaatatggggacaagatgttgcgcatgcagaaaggtgacccacaagtctatgaagaacttttcagttactcctgccccaagttcctgtcgcctgtagtgcccaactatgataatgtgcaccccaactaccacaaagagcccttcctgcagcagctgaaggtgttttctgatgaagtacagcagcaggcccagctttcaaccatccgcagcttcctgaagctctacaccaccatgcctgtggccaagctggctggcttcctggacctcacagagcaggagttccggatccagcttcttgtcttcaaacacaagatgaagaacctcgtgtggaccagcggtatctcagccctggatggtgaatttcagtcagcctcagaggttgacttctacattgataaggacatgatccacatcgcggacaccaaggtcgccaggcgttatggggatttcttcatccgtcagatccacaaatttgaggagcttaatcgaaccctgaagaagatgggacagagaccttgatgatattcacacacattcaggaacctgttttgatgtattataggcaggaagtgtttttgctaccgtgaaacctttacctagatcagccatcagcctgtcaactcagttaacaagttaaggaccgaagtgtttcaagtggatctcagtaaaggatctttggagccagaaaaaaaaaaaaaaaaaaaaaa

SEQ ID NO: 4195 - DNA, 723 bp, Homo Sapiens
  NM_016093
gcgcactcagggtctgaggcagctagtagccggagggtcaccatgaagttcaatcccttcgttacctcggaccgcagtaaaaaccgcaaacgtcacttcaatgccccctcacacgtgcgcaggaagatcatgtcatccccgctctccaaggagctgcggcagaagtacaatgtccgctccatgcccatccgcaaggacgacgaggtccaggtagttcgaggacactacaaaggtcagcaaattggcaaggtagtccaggtgtacagaaagaaatatgtcatctacatcgagcgggtgcagcgtgagaaggccaacggcacaactgtccacgtgggcattcacccaagcaaggtggttatcaccaggctaaaactggacaaggatcggaaaaaaattcttgaacgcaaagccaagtctcgacaagttggaaaagagaaaggcaaatataaagaagaacttattgagaaaatgcaggaataaatagaacctgttgtgcaaccacggtttaaccggagattttgaggctagggtgtgtttctttcgaacttttcggaatgtctggaacatttcatttcctgttttgttacctgtgcctctgtaaatctacttttgcaattttaagtaataattttatgaataaaaatgggaaatgcttcctaattccacatagtatttgcattgttttataaataaattccacttactatcaaaaaaaaaaaaaaa

SEQ ID NO: 4196 - DNA, 1196 bp, Homo Sapiens
  NM_016095
ggaaaacggcggccgcggcgtctcctccgggacgctgaggggcccgaggagaccgtgaggctctggcctgcagctcgcgccgccatggacgctgccgaggtcgaattcctcgccgagaaggagctggttaccattatccccaacttcagtctggacaagatctacctcatcgggggggacctggggccttttaaccctggtttacccgtggaagtgcccctgtggctggcgattaacctgaaacaaagacagaaatgtcgcctgctccctccagagtggatggatgtagaaaagttggagaagatgagggatcatgaacgaaaggaagaaacttttaccccaatgcccagcccttactacatggaacttacgaagctcctgttaaatcatgcttcagacaacatcccgaaggcagacgaaatccggaccctggtcaaggatatgtgggacactcgtatagccaaactccgagtgtctgctgacagctttgtgagacagcaggaggcacatgccaagctggataacttgaccttgatggagatcaacaccagcgggactttcctcacacaagcgctcaaccacatgtacaaactccgcacgaacctccagcctctggagagtactcagtctcaggacttctagagaaaggcctggtgcaggcggcttgctgggggatgtgagcgctcaggacgtgatgaggtactcgtggttctggagctctagaaacacttctgatgcatgaaaaatgtgtgatggtgcaaggaatggattcaggatgttgttggagaaacaagtttgtgattagtccttaaaacttagctccctgggacattcttcaattccacatctgtttctagaaaccagccctttttccccccacttttgagaaataaaaaagccttaggtaaataagtcattctccctagcagagccacttgggtctcctgcatggaagccatcacacttgggcaggtgttcagtgactggtaggtgtagatacagcaggagtggccatgtggtccacggctttttaccccttcttgatcctgatttcttgggctgaatttagactctctcacagaggtggctcacagagaaggatggcagatggtgcagccaacaatgctgaccggtgcttatcctctaagccctgatccacaataaaaatggacccaactcaaaaaaaaaaaaaaaaa

SEQ ID NO: 4197 - DNA, 2755 bp, Homo Sapiens
  NM_016096
cagaaaggcacatgggcggggctgcgaggagcaggcggggcgggggcgccgaggagagcggcgcggcgtgcgcgggcacgaggcgtagtggtctcccctaaggctgaggcggcggcgggcgcgcggcggcggcgggcgtgcgaggctgttgtgctcccggctctcgtgtttcccctcctgagcgggtggaggaggcccaagcggtgctgggcgcgctcccccttcctttccctccggcgtcctctcccggccctctcgcgctgcactgtctctccgacgcaagactgtcccggcccggatatggctcgtggacagcagaaaattcagtctcagcagaaaaatgccaaaaagcaagctggacaaaagaagaaacaaggacatgaccaaaaggctgctgccaaagctgccttaatatatacctgcactgtctgtaggacacaaatgccagaccctaagaccttcaagcagcactttgagagcaagcatcctaagactccacttcctccagaattagctgatgttcaggcataaggttgtttacaggtgaattcatgacacctttgactcttctactgtctcagaccttaggtaacatacctgcagctgcttttctaacaaactgttgatcagcaaaaataaaggggctacagaaacactcatttttatgctgttccctcttgggcttcatgcaaagacaattctgtgtaaatgtacagttgactctgatttggaaatatgaaaatcagtccatccttgttataaaaaatttttttacaattgtaattatattgatgttcatattgtgtaaaataactcatttaataaaatagtactttgatttacgacatcacaggataaatggttttagaaattctgttctaactttccacattatttgccttataaaaatctaatgaattcatcagctagaattgcaagtgcaattcttatatccctttctctgctcagtggcaggttcctcagttaaactagagcagactgattcattaaaattgtgcatacgattttatgggcagctgatgatctaggtgaaaaatgacttatctgctgccttagtatattgcggttatgtgtcattgtacccctctgatcatttcctgtgtttgagttggaatatttaaaattgcagtatgacctggctctaactgccagtcaggtgtaccctgtagataactgatagcttcctaaaagcggttggattgtcagtgagcccttgtgaaaggttaggttctaatgtatatgccgtaatgaaataatcattaagcctattgtttaatgcaaaatatggaacaaatgtgaactggtaaaggtcgatcttgatactatattctttgaaaattcttgaagttctttaatttgaaattgaaacattaatttttgaggtttttggaagttactatttggccatttttacaaatggattttgcattaacaggaagattggaatgacttgtggctggattaattcccagaaccctctccctcctttcttttctaagtgagttgttgattttaggagtttgctttgtgctgttacctaaaatcagagactggtgtacagtatgacttccatctgaacttgaaaagtattaaaatgggtcaatattcacattcttttagatctcaggatgggaaaatgggtttgttcagatggatatggtaaatcttacccaattaaggaaggctaattttagagttcttctaatttgcttgtgtcaactcttaacttgtaaaactgctgttaactcggtttaaatttttaaattaatataatagaaagaacactaaaatacttactggtaactgcttagagccatttatctgatcctgtggattacagaatgcattccctcttctgctgtagcttatcattgctttgttttgtagctctgcatattttgcccaccttgtcttccctgtaagtttaagacgtttccaaggaaaagcttcagggctgatagtttcttagcaattcctattcttatgcccttactttaaaatagtccttttattttgtgtattttatttcctaagtttcagatgtaatatctgttgtttcctaacatgtcgattaccagaacgttagaattttacctaatttcttgtggatattgcagaagttctggttaaatcacaacttaaaagtttttaaaagtgctttgagcatatgtatatgtttagtgacaaatcatataaaaccattcacaagttttggttttttttttttcgtttgttttagtgactaattcaggatgaaagtttttttgttcttgtatttaacccttttttataagcagctgaagacaccatatttaacactatatctcagtgatagggaaatagctgcattgatcttacatgagcataatcatccttatacttcatgaggggattattagtacaatccccattttactgtgtttgagttaaaaaccaaacatccctgtaatttaatttgaagattctttaacagattgcagcaaagttcattataaaactgttatggtgtcttcaaagacttgataaaataacactgagagagaattggtccatttgtatgctgtatttctattacttgccaaaaggaatggggttaagattaaacttgtttccattctcttcacatggatatacatccccatgtttaactgacacactgggggctcagttgtgtgctgtaatgtcttattaaagaagatattaaagaaaactaaactagtctaaaaaaaaaaaa

SEQ ID NO: 4198 - DNA, 2328 bp, Homo Sapiens
  NM_016101
gtggccgtggctaccgatgggatagtcgccgcggtcgccatcttcccagcaacaacgtcacttcccttccggaccacaaggggcgctgactccgaacttaggacaggaagaaacaggcacatttccggtctctatgctttctcatccggccggcttgctttcccctgcggtcgtccagactattgggcgctagcgagacgaactattggtacggggctagagaggaaggctttgggattgccggggagcagcgagcgaccgacttccgtttccagttaccaaggcacgaggatccggtgttccaacccagggggaaaaatgcggcctttgactgaagaggagacccgtgtcatgtttgagaagatagcgaaatacattggggagaatcttcaactgctggtggaccggcccgatggcacctactgtttccgtctgcacaacgaccgggtgtactatgtgagtgagaagattatgaagctggccgccaatatttccggggacaagctggtgtcgctggggacctgctttggaaaattcactaaaacccacaagtttcggttgcacgtcacagctctggattaccttgcaccttatgccaagtataaagtttggataaagcctggtgcagagcagtccttcctgtatgggaaccatgtgttgaaatctggtctgggtcgaatcactgaaaatacttctcagtaccagggcgtggtggtgtactccatggcagacatccctttgggttttggggtggcagccaaatctacacaagactgcagaaaagtagaccccatggcgattgtggtatttcatcaagcagacattggggaatatgtgcggcatgaagagacgttgacttaaaacgaagccattccaaggacagacggctgtatggaaaggccgagctttgtttcctgtgtttgtgtggactccaccatcatgttgaattttgtcaacactctggcctcttcagggacttcttatttactgtactctctatcactgacaaatgcaggctggattcttattatatacagagatggctcaaaaatggggtttcagatctttgtgacgaaatagaatactgtttcatatttgaatcagagggcttcttgttctgagaaataggttcaaaatcattggaaccaggaacaagaatagcttattgttatctgtgataacactgttttctaaacacaaggattttcttttttattaatatgcaacatagacattgccataacagaataataaaccacatgtggggttttaaaaatgaaatttggctaataggagcaattcagctatttttctatacagtaattggtgtgtggtatagaagaaaaacgggttcaaaccccacttctgccacctaccagctatatggccttgaatgagtcattcagctttaataaggttcattttcttctgtttaaaaagacacaaaacttgaaaatcagctttggccatctacctgagaattagaaagtctgatttttggaattagaaatcatgattgtaggctgggcacagtggctcgcgcctgtaatcccagcactttgggaggccaaggcggacggatcacttgaggttaggagtttgagaccagcctggccaacatggtgaaaccccatctctactaaaaaaaaaaaaaaaattaggtgtggtgacacatggctgtggtcctagttacttgggaggctgaggcaggagaatggcttgaactggggaagcagagcttgcagtgagccaagatggtgccattgcactccagcctgggcgtgacagagtgagactccatctgattgtaaagcatctagtacagtgtacagtgccttggaaatgataggtatggaataaatggtaattatttttatattatatatattatgtattcctgttattaagtgtagagttttatgagtataatttgattttattaccttcttttttacaagctgttttctcagtatttttcttggatgggatgacgctaggctggaaagtttttttcatcactatgattttataaaacaattttttctatgaacctttacttacttgactggattggactaaaagcactgatcagaggccacgacataaaaattcagtccctttgtccttccccgtgcctcccaaagttactttaagatccttagaatatttctttaaatattttatagacaaaaaatttaaagactatctgtattgcaaaattaaactatttctttaatgaatatattgcttattttaagttccaaaggtgaagtctttaagaataaaacattaccaactcctgcttttatatgtaagcaaaaaaaaaaa

SEQ ID NO: 4199 - DNA, 2172 bp, Homo Sapiens
  NM_016106
gggcagtggctcgtgggagccaagatggcggcggcggcggcagcgacagcagcagcagcagccagtattcgggaaaggcagacagtggctttgaagcgtatgttgaatttcaatgtgcctcatattaaaaacagcacaggagaaccagtatggaaggtactcatttatgacagatttggccaagatataatctctcctctgctatctgtgaaggagctaagagacatgggaatcactctgcatctgcttttacactctgatcgagatcctattccagatgttcctgcagtatactttgtaatgccaactgaagaaaatattgacagaatgtgccaggatcttcgaaatcaactatatgaatcatattatttaaattttatttctgctatttcaagaagtaaactggaagatattgcaaatgcagcgttagcagctagtgcagtaacacaagtagccaaggtttttgaccaatatctcaattttattactttggaagatgatatgtttgtattatgtaatcaaaataaggagcttgtttcatatcgtgccattaacaggccagatatcacagacacggaaatggaaactgttatggacactatagttgacagcctcttctgcttttttgttactctgggtgctgttcctataatcagatgttcaagaggaacagcagcagaaatggtagcagtgaaactagacaagaaacttcgagaaaatctaagagatgcaagaaacagtctttttacaggtgatacacttggagctggccaattcagcttccagaggcccttattagtccttgttgacagaaacatagatttggcaactcctttacatcatacttggacatatcaagcattggtgcacgatgtactggatttccatttaaacagggttaatttggaagaatcttcaggagtggaaaactctccagctggtgctagaccaaagagaaaaaacaagaagtcttatgatttaactccggttgataaattttggcaaaaacataaaggaagtccattcccagaagttgcagaatcagttcagcaagaactagaatcttacagagcacaggaagatgaggtcaaacgacttaaaagcattatgggactagaaggggaagatgaaggagccataagtatgctttctgacaataccgctaagctaacatcagctgttagttctttgccagaactccttgagaaaaaaagacttattgatctccatacaaatgttgccactgctgttttagaacatataaaggcaagaaaattggatgtatattttgaatatgaagaaaaaataatgagcaaaactactctggataaatctcttctagatataatatcagaccctgatgcaggaactccagaagataaaatgaggttgtttcttatctattatataagcacacagcaagcaccttctgaggctgatttggagcaatataaaaaagctttaactgatgcaggatgcaaccttaatcctttacaatatatcaaacagtggaaggcttttaccaagatggcctcagctccggccagctatggcagcactaccactaaaccaatgggtcttttatcacgagtcatgaatacaggatcacagtttgtgatggaaggagtgaagaacctggttttgaaacagcaaaatctacctgttactcgtattttggacaatcttatggagatgaagtcaaaccccgaaactgatgactatagatattttgatcccaaaatgctgcggggcaatgacagctcagttcccagaaataaaaatccattccaagaggccattgtttttgtggtgggaggaggcaactacattgaatatcagaatcttgttgactacataaaggggaaacaaggcaaacacattttatatggctgcagtgagctttttaatgctacacagttcataaaacagttgtcacaacttggacaaaagtaacacagaagaaccttactatgataatctacttggaatgtggataaatgtaaaaagaagaaaagttagaagagcaatatgtttccttctctgtaacagtgtcctaacagtgaaaatcagagttatttgttaatttttaaggaaattatatacttaatatgtattgattaaaagaaacatttcagaaataaaatttcaacattgttaaaaaaaaaaaaaaaa

SEQ ID NO: 4200 - DNA, 1385 bp, Homo Sapiens
  NM_016108
gccctccttgccgcccagccggtccaggcctctggcgaacatggcgcttgtcccctgccaggtgctgcggatggcaatcctgctgtcttactgctctatcctgtgtaactacaaggccatcgaaatgccctcacaccagacctacggagggagctggaaattcctgacgttcattgatctggttatccaggctgtcttttttggcatctgtgtgctgactgatctttccagtcttctgactcgaggaagtgggaaccaggagcaagagaggcagctcaagaagctcatctctctccgggactggatgttagctgtgttggcctttcctgttggggtttttgttgtagcagtgttctggatcatttatgcctatgacagagagatgatatacccgaagctgctggataattttatcccagggtggctgaatcacggaatgcacacgacggttctgccctttatattaatcgagatgaggacatcgcaccatcagtatcccagcaggagcagcggacttaccgccatatgtaccttctctgttggctatatattatgggtgtgctgggtgcatcatgtaactggcatgtgggtgtaccctttcctggaacacattggcccaggagccagaatcatcttctttgggtctacaaccatcttaatgaacttcctgtacctgctgggagaagttctgaacaactatatctgggatacacagaaaagtatggaagaagagaaagaaaagcctaaattggaatgagatccaagtctaaacgcaagagctagattgagccgccattgaagactccttcccctcgggcattggcagtgggggagaaaaggcttcaaaggaacttggtggcatcagcacccccctcccccaatgaggacaccttttatatataaatatgtataaacatagaatacagttgtttccaaaagaactcaccctcactgtgtgttaaagaattcttcccaaagtcattactgataataacattttttccttttctagttttaaaaccagaattggaccttggatttttattttggcaattgtaactccatctaatcaagaaagaataaaagtttattgcacttctttttgagaaatatgttaaagtcaaaggggcatatatagagtaaggcttttgtgtatttaatcctaaaggtggctgtaatcatgaacctaggccaccatggggacctgagagggaaggggacagatgtttctcattgcataatgtcacagttgcctcaaatgagcaccatttgtaataatgatgtcaatttcatgaaaagcctgagtgtattgcatctcttgatttaatcatgtgaaacttttcctagatgcaaatgctgactaataaagacaaagccaccctgaa

SEQ ID NO: 4201 - DNA, 3338 bp, Homo Sapiens
  NM_016111
agcgcaggcgcagatgcgccctcccgcctggcgtcctccgcagattcgcgctgagaggcccgcggagacccgccccagaggctcaagaaaacccgcgggagcctcgcccggacccaggaactcgtgctcggggccaaccggctgggccgcgatcgcgtttcgtccggggccgcggcggccgtggggaatcggctgcagcgaatcggtggcgcgcggcgcctgagcgcgctgcagtcacccgggagccgggtccaggtcgtcttcccgtgacgcccagatctgtcctgcaggatggagccagcaccctcagaggttcgactcgccgtccgggaagccattcatgccctctcgtcttcggaggatggcggccacatcttctgcaccctggagtccctgaagcggtatctcggtgagatggagcctccagcgctcccgagggagaaggaggagtttgcctcggcccacttctcgcctgtcctcagatgtcttgccagcaggctgagcccagcctggctggagctgctgccccatggccgcctggaggagctgtgggccagcttcttcctggagggcccggcggaccaagccttcctggtgttgatggagaccatcgagggtgctgcgggccccagcttccggctgatgaagatggcgcggctgctggccagattcctgcgcgagggccggctggcagtgctgatggaggcgcagtgtcggcagcagacgcagcccggcttcatcctgctccgggagacgctgctgggcaaggtggtggccctgcccgatcacctgggcaaccgcctgcagcaggagaacttggccgagttcttcccccagaactacttccgcctgctcggcgaggaggtcgtccgggtgctgcaggcggttgtggactctctccaaggtggcctggattcctccgtgtccttcgtgtctcaggtccttgggaaagcctgtgtccacgggaggcagcaggagatcctgggcgtgctggtaccccggctggcagcgctcacccagggcagctacctgcaccagcgcgtctgctggcgcctggtggagcaagtgccggaccgggccatggaggctgtgctgaccgggctggtggaggccgcactggggcctgaggtcctttcgagactgctggggaacctggtggtgaagaacaagaaggcccagtttgtgatgacccagaagcttctgttcttacagtcccggctcacgacgcccatgctgcagagcctgctgggccatctggccatggacagccagcggcgcccgctcctgctgcaggtgctgaaggagctgttggagacgtggggcagcagcagtgccatccgccacactcccctgccgcagcagcgccacgtcagcaaggctgtcctcatctgcctggcgcaactcggggagccggaactgcgggacagccgggatgaactgctggccagcatgatggcgggcgtgaagtgccgcctggacagtagcctgccccccgtgcgacgcctgggcatgatcgtggcagaggtcgttagtgcccggatccaccccgaggggcctcccctgaaattccagtacgaagaggatgaactgagcctcgagctgctggccttggcctccccccagcctgcgggtgacggcgcctcggaggcgggcacgtccctcgttccagccacggcagagccccctgcagagacccccgcagagatcgtggatggcggcgtcccccaagcacagctggcgggctctgactcggacctggacagcgatgatgagtttgtcccctacgacatgtcgggggacagagagctgaagagcagcaaggctcctgcctacgtccgggactgcgtggaagccctgaccacgtctgaggacatagagcgctgggaggcagccctgcgggcccttgagggcctggtctacaggagccccacagccactcgggaggtgagcgtggagctggccaaggtgcttctgcatctggaggagaagacctgtgtggtgggatttgcagggctgcgccagagagccctggtggccgtcacggtcacagacccggccccggtggccgactatctgacctcacagttctatgccctcaactacagcctccggcagcgcatggacatcctggatgtgctgactctggctgcccaggagctgtctaggcctgggtgcctcgggaggactccccaacctggctccccaagtcccaacaccccgtgcctgccagaggcagccgtctctcagcctggcagtgccgtggcgtctgactggcgggtggtggtggaggagcggatcagaagcaagacccagcggctctccaagggtggcccgaggcagggcccggcaggcagccccagcagattcaactccgtggccggccacttcttcttccccctccttcagcgctttgacaggcctctggtgaccttcgacctcttgggagaagaccagctggttctcggaaggctggcgcacaccttaggggccctgatgtgcctggctgttaacaccacggtggctgtggccatgggcaaggccctgctggaattcgtgtgggcccttcgcttccacatcgatgcctacgtgcgccaggggctgttgtcggccgtctcctccgtcctgctcagcctgcctgctgcgcgcctgctggaggacctgatggacgagctgctggaagcccggtcctggctggcggacgtggctgagaaagacccggacgaggactgcaggacgctggcactgagggccctgctgcttctgcagagactcaagaacaggctcctcccacccgcgtctccctagtccctggaggcctccccaggaccaccctcgccgacagcaaggcaggcggctgagcagcggcctggagcagcagagccaggctttgtagcgaggccaggtcttcggccgcatccggtacggagagtgcagatgcaggaaggcccggcctgccgctatttatagtgcagccagtccgctaaaaatacactgggcctgggcactgcccgccgggacatggcagcctggacgtggggctggggctgtgggcgctgctggcggggttgactcttccagtgagggcagaaccaggctggcaggaggggaggacggtgtacctgctgctcagagcccccaaggctctcctctgagagccaccaagcaggacagagcagctcttgtcccaggtccctcgggctgagcgccgtgtcaccaggagaatagtgctcacagcccaggcagggtgtgtggctcctggatgggctcgtggggcgggatgggacagggcacgggctctcagaaaataaactgctttattggaattacaaaaaaaaaaa

SEQ ID NO: 4202 - DNA, 2829 bp, Homo Sapiens
  NM_016113
gattcgcagcagggtgtgtccagatggtcagtctctggtggctagcctgtcctgacaggggagagttaagctcccgttctccaccgtgccggctggccaggtgggctgagggtgaccgagagaccagaacctgcttgctggagcttagtgctcagagctggggagggaggttccgccgctcctctgctgtcagcgccggcagcccctcccggcttcacttcctcccgcagcccctgctactgagaagctccgggatcccagcagccgccacgccctggcctcagcctgcggggctccagtcaggccaacaccgacgcgcagctgggaggaagacaggacccttgacatctccatctgcacagaggtcctggctggaccgagcagcctcctcctcctaggatgacctcaccctccagctctccagttttcaggttggagacattagatggaggccaagaagatggctctgaggcggacagaggaaagctggattttgggagcgggctgcctcccatggagtcacagttccagggcgaggaccggaaattcgcccctcagataagagtcaacctcaactaccgaaagggaacaggtgccagtcagccggatccaaaccgatttgaccgagatcggctcttcaatgcggtctcccggggtgtccccgaggatctggctggacttccagagtacctgagcaagaccagcaagtacctcaccgactcggaatacacagagggctccacaggtaagacgtgcctgatgaaggctgtgctgaaccttaaggacggagtcaatgcctgcattctgccactgctgcagatcgacagggactctggcaatcctcagcccctggtaaatgcccagtgcacagatgactattaccgaggccacagcgctctgcacatcgccattgagaagaggagtctgcagtgtgtgaagctcctggtggagaatggggccaatgtgcatgcccgggcctgcggccgcttcttccagaagggccaagggacttgcttttatttcggtgagctacccctctctttggccgcttgcaccaagcagtgggatgtggtaagctacctcctggagaacccacaccagcccgccagcctgcaggccactgactcccagggcaacacagtcctgcatgccctagtgatgatctcggacaactcagctgagaacattgcactggtgaccagcatgtatgatgggctcctccaagctggggcccgcctctgccctaccgtgcagcttgaggacatccgcaacctgcaggatctcacgcctctgaagctggccgccaaggagggcaagatcgagattttcaggcacatcctgcagcgggagttttcaggactgagccacctttcccgaaagttcaccgagtggtgctatgggcctgtccgggtgtcgctgtatgacctggcttctgtggacagctgtgaggagaactcagtgctggagatcattgcctttcattgcaagagcccgcaccgacaccgaatggtcgttttggagcccctgaacaaactgctgcaggcgaaatgggatctgctcatccccaagttcttcttaaacttcctgtgtaatctgatctacatgttcatcttcaccgctgttgcctaccatcagcctaccctgaagaagcaggccgcccctcacctgaaagcggaggttggaaactccatgctgctgacgggccacatccttatcctgctaggggggatctacctcctcgtgggccagctgtggtacttctggcggcgccacgtgttcatctggatctcgttcatagacagctactttgaaatcctcttcctgttccaggccctgctcacagtggtgtcccaggtgctgtgtttcctggccatcgagtggtacctgcccctgcttgtgtctgcgctggtgctgggctggctgaacctgctttactatacacgtggcttccagcacacaggcatctacagtgtcatgatccagaaggtcatcctgcgggacctgctgcgcttccttctgatctacttagtcttccttttcggcttcgctgtagccctggtgagcctgagccaggaggcttggcgccccgaagctcctacaggccccaatgccacagagtcagtgcagcccatggagggacaggaggacgagggcaacggggcccagtacaggggtatcctggaagcctccttggagctcttcaaattcaccatcggcatgggcgagctggccttccaggagcagctgcacttccgcggcatggtgctgctgctgctgctggcctacgtgctgctcacctacatcctgctgctcaacatgctcatcgccctcatgagcgagaccgtcaacagtgtcgccactgacagctggagcatctggaagctgcagaaagccatctctgtcctggagatggagaatggctattggtggtgcaggaagaagcagcgggcaggtgtgatgctgaccgttggcactaagccagatggcagccccgatgagcgctggtgcttcagggtggaggaggtgaactgggcttcatgggagcagacgctgcctacgctgtgtgaggacccgtcaggggcaggtgtccctcgaactctcgagaaccctgtcctggcttcccctcccaaggaggatgaggatggtgcctctgaggaaaactatgtgcccgtccagctcctccagtccaactgatggcccagatgcagcaggaggccagaggacagagcagaggatctttccaaccacatctgctggctctggggtcccagtgaattctggtggcaaatatatattttcactaactaaaaaaaaaaaaaaaaaaaaaaa

SEQ ID NO: 4203 - DNA, 6798 bp, Homo Sapiens
  NM_016114
cggcgccggaagtggtcgcgggtcgttctgcttcctgcccgaggggcgtgcgcgggtcaggggcggccgcggaggcggaagcatccatggcggagggcggcagcccagacgggcgggcagggccgggctccgcaggtcgtaatctgaaggagtggctgagggagcaattttgtgatcatccgctggagcactgtgaggacacgaggctccatgatgcagcttacgtcggggacctccagaccctcaggagcctattgcaagaggagagctaccggagccgcatcaacgagaagtctgtctggtgctgtggctggctcccctgcacaccgttgcgaatcgcggccactgcaggccatgggagctgtgtggacttcctcatccggaagggggccgaggtggatctggtggacgtaaaaggacagacggccctgtatgtggctgtggtgaacgggcacctagagagtacccagatccttctcgaagctggcgcggaccccaacggaagccggcaccatcgcagcacccctgtctaccacgcctctcgcgtgggccgggcagacatcctgaaggccctcatcaggtacggggctgatgttgacgtcaaccaccacctgactcctgatgtccagcctcgattctcccggcggctcacctccttggtggtctgccccttgtacatcagcgcagcctaccacaacctccagtgcttccggctgctcctcctggctggcgcgaaccctgacttcaactgcaatggtcctgtcaacacacagggattctacaggggctcccctgggtgcgtcatggatgctgttctgcgccacggctgtgaggcagccttcgtgagcctgctggtagaatttggagccaacctgaatctagtgaagtgggaatcgctgggcccagagtcgagaggaagaagaaaagtggaccctgaggccttgcaggtctttaaagaggccagaagtgttcccagaaccttgctgtgtctgtgccgtgtggctgtgagaagagctcttggcaaacaccggcttcatctgattccttcgctgcctctgccagaccccataaagaagtttctactccatgagtagactccaagtgctgcggttgattccagtgagggagaaagtgatctgcagggaggtggacaccgagccctgagtgctgtgctgctgctggtctcctgatggctgttgctgcagaagatgtcctcgtagactgtcattgctcctcaggtgcctgggccgctgaacagtccttgggtcattgtcagctgagaggcttatactaaagttattattgtttttcccaagttctctgttctggattttcagttgcatattaatgtaacgggccatggggtatgtacatgtaggggctgaggttggaggcctactaatttccctgtagggaagactcccagcacttctggaactgtgcttctctttatttttctacttctcaatttgatggttcgattaaagccttctagtatctcaatgaaaagggagtttcgtaagcaaaatagaggacagaaatgcagttcatgaacttgctggttggtttttcctgctcctggggtaacacatgcgcttgtcatacacgccccttccttgccccttcagtattctctctttgcgatggaggtctcatagtgagtgtcttcactcaagggtggtttcctggctgcacggcacctgttccaacacctactgtgcctctcatcaggtgtcacgatttttctgccacttcaccttagggagcttccagtgattgattttaggaggcccacaccaaactccccaggaaatgactgccttccttgggaccaaggaccgttccaacagcattcactgccagttctaataggcgaggaaaatgcccgaggcgctgtcttctgtcccccacacgtaccagaaagtgaaaaatgcagcgagtcctctgggtggttatgagcctccaggcgcatgctgtccagtggacagaacatctggcggttggttgattgctctcttttgtcttggtcgctgcttctagaatctatgcaggggatagcagtgaggtcagaagtctttcccgggagagagatggcctgggttatcattgctgatagctttggctgcatgagttgggcttccccttacccagggctgcacagccaggtgtgagggtcaccggcaggtgggctggtggctgcagcctcagagccctcccaggttgctgctgtttccagtgaatcacatttcgtcatttgaagcccatgaggaccattgtgtggatccatggtgattctagacttcagatatatttaggaaggcgcagatttcaaatctgtgtttgattttctgtaataagagaaatccaatttgtaaaacttgaacaatgataccgttttatttacttagtagcatcactgtgtgtcttagcaggcaggcagtgtctggccattattgcgttctacagccagaggatagaattctatacccccaaccccttgtgtcacaaatgggctctgtgtgggtcaccccagctgacccgtgtatgtgcagatgcagttccgaagggaagaacagtcctcgggtgattcagaggggaaaatgcaatccgggaggtgtttcctcagctgaggtgacactgttagaagctgtgatggttgtgtaaatgtgggctgtgtgctgttcccgaggggagcttgggattgggtcctgctgaagccaggagggtcttcccaagataggagaggaaccgcaggtggtgagcggctggggagggccaggacagccggggctgggtgctgcaggggcttcagcccgggagagggggtgggcgtgttctttgtggtaccaaagtgggactaggacaaaaattgggctgtggctggggcaggagctatagggagttaaggaatgatgatacggaagttggagccaccaccgtggactgggccttgtcactggaggtcgtaggcagtggctcatcaccctggtagggctgataggggctttcagggaggctggttagctccctgcactctggctctttactggcttactgtttagctcctcccacctcgaggctcttcttcctgccaccctttgggctcagaggagggtggcttttttcgaggtgagccatgttgtagacacatgatacgctctgcgtctgctctactgagtactttctgcaggggcctgttaaggacgaggcctccccagccctgcccggtgcaggaggtggctcagttattgaaccttttgggaagcagcacctgggaatgctgcctcgtgggagtcccatgcgtgagtgtggtggtgtgaccttcaggctgcacagaggcaaggacccagatgtggcagcatgggcgtcatgctcctttgcacagcccagggcctgttttggagggaccaggtcactgcccctggtctctctaggaggagtggactgaatggatcgttgcagagaagactcacccagacctggccagggaatgatgtatctggggagagaatgagctggaggagggggcctctcatggcccttccctggcctgtggcccagcctggctggcctgcaggtgtctagggtctcagcttttcatttgcagaggacatgttcaacttcctctctgttcaagccagcctttgccaattttttcagaatccaaacaatttggaggtttggtatcttgtttcatagctgccaaatatgaatctgaaaacagggtgggtagctaaggtcattcctcctgggttttagtggcattgccttccttcactaaagctcccttttttttctgttggcaaggacaggttacagaataggaagagtagcactttccgcctaagcactttaggaaatcacctttctaagccctggggcgcccaagtcccatgggacagggaaacgtggtcctcagtgaggctgctgcctggctggcccggagtcctccctaggagaggggctcgatgggctgggggaaggagcctgaaggttgcccctggttgcatcccagaagcatctgactgtcaccactgccagtggctgtggaacagtcctgggccctgggccttggctgctgtcaacagatgggctgggctgggctgtggtggggtgggggacaacgttggtaactctgagaattcagctttggagtcccgggtgaggggttttagataaacccatcaatatcacccacattctgtgactctttgcatcactcgtgttatttatttatttatttatattctgccttgttccagaaaagtgtttaaggcaacaatgcttgttttttggtgttttcttttgacatttgaaaatttagtacattgttaaaatgtacttgttaaacaggtaattttaaagagaaggaacaattgtttttagtaagttttctttttcctttttcaatgaattgattcttcaaattaaaagttcttgagagaaggagaggaagatacagcagacataggactgagccaaggaagagtctgcctgagagagacgcttggcctgtgctttgctgccatccgtgcggccttggccacatccctattaacagaggcagctccacttcagacagggacaaggcttcctgctgtgcctttctggcagggttttgtggggtcacatgggaagcaatgtgttacgcaagcagtctccatgtgtgtgtaaactgctgtcctggtgacttgtccctcttcttagtggaaatgcatttgagatggtgacagggctggatgaacgtgtgaccctgggagatccgggctggactgtggaccccgatgggccagagtccttgtggcccacagcatagcactggggacagagcgctctatgcaggtgaggcgtatgagaacagcatggtaaataattgatgaagtcacatttgttcaacttaaaggattgttctttattctgaagttattttcttccttatttggatgataaaatttccttttatgtaatgaaggtaaaagtagagggcaatatttttgctttttgaaatgctcttggttgcaaaacaaaatgttggttgctgtttgtcagccccagaatttcttcttaagttcgcctgtctctgaaatcccaaagtcacggaaccgcagtctagctgtggtgcatgtttacgtattggtgagaaattcctcttgggttcttgaacagcctgtacgctggcaggcagcactgcagcatttctgctgctcatggccaagaacgagtctggagatcgctgcgtgcggttttaggaagtgccaacacccgtggtgatgggcctctggccacccctggatccatgggacacactcacaggaagctgatgtggccttctcggtgaggactgcaccttaacctgggcactgggagcctgtggcccccctgtatgttggtgatgacactagtgtgggtcttctggctctggggctacagcttctgcctcctcacctggccgtcggtactcggcaagcaggcctggcctcccggggcctggatccctaccggctgggattggcctcctggaagtacctgtttgggccatgtgacctcctttctcacttatgcctcactcccctcctcccgctccaaacccgaacctctcagtgtggaatgaacgctccaaacccgaacctctcagtgtggaatgaaacagtttagatgtgtacatgatgcacgtgggtgggattcacatcccaggagaattccacggagaggaatgtgcagattttgaagtgtacagtgatgtgtggaataaatactagaaattctcagcagacagtgggatggagaagtgagtgggggcaggagggggatttctgttgccttgacatgtcgttgctcagtgcctggattgcaggcgagtctctcttttttatgttgctttgatttcaagatctcttagatatactaggtagtgtatgaatgtgcataaatccagtttgagaatggtgtttatgaagaagctgtttcgtgtgtacagttgctgctgtaatttagccagcagtgccctgccctgccctgcagtgtctgctcagctcccactgcttctctttgctgttgggcatgtgaggcatgacttggaggggggcctggtgcctggggacctgctgaagagaatgctcaccaccagctctctgtttccctttctgctttggtaatcaacacgtgtttgcctgcagtggccgggaccgtgactgtttctgcccttgtgcctagttaagagccttcaaaagcataatgaacacttttgatatgatattgtaactttagtaaatgctttacttccctctaattgcccccaaatgccttaattttgtggactgtttatttcaacaggtggaagtgttggtcgtgcgaaatcttggtattcgcatttcaagaagggagttcttttttctttcttctttctatggaacgtttcaagtgattggatagaaagaagggctctgaagcaggagttttcacctgctctgagggaacttggggctccagggacgtaccccaaatgttgcccaggttgaaactccctgacagcctgttctacgtagtggctcgtggtttccagtttgaagagagttgtgcccctaaaagtgtttgaaacctgtggctttcaagcaaggtaccgttgtccccacagtgttccgtggggtagggggtgatggagactgtgggcaagcctgttgtttttggccccctgttgttacatgggacctgttttgacggtgggagggtgagatgtgaagatgtgggatgaacctggaatgaacgaattaaataaagacatgcatccatctgtcagcg

SEQ ID NO: 4204 - DNA, 3112 bp, Homo Sapiens
  NM_016118
ccggaatgaaaacaaacggcggccgctgccgcatccgggcactctgctggtcgcggcgggagtggcgtggcgcagggatggcacaaaagaaatatcttcaagcaaaattgacccagtttttaagggaagacaggattcaactttggaaacctccatatacagatgaaaataaaaaagttggtttggcattaaaggaccttgctaagcagtactctgacagactagaatgctgtgaaaatgaagtagaaaaggtaatagaagaaatacgttgcaaggcaattgagcgtggaacaggaaatgacaattatagaacaacgggaattgctacaatcgaggtgtttttaccaccaagactaaaaaaagataggaaaaacttgttggagacccgattgcacatcactggcagagaactgaggtccaaaatagctgaaacctttggacttcaagaaaattatatcaaaattgtcataaataagaagcaactacaactagggaaaacccttgaagaacaaggcgtggctcacaatgtgaaagcgatggtgcttgaactaaaacaatctgaagaggacgcgaggaaaaacttccagttagaggaagaggagcaaaatgaggccaaactcaaagaaaaacaaattcagaggaccaagagaggactagaaatactggcaaagagagcagcagagacagtggtggatccagaaatgacaccgtacttagacatagctaaccagacaggcagatcaatcagaattcccccatcagaaagaaaagcccttatgttagctatgggatatcatgagaagggcagagctttcctgaaaagaaaagaatatggaatagccttgccatgtctgttggacgctgacaaatatttctgtgagtgttgcagagagctgctggacacagtggataactacgccgtcctccagctggatatagtgtggtgttacttccgcctggaacagctggaatgccttgatgatgcagaaaaaaaattaaacttggcccagaaatgctttaaaaattgttacggagaaaatcatcagagactggtccacataaaaggaaattgtgggaaagagaaggtactgtttctaagactctacttacttcaagggatccgaaactatcacagtggaaatgatgtagaggcttatgagtatcttaacaaggcacgtcagctctttaaagagctatatattgatccatcaaaagtggacaatttgttgcagttggggtttactgcccaggaagcccggcttggcctgagggcgtgtgatgggaacgtggatcatgcggccactcatattaccaaccgcagagaggaactggcccaaataaggaaggaggaaaaagagaagaaaagacgccgcctcgagaacatcaggtttctgaaagggatgggctactccacgcacgcggcccagcagattctgctcagcaatcctcagatgtggtggttaaatgattccaatcctgaaaccgacaaccgtcaagaaagtccttcccaggaaaacattgaccgattggtgtacatgggttttgatgcactcgtggccgaagctgcgctgagagtgttcagaggcaacgtccagctggccgcccagacccttgctcacaacggaggaagcctgcctcccgagctgccgctgtcgccagaagactctttgtccccgccagccacgtccccttctgactccgcaggaacctctagtgcctcaacagacgaagacatggagacagaggccgtcaatgagatactggaagacattccagagcatgaggaagactatcttgactcaactctggaagatgaagaaattattattgcagagtacctatcctatgtagaaaataggaagtcagcaacaaagaaaaactaaataatgaacagaaatagcgctaattttctgcttataaatgctatcattatgaaaaggctaatgcagctctttctgttcttactttttatctgaattacaagtcctctttgggtgtaggagggggtgggcaggggacaagtccaggaggggtcccagggccttcatgcgtggtctcggggaagaagcttcctctggcctggcgcaggccgttccatctgcctcccaggtctgcgtccctaaccccttccccagcttggtgttttaccccgaaacaggaaggaacaggggtcctgtagaacaggggtcctggggaaggtgtccagggcagggtcctgggaagggtgtcccgaccgcttcctctccagctgtggctccatctgcccagcttgcctgcctcctgcacccactgccctgaccttcctgcttcccacgctgccatctctgccagggtgccacatgggttcctgtgccaccctttccccgcccctcaaatcgtcctttaagtcttccttccaagtgctgtggggcataacgatgaggcgctggccttgggggccacaccaggtcgcagcaaatggcttcagcctgggacgccagtgttttatgctcttagttcagtaaaatacgcccccgaaattcaagattgagtgtcaggctttatatatattcagcattcctcattacagaaatcttctattgaatgggaaaggtttaaatgctaaccaaagcaatttatttttaattaatatttttagactctgtgctgtcatactgaactcactgctagctaagagacctatcagagatttagatatattttctccaggttttttgtgggttttctttgttgttgttgttgttctagccatgtgacagaggctctttctaaaagtatgtagttcgctgtgtgtcggctccagcagtaaccgtcctcactgcgccacgcactcctctgtagatgtgtgcccagtgggagttccttccagccccaggaccacagcagcagccaggtgccgagtggattgagtgccaggtgcatccaagactttccctcccttccagaaggcactgactgaagacaggatggatcatgcggagccggctgaaatgctccaactttttcaaagtgtgggtggtccagtttggactgatgggaatcttcttgtcattctttttaaacggatgataccgatggaaataaaaggtgggaaatatattcaaaaaaaaaa

SEQ ID NO: 4205 - DNA, 3235 bp, Homo Sapiens
  NM_016122
gggtgggacttcctgcttcgcgtgccgctgggccaagggacagagcccgctcctccaggctggtggggcggtgcgatgaggcggcttctgggccatacgtcagcacgtggggtggcgccgcacccctgaggatcccggtccacgcggaggagtggggcttttcaccgccgccgccgccgccctcggacctctcccgggatacttcacatttccctagggacgggagcccgaggggtccgttcggccctcttcctctcgctgggccgacaccccgctgtaggaccgtaacccttagtcccaatgcctccgtaagcggagttgagtgggtgcctgtggttggagctgtggaggtgtccccggtggcgagcgcggccagaactgcggtcacttaagttttccgtgtgcgggttgcaaggagcgtgcgtgcgtctggtatagggaggacacctctggattgaggatcttatgacctactttagaggaaggtataatttggcttcctgagattctgccttagcaagaaaggagtgggaaatacccttggaaagaaaactaaaacagtaagaaagccaaaacttatttttacatggttgtcagcacatttaccgatatggacacttttcccaataattttcctcctggtggagacagtggattgacaggttctcagtcggagttccagaaaatgttaattgatgaaaggttacgatgtgagcatcataaagctaattatcagacactgaaggctgaacacacaaggttgcagaatgaacatgtaaagttacaaaatgaactcaagcacctgtttaatgaaaagcaaactcagcaggaaaaacttcagctcctgcttgaagaactaagaggagaattagtagagaaaactaaagatttagaagaaatgaaactgcagatattaactccacaaaaattggaattgctaagagcccaaatacaacaagaattagaaactccaatgagagaacgttttaggaatctagatgaagaggtagaaaagtatagagctgtatataataagcttcgctatgaacatacatttctcaagtcagaatttgaacaccagaaggaagagtatgcacgtattttagatgaaggaaaaataaaatatgaatcagagattgcaagactggaggaagataaagaagaactacgtaaccagctgcttaatgttgatctcacaaaagacagcaaacgagtggaacaacttgctcgagaaaaagtctatttgtgtcaaaaattaaaaggtttagaggctgaagtagcggaattaaaggctgaaaaggagaattctgaggctcaggtggaaaatgcccaaagaatacaggtgcggcagttggctgagatgcaggctacagtcagatccctggaggctgaaaaacaatcagctaatttacgggcagaacgtttggaaaaagagctacaatcaagcagtgaacaaaatacctttttaattaataaattgcataaagctgaacgagaaataaatacattgtccagtaaagtaaaagaacttaaacattcaaacaaactggaaataacagacatcaaactggagacagcaagagctaagagtgagctagaaagagaaaggaataagattcaaagtgaactggatggattacagtcagacaatgaaattctcaaagcagctgttgaacatcacaaagtgctcttagtagaaaaggatcgtgaattaatacgtaaagtacaagctgccaaagaagaaggttatcaaaaacttgtggtattacaagatgaaaagttagaactcgagaacagattagcagatttggagaaaatgaaagtggaacatgatgtctggaggcaatctgaaaaggatcagtatgaagagaaattgcgggcttcacagatggcagaagagatcaccaggaaggagcttcagagtgttaggttaaaacttcagcaacaaattgtgactattgaaaatgcagagaaggaaaaaaatgaaaattctgacctaaaacagcaaatcagtagtttgcagatccaagtgacttcacttgcacagtcagagaatgacttgctgaattcaaaccaaatgctgaaggaaatggtggagagattaaaacaagaatgccgaaattttagaagccaagctgaaaaagcgcaactagaagctgaaaagacattggaagagaaacagatacagtggttggaagaaaagcataagcttcatgagcgtatcacagacagagaagaaaagtacaatcaagctaaggagaaactgcagcgagctgcaattgcccagaaaaagagaaaatctcttcatgaaaacaaattgaaaagactacaagagaaagtagaagtcttggaggcaaagaaagaagaattggaaacagaaaatcaggtcttaaatagacaaaatgttccttttgaagactatacaaggcttcaaaaaagactaaaagatatacagagaagacataatgaatttcgaagtctaattttggttcctaacatgcctccaacagcatctatcaatcctgttagctttcagtcatcagccatggttccaagcatggaactaccatttcctcctcatatgcaggaggaacaacatcaaagggaactctctctacttcgcaaaagactagaagaactggaaacaacacaaagaaaacaactagaggaacttggatcttccggagaatgatgttcttggagaacaggcagatcaaaagaggtgaagttggtgactcagtaaaacttgacattttaacctgtggcatttagatactttttactgtttgccaaaacacttgaatgtgcctcaagaaaaggtacctactacatgctgtattgtatgactgtcaggattttaagattatacaagtgaagcattaaaagagaaattctcagagatatttagaatatttgacaatggtttgagaatgtaaaacaaaaaggaactagttagagtcaagttttaaaatttttactttgttgaatttttttttttggcattttgagtgaaatataactatcattaattctctcttcatctttgagatgcttggccataacagggtccatacacatcttctggtttactatatacaaaaactgtagttgaaaaaagatgacaatttaaaagtcagcctaaagaatgtaaaggtatctatatacaaaaggctaccttttctaaaatctgtgtgcacataattaaagagcttaatttttttttaaaaaaaaaaaa

SEQ ID NO: 4206 - DNA, 4303 bp, Homo Sapiens
  NM_016123
cccgccccttcgcggcgcttcctagttcggctggttcttctgtcgccggcttcagcagcccgcgcccgggcaggaatagaagatgaacaaacccataacaccatcaacatatgtgcgctgcctcaatgttggactaattaggaagctgtcagattttattgatcctcaagaaggatggaagaagttagctgtagctattaaaaaaccatctggtgatgatagatacaatcagtttcacataaggagatttgaagcattacttcaaactggaaaaagtcccacttctgaattactgtttgactggggcaccacaaattgcacagttggtgatcttgtggatcttttgatccaaaatgaattttttgctcctgcgagtcttttgctcccagatgctgttcccaaaactgctaatacactaccttctaaagaagctataacagttcagcaaaaacagatgcctttctgtgacaaagacaggacattgatgacacctgtgcagaatcttgaacaaagctatatgccacctgactcctcaagtccagaaaataaaagtttagaagttagtgatacacgttttcacagtttttcattttatgaattgaagaatgtcacaaataactttgatgaacgacccatttctgttggtggtaataaaatgggagagggaggatttggagttgtatataaaggctacgtaaataacacaactgtggcagtgaagaagcttgcagcaatggttgacattactactgaagaactgaaacagcagtttgatcaagaaataaaagtaatggcaaagtgtcaacatgaaaacttagtagaactacttggtttctcaagtgatggagatgacctctgcttagtatatgtttacatgcctaatggttcattgctagacagactctcttgcttggatggtactccaccactttcttggcacatgagatgcaagattgctcagggtgcagctaatggcatcaattttctacatgaaaatcatcatattcatagagatattaaaagtgcaaatatcttactggatgaagcttttactgctaaaatatctgactttggccttgcacgggcttctgagaagtttgcccagacagtcatgactagcagaattgtgggaacaacagcttatatggcaccagaagctttgcgtggagaaataacacccaaatctgatatttacagctttggtgtggttttactagaaataataactggacttccagctgtggatgaacaccgtgaacctcagttattgctagatattaaagaagaaattgaagatgaagaaaagacaattgaagattatattgataaaaagatgaatgatgctgattccacttcagttgaagctatgtactctgttgctagtcaatgtctgcatgaaaagaaaaataagagaccagacattaagaaggttcaacagctgctgcaagagatgacagcttcttaaaactttattggaaaagactcttgactttttatatacacctatctcaaccatttttttaactgatttttttcctaaatattcttctttacctttaacaaggcataggctgttgcaggacagtggttattaaagcatgggttgaacttccaaaatataaaaatagagccaccatatcaacacttagccctacccattagtatcacccccagttcttacagtaatccctgagaaatctccttcaagcatcaccaaacacagtttgaaaattacagggttagcaaaaagagcctgggctgtatgtagggtggaaacactctgatctgaagcccagctgactccactactaatttgctgtaaagctttggacatacacttagctgctgtgagccactaataacattgggctaatatctgctgtgcttctctgacaggtagtcatgaaaatcaaatgatgcaaaatatatacaagcactttgtaaattgtaaaatgatacaaaatttaaagtttatagagccagttacaaaatcctattagtcatatatttatagattgtgttcacagcaatcatttaaccacaaataaaatatcccttgatgatactgccataatgatatgtccattattagattatgttacatgacaaagttgaaggaatttggcagatgcagttaaggttcctaaacaactcactttgagactgttgaaagggcctgacctaatcaagtgaacccttgcaagaagaattctccttgtaagccttgaagaagtatgtgagagggccacattggctaaaacctaaaggtggcctctaggagatgagacctaccttccagttgtcagcaagcaggaaaaaaaaattgggacctcagttgcaaccacaaggaactgaattctgccaaaaatctgagtcagcttagaagagtactccaagcttcagatgataaccacagcctgggctgacacctggatttcagctttgcatgatcctcagtatgagaatctatctgttctgtgctggacttctaatatatagaactgtgagataatgggtcacattggctggatgtggtggctcatacctgtaaatcccagcactttgggaggccgaggcaggcagatcacctgaggtcaagagttcaagaccggcctggccaacatggtgaaaccccgtctctactaaaaatacaaaaattagacgagcgtggtggtggacacctgtagtcccagctacttgggaggctgaggcaggagactagctggaaccagggaggtagaggttgcagtgagctgagatcgtgccactgcactccagcctgggtgacagagtgagactccatcataaataaataaataaataaatgggtcacattaagcctttaagtttgtggtaatttattattcagtaatagaaaacaaatacagatactctcccatgatgtttttcccatgatgatttcccatgatatttacaggttttgcccacatttgaggggtatgtggaaattatacagagcatgtacagcgggaggcttatagtgtacgtactgaaatgtggggttggagccccaacacagagaccccagcaggacactgcctagtagagctatgggaagggtgctgccaccctccagacttgagaattgtagagccaccagcagcttgcactctgagcttggaaaagccacaggcactcaacttcaaccatgagggaagccacgcaccctgcaaagccacaggagtggagctgcccacggcctcgagggcccaccccttgcaccagtgtgccaggatgtgggacatggaatcaaggaatatgttagggcttttttttttttttttttgagacggagtcttgctctgttgcccaggctggagtgcagtggcacgatctcggctcactgcaagctctgcctcccaggttcacgccattcccctgcctcagcctccccagtagctgggactacaggtgcccgccaccatgcccagctaattttttttgtatttttagtagagatggggtttcactgtgttagccaggatggtcttgatctcctgacctcgtgatcacccgcctcggcctcccaaagtgccagtatttaaagtttaatgtcttcccagctgggtttcagacttgccaggatcctgttgcccctttctttagccaatttctcccttttgggacaagaatgttttacttattgcctgtaccaccaactgtatcttggaaataaataacttatattttatttcagaggctcataggcggcaggaacttaccttgagtctcaaatgagacttaggacttttgagtgatgctagaatgagttaagactttgggaagggatgattatattttgcaatgtgagaaagacattagatttggggggctgggggtagaatgacattgtttagatgtttgtctccttcaaatttcatgtttaaatgtaatccccagtgttgggggtggaggtggggcctgatgggaagtgtttgggtcatggtggatgatccctcatgaatggcttagagccactggtgatgagtgagttctcactcagttcgtgtgagatctggtggcttaaaagagtctgctccccctttgccttccattgtgattgtaaccttcctggggccttcatcaaaggccaggcaaatattggtgccgtgctagtatggcctgcagaaccgtaagccaaaacaaaccttttttctttataaattacccagcctcagttattcctttatagtgatgcaaaacgggctaactatataaatttgtaatttttaagttatagattgtttttattaaacacttatgaatactgttaaaaaaaaaa

SEQ ID NO: 4207 - DNA, 2833 bp, Homo Sapiens
  NM_016124
ttggagagaggggtgatgcctggtgctggtggaacccctgcacagagacggacacaggatgagctctaagtacccgcggtctgtccggcgctgcctgcccctctgggccctaacactggaagcagctctcattctcctcttctatttttttacccactatgacgcttccttagaggatcaaaaggggctcgtggcatcctatcaagttggccaagatctgaccgtgatggcggccattggcttgggcttcctcacctcgagtttccggagacacagctggagcagtgtggccttcaacctcttcatgctggcgcttggtgtgcagtgggcaatcctgctggacggcttcctgagccagttcccttctgggaaggtggtcatcacactgttcagtattcggctggccaccatgagtgctttgtcggtgctgatctcagtggatgctgtcttggggaaggtcaacttggcgcagttggtggtgatggtgctggtggaggtgacagctttaggcaacctgaggatggtcatcagtaatatcttcaacacagactaccacatgaacatgatgcacatctacgtgttcgcagcctattttgggctgtctgtggcctggtgcctgccaaagcctctacccgagggaacggaggataaagatcagacagcaacgatacccagtttgtctgccatgctgggcgccctcttcttgtggatgttctggccaagtttcaactctgctctgctgagaagtccaatcgaaaggaagaatgccgtgttcaacacctactatgctgtagcagtcagcgtggtgacagccatctcagggtcatccttggctcacccccaagggaagatcagcaagacttatgtgcacagtgcggtgttggcaggaggcgtggctgtgggtacctcgtgtcacctgatcccttctccgtggcttgccatggtgctgggtcttgtggctgggctgatctccgtcgggggagccaagtacctgccggggtgttgtaaccgagtgctggggattccccacagctccatcatgggctacaacttcagcttgctgggtctgcttggagagatcatctacattgtgctgctggtgcttgataccgtcggagccggcaatggcatgattggcttccaggtcctcctcagcattggggaactcagcttggccatcgtgatagctctcacgtctggtctcctgacaggtttgctcctaaatcttaaaatatggaaagcacctcatgaggctaaatattttgatgaccaagttttctggaagtttcctcatttggctgttggattttaagcaaaagcatccaagaaaaacaaggcctgttcaaaaacaagacaacttcctctcactgttgcctgcatttgtacgtgagaaacgctcatgacagcaaagtctccaatgttcgcgcaggcactggagtcagagaaaatggagttgaatcctttctctgccactctttgaggagaatctcaccatttattatgcactgtagaatacaacaataaaatacagccatgtaccacataacaacatcttggtaaacaacagactgcatatatgatggtggtcatccagtaagctaaggttaatttattattattccttgtttttttttttttttttttttttttgagatgtagtcttactctgtcacccaggctagagtgcaatggcaccatcttggctcactgcaacctctacctcctgggttcaagcaaatctcctgcctcagcctccaaagtagctgggattacaggcacccaccacatctggctaattttttgtatttttagtaaagatggggtttcaccatgttggccaggctgatctcaaactcctgacctcaagtgatctgcccgcctcggcctcccaaagtgctggaaccacaggcctgagccactgtgcccagccttgtttgcttttttaacagataacagtgtgctcatagaaactgctttgacatgactgcaatcatgtgcttcatagaaacttaattagattataccactagagtcttcagatttttatactttttttttttgaaacggagtctcactctgtcaccaggctggagtgcagtgccgcaatctcggctcactgcaacctccgcctcccaggttcaagcaattctcctgcctcagcctcccgagtagctggaattacaagtgcgcactaccacacccagctaatttttgcatttttacttgacagggtttcaccatgttggctaggatagtttcaccaggatctcttggcctcatgatcagcctgcctcggcctcccaaagtgctgggattacaggtgtgagccaccgtgcccagcctatacttccctttttgaataccatttggtgttttgaagaattaacagctttgtgaacgtggcagtgcttgtgattcaggcttccattgagaccaaggggagaacctggttgcaggacaaacagacggacagcgtgtggcagtgtttaaatgctcttctgaaggctgatacgacagctctctgtgcactgattgcatatgcatcccaagattatattattgttttctactgctatgtgtcacactttgccaaacaggatgtggaaaatgaataagcggttttcttaggcacttcttaacagacaattggtcaaaatgaactccattgcttaagaaacacataaacaccatttagtcactgaacatagctatatgtatggttgttactatgggaaatcttgttttgccaattttctttgaaaattctggcagaccaaggttctttttgtttacataatacttgaaaaataaaaatgaacaagctaacaaacta

SEQ ID NO: 4208 - DNA, 601 bp, Homo Sapiens
  NM_016126
ggggcgcaagggaggtttcgagcccggaaggtccggcgcccagagctaacgggagtcccaggttaaacactttaagatgagaaaaattgatctctgtctgagctctgaagggtccgaagtgattttagctacatcaagtgatgaaaaacacccacctgaaaatatcattgatgggaatccagaaacgttttggaccaccacaggaatgtttccccaggaattcattatttgtttccacaaacatgtaaggattgaaaggcttgtaatccaaagttactttgtacagaccttgaagattgaaaaaagcacgtctaaagagccagttgattttgagcaatggattgaaaaagatttggtacacacagaggggcagcttcaaaatgaagaaattgtggcacatgatggctccgctacttacttgagattcattattgtatcagcctttgatcattttgcatctgtgcatagcgtttctgcagaaggaacagtagtctcaaatctttcctcataatgataacaaaatgctcttgcatgattttttaacaatatatttaaacaggaagttgtcactgatatactttattaaaaggatttttatcaa

SEQ ID NO: 4209 - DNA, 3785 bp, Homo Sapiens
  NM_016131
gtaacgccgcgcaccctatcaggcggccacagggagcgcgcccgcggcctcgccctttctcgcccctcccttctcccctctgggtccagcctcagactgaggcttggagacaggagcattccactcgccacttcggcgcgcccccatgccctcttgtgcgcgtgcgcagaggcggaccgcaaggctagggcgtgagggaagggcgggcgtacgcccttgcgtgcgtctcaggcagcgcgcacgccggcgtgagagggcacggggaaaaggtggctctggccggggtggctcggtttcctggggctatgtaactgagctcgtcgacttaggggtccttcttcgctgccctcgccgcgtgctagcagggagtttccgctcgggagagagactgtcctcacgcccgctgcgcctcctcgacggcagagcaggcttgctcgcccgtgggagcgtcccggccgagaagccctgaggggggaggggaggccattttgtcccgaccgactccccggaaccgggcggagcggctgggagaggctgcggagccgcggtcgccgccctcggaggcactggacgccgccactgtcggggcttcctcaaagctgttcgtaggtcgcccgcgccgtctcgagcctttttcccacgcttccccggtcctccggcctgagaacgcccgagtgaggagttggccgtagtgagagggaccgatcccttggggccgccggcggcgagagcccgagccgctcctcccaatggcgaagaagacgtacgacctgcttttcaagctgctcctgatcggggattccggagtggggaagacctgcgtcctttttcgtttttcggatgatgccttcaatactacctttatttccaccataggaatagacttcaagatcaaaacagttgaattacaaggaaagaagatcaagctacagatatgggatacagcaggccaggagcgatttcacaccatcacaacctcctactacagaggcgcaatgggtatcatgctagtatatgacatcaccaatggtaaaagttttgaaaacatcagcaaatggcttagaaacatagatgagcatgccaatgaagatgtggaaagaatgttactaggaaacaagtgtgatatggacgacaaaagagttgtacctaaaggaaaaggagaacagattgcaagggagcatggtattaggttttttgagactagtgcaaaagcaaatataaacatcgaaaaggcgttcctcacgttagctgaagatatccttcgaaagacccctgtaaaagagcccaacagtgaaaatgtagatatcagcagtggaggaggcgtgacaggctggaagagcaaatgctgctgagcattctcctgttccatcagttgccatccactaccccgttttctcttcttgctgcaaaataaaccactctgtccatttttaactctaaacagatatttttgtttctcatcttaactatccaagccacctattttatttgttctttcatctgtgactgcttgctgactttatcataattttcttcaaacaaaaaaatgtatagaaaaatcatgtctgtgagttcatttttaaatgtacttgctcagctcaactgcatttcagttgtattatagtccagttcttatcaacattaaaacctatagcaatcatttcaaatctattctgcaaattgtataagaataaagttagaattaacaattttattttgtacaacagtggaattttctgtcatggataatgtgcttgagtccctataatctatagacatgtgatagcaaaagaaacaaacaaaagccaggaaaacactcattttcgccttgaatatgtaaatgggattaattttgtcctgtgccttatgtggaaaggaacttctttggttttccttttttgttctggtggaagcatgtgcaggagacatatcatccaaacataaaccattaaaatgtttgtggtttgcttggctgtaattttcaaagtagttaattgaggacaaagggtaatgcagaagtgatagctttggtttgctgagtcttgttttaagtggccttgatatttaaaactattcctgccaccatttcttctccttggccacttcttccttgcgtctccctgcatgctgctttatttgcttctccctccccaaccacctcatggtatatttaagagtgaaagggacaaactagtaggtttgtcaagtttaatataaagcactgatgtaacttgctaggtaaacggaaagataagttctaactgcctactatccaatgtcagttaattggtgtcttcccccctcatttgctctcttccctaaaatgtgtcccagatgccttcatttgctgttttacttctatgttctgcttttcctcctctctttgttcccttcctgtctatccattgagtttatgaaatggaagagttaactgcatgcactagtgtttggagggtgttgtggtttgtctttctaattaggtgtatagcctattcactttcctagaataaatctcttaacctaaatttgagtagtctgcattttggcaactcctctagcagcttggtagcctagtacaggttgtttttttaaaaaaggaaaagcaggaaggaggagtgaattttattaacatgtttgccaaatgtattgagatttggcctctgaagaacactttttcagtgttaagtttctttaccttaagattcagaaatactttagaatattattaattttaagtcctgtctttacatccttttggaaaacttgtattaccatgggtttggaaaaaggacaacgaaaggcttttcatgtaaagataagatctttagctatctctaaccctgtccttttttcactgcattttttctagttttgcttcattgcttatcattaggatagggtaagtgaagtttgctatgctgctagcatcctaagatgatacctttgttgaaagaattgtgaatagcatgattcatttctagcagaggctgagtttaggacagcagcttccattgagaagtctttctgtgtcgtgaatagcattttaatgacctcttggctcacataagcaaacaacatagggacgtatctgctatgaaaatccacaaatttttcagatagtgccctaaaaacaattttatatgcctcactggttgttattcttaggttattcccacacttgactttatcattgtttactactagtaaaaagcagcattgccaaataatccctaattttccactaaaaatataatgaaatgatgttaagctttttgaaaagtttaggttaaacctactgttgttagattaatgtatttgttgcttccctttatctggaatgtggcattagcttttttattttaaccctctttaattcttattcaattccatgacttaaggttggagagctaaacactgggatttttggataacagactgacagttttgcataattataatcggcattgtacatagaaaggatatggctaccttttgttaaatctgcactttctaaatatcaaaaaagggaaatgaagtataaatcaatttttgtataatctgtttgaaacatgagttttatttgcttaatattagggctttgccccttttctgtaagtctcttgggatcctgtgtagaagctgttctcattaaacaccaaacagttaagtccattctctggtactagctacaaattcggtttcatattctacttaacaatttaaataaactgaaatatttctagatggtctacttctgttcatataaaaacaaaacttgatttcca

SEQ ID NO: 4210 - DNA, 2592 bp, Homo Sapiens
  NM_016133
gtgggagtggaggaggaagaggcggtagggggtacgggggctggtcccagaagatggcggaggcgggggatttctggtaggtcctactttaggacaagatgtggtaccgttgaagcgtcagtctttgattcacagacagttgagcttttcagctgggaagcctttccatttttttttttttaacggctttctgaacctatgaaaccatggcagaaggagagacagagtcacctgggcccaaaaagtgtggcccatatatttcatctgtcactagccagagtgtgaacttgatgattcgaggagtagtgctattttttattggagtatttcttgcattagtgttaaatttacttcagattcagagaaatgtgacgctctttccacctgatgtgattgcaagcatcttttcttctgcatggtgggtacccccatgctgtggcacggcttcagctgtgattgggttattatacccctgcattgacagacatctaggagaaccacataaatttaaaagagagtggtccagtgtaatgcggtgtgtagcagtctttgttggtataaatcatgccagtgctaaagtggatttcgataacaacatacagttgtctctcacactggctgcactatccattggactgtggtggacttttgatagatctagaagtggttttggccttggagtaggaattgccttcttggcaactgtggtcactcaactgctagtatataatggtgtttaccaatatacatctccagatttcctctatgttcgttcttggttaccatgtatattttttgctggaggcataacaatgggaaacattggtcgacaactggcaatgtacgaatgtaaagttatcgcagaaaaatctcatcaggaatgaagaaggcaaaaaatatcttttgtacagaaaagcaagatgaaaaggatgtgaaatggtagatataccaacaaaacttcagactgtaaaattgccaggatgcagttttccccttgattggcgtgtgtgtatatatggataaatatatatatacacacacacatattactgcaatctgtgattgcttcatctgtaaatcagttgtaaacctttacatatttgacttaaataactgtaagatatatatgtactacattaaaaagtgttgattaatagatgaaatttttaaattaattttttaaaacatgccatacattgtatcacaatgttaatgtgccaagatattgttcctgtcatgcagagtataagaatgctttgaacaatttgtagacttagtgaaataaaataagaggaaagccaaaaacaaacaaacaaaaagcatatggggagctggtattttctctttagcttactgttgtgcctttttatttttctaatcacagcagtatgagttatgagtgccctaatttgtggttagtttctaatttaatgttgtttcatagagtttggagtgttttgatacagggtgaaaatgaacttctggtttcaaacctgcgttactggagacagcccaaagagtaattttctgttttgacaggttttactggaagtatatgtgatgagcagaagaggttatcagcattaaattgttttggttctaaatttggaacagtatatataattaaaagtaaggaacattagaggatttaattagaataaatacatgttttggaaatacagtgacctcttgcagtgtcacaaaagtgcaaagtgatattagctgtcatctgcaatacagaatctcattgcttttgcacatggagcatataggaaactccaaacagatcacaatgaggtttctaaatctgttgggttctgtcttctattgggttctgtgaagcaaaccactgtagctttagctgggttcagtcatatgactcgttggtggaatgcctaggtttttcatcttacatgcagtcttgggggtggatgaatacataatttcttatgtattcgtgtatccattagtgaatagttcaagtctgtttaagagtgtattgagatggcattctctgcatgttaaagatcttaatggcaaccagcacctcttaagtatggtttaaacatattcttagctaattttttccattagtttttgaaattggtggcagttgtctgatccacaagggcaagatcttctgagtactctggggtgtgagtatgtgtgcacacgtgtgtgttggagtgagtgagagaatgtgtctgtgcatgtggccatgctttcctagaatgtcaagtagatatttttacactttgagttttaaagcaattactatcagactgagatcttgtatgccaaactttaatctgcttttatgttttcaggctgaaggtgtgaaaatcctaagaggatttcatattgaatatgtgtacacaatcttaactatcgtggtggaaaacatactactataatttattattatatcttccagataatgttattcatttagaacaaataaggtatattttttagaatcaactttgtaagcactataaaatctttaataagttataaggtctatgatgtgtttactttaaaaattgctgttaaaagcaacacgtattaaatatgtaattatcaaaaaaaaaa

SEQ ID NO: 4211 - DNA, 1928 bp, Homo Sapiens
  NM_016134
agggctgcagtcacggggcggcgcggagggccccagcccagtcaggggtgtggccgccgccaccgtaaggctaggccgcgagcttagtcctgggagccgcctccgtcgccgccgtcagagccgccctatcagattatcttaacaagaaaaccaactggaaaaaaaaatgaaattccttatcttcgcatttttcggtggtgttcaccttttatccctgtgctctgggaaagctatatgcaagaatggcatctctaagaggacttttgaagaaataaaagaagaaatagccagctgtggagatgttgctaaagcaatcatcaacctagctgtttatggtaaagcccagaacagatcctatgagcgattggcacttctggttgatactgttggacccagactgagtggctccaagaacctagaaaaagccatccaaattatgtaccaaaacctgcagcaagatgggctggagaaagttcacctggagccagtgagaataccccactgggagaggggagaagaatcagctgtgatgctggagccaagaattcataagatagccatcctgggtcttggcagcagcattgggactcctccagaaggcattacagcagaagttctggtggtgacctctttcgatgaactgcagagaagggcctcagaagcaagagggaagattgttgtttataaccaaccttacatcaactactcaaggacggtgcaataccgaacgcagggggcggtggaagctgccaaggttggggctttggcatctctcattcgatccgtggcctccttctccatctacagtcctcacacaggtattcaggaataccaggatggcgtgcccaagattccaacagcctgtattacggtggaagatgcagaaatgatgtcaagaatggcttctcatgggatcaaaattgtcattcagctaaagatgggggcaaagacctacccagatactgattccttcaacactgtagcagagatcactgggagcaaatatccagaacaggttgtactggtcagtggacatctggacagctgggatgttgggcagggtgccatggatgatggcggtggagcctttatatcatgggaagcactctcacttattaaagatcttgggctgcgtccaaagaggactctgcggctggtgctctggactgcagaagaacaaggtggagttggtgccttccagtattatcagttacacaaggtaaatatttccaactacagtctggtgatggagtctgacgcaggaaccttcttacccactgggctgcaattcactggcagtgaaaaggccagggccatcatggaggaggttatgagcctgctgcagcccctcaatatcactcaggtcctgagccatggagaagggacagacatcaacttttggatccaagctggagtgcctggagccagtctacttgatgacttatacaagtatttcttcttccatcactcccacggagacaccatgactgtcatggatccaaagcagatgaatgttgctgctgctgtttgggctgttgtttcttatgttgttgcagacatggaagaaatgctgcctaggtcctagaaacagtaagaaagaaacgttttcatgcttctggccaggaatcctgggtctgcaactttggaaaactcctcttcacataacaatttcatccaattcatcttcaaagcacaactctatttcatgctttctgttattatctttcttgatactttccaaattctctgattctagaaaaaggaatcattctcccctccctcccaccacatagaatcaacatatggtagggattacagtgggggcatttctttatatcacctcttaaaaacattgtttccactttaaaagtaaacacttaataaatttttggaagaacaaaaaaaaaaaaaaaaaaaaaaaaaaaaaa

SEQ ID NO: 4212 - DNA, 2667 bp, Homo Sapiens
  NM_016138
atcagtccgagccaagggcactattggccagttccgttcaacgaagtggttgctttttttagttccggcaatgagttgcgccggggcggcggcggctccccgcctttggcggctgcgcccgggggcccggcggtccctctcagcttatggaagaagaaccagtgtcagatttcgcagttcaggaatgactttagacaatatcagtcgggcagctgtggatcgaataatccgggtggatcatgcaggcgaatatggagcaaaccgcatctatgccgggcagatggctgtcctgggtcggaccagcgtcgggccagtcattcagaaaatgtgggatcaagaaaaggaccatttgaaaaagttcaatgagttgatggttacgttcagggtccggccaacagttctgatgcccttgtggaacgtgctggggtttgcactgggggcggggaccgccttgctcgggaaggaaggtgccatggcctgcaccgtggcggtggaagagagcatagcacatcactacaacaaccagatcaggacgctgatggaggaggaccctgaaaaatacgaggaacttcttcagctgataaagaaatttcgggatgaagagcttgagcaccatgacataggcctcgaccatgatgcagaattggctccagcctatgccgtcctgaagagcattatccaggccggatgcagagtggcgatatatttatcagaaagattataaagtgtgtccagttttgcctgtctataaaagatgatagtaatttaccaagtgacatttgcagagaaacaggtgtacagttatcgttgtacttttgtacaatgtgaattttgttaataaattataaggtttgtttttttttttttaaactctgcagtgttgatttttctctgggttgttttttctgccatgagaccaacaggtcaccagccttgttcaagttacagcaaacgaagctgggccttgtttggtctcatacttaattttcttttatatacatgtttttcttttacatgcatatatatatattttattttattttatgttttttggagacagggcctcgctcttttgtccaggccgggtcacaactcactgcagcctggacctcctagcctcaagcaatccacccacctcagccttccaagtagctgggactacaggtgtgcaccaccacagctggctaattctatttttttatagaggcgaagtctcactatgtcgccaggctggtctctaactcctgggctcagtgatcctcccgtttcgacttcccaaagtgctgggattacaggtgtgagccacttcaccaggcccattttctcctaaaacttcaaggacaaatcattaataatgtaacaggaatctttaggagaaaaaacaatttggtttactgataacaaaagataattggaaacatgagagtatttgagattggccaagcagaactatgaagtccatcaagtaagtcaaagatcatcgtttctgttttgaattgtgggtgataatgggtgggagagtgctacagtctgtatgtctgtgtctccctagaattcatacgatgaaatcttcactctcaagttgatagaaggtggggcccttgggaagtgtgaggtcatgagagtggagccctcatgaatgggatcagtgccttatgaaaggccctagagagatacctcatcctctccacagtgtgagacttcaaggggaagtatgagacttctctgaggaagcagacccttcacaagcaaaatcagccagcactttgatcacggacttcccagcctctaggactgtgagcaataaatgtttgatgtttataagccacccagactgtggtattttgttatagcagcctgaacagactaagacgggggtgttgcttccatcaaaggatgtactaagttgtggattatttgtgaaattgaattacaaccttttccttaaggtcttttaccacctcccccccaaaaaaatcccccaaaactgattcagattttcatactttaatgaaatattttataatttgcaaatttttaagtaatttatgaaaaacctagatcagtggatctcctctctggctgcccattagaatgtcctgtggagattaaacttttttttttcagtttatggaccaagagttttgatttatttagggtggagttcaggatcagaatggtttcagaagctcccaggtgattccggagtgagttggagctgcaagcccctgagctagattataagatgcttctgggaaagaaccacattttaggaatttgcttcccacccagtgccctgcatttaatcagcacctgatgacttggcaggacttgccccaccagggtctggctttgaagggtagtggacaccaggatcctttggattaatcctctgccacctctctcttttcctcaaccgagagtgaatttatgtaattgagtgaaagtctacgaatcataattgtaataaattaaggctgggcatttgtttgaaattagataggataaagccaaaggtttgaacaagttgtggatggtttgtaaaaattaatcttacaaaataaatgctgtgtgtgaacacgttgattaaattcaaaagggtattatttggtttttctgtaaattgaaccttgaaataaaagcacaacaaggttttcttaaaaaaaa

SEQ ID NO: 4213 - DNA, 2556 bp, Homo Sapiens
  NM_016142
agtgtgggaggggcagtggaactggagtcagctaatggctgacgcactacgcgcagagggaaagacgggtcaccaatagcgacacggatatggccccgcgggcggggtttaggcccaaagtggtgtcggagcagcgcctattagtgtcatcctcaccgtcacggccggcgcctcctcctggattcattcactcgctcttttcattcacgaaggtagtgaggcctagtggaaagccatggagagcgctctccccgccgccggcttcctgtactgggtcggcgcgggcaccgtggcctacctagccctgcgtatttcgtactcgctcttcacggccctccgggtctggggagtggggaatgaggcgggggtcggcccggggctcggagaatgggcagttgtcacaggtagtactgatggaattggaaaatcatatgcagaagagttagcaaagcatggaatgaaggttgtccttatcagcagatcaaaggataaacttgaccaggtttccagtgaaataaaagaaaaattcaaagtggagacaagaaccattgctgttgactttgcatcagaagatatttatgataaaattaaaacaggcttggctggtcttgaaatcggcatcttagtgaacaacgtgggaatgtcgtatgagtatcctgaatactttttggatgttcctgacttggacaatgtgatcaagaaaatgataaatattaatattctttctgtttgtaagatgacacaattggtactgcctggcatggtggaaagatccaaaggggctattctgaacatttcatctggcagtggcatgctccctgtcccactcttgaccatctattctgcaaccaagacttttgtagatttcttctctcagtgcctccatgaggagtataggagcaagggcgtctttgtgcagagtgtcctgccatacttcgtagctacaaaactggctaaaatccggaagccaactttggataagccctctccggagacgtttgtgaagtctgcaattaaaacagtcggcctgcaatcccgaaccaatggatacctgatccatgctcttatgggctcgataatctcaaacctgccttcttggatttatttgaaaatagtcatgaatatgaacaagtctacacgggctcactatctgaagaaaaccaagaagaactaagcattgataactgcattgtaacttggccagatgctccagcatatgcacgttcactgcaaagcaccctactggttttgaaaatctgaccttgtcatttcaatagttattaacatgactaaatattatcttaattaagaggaaaatagaagttgcttttaggggtttctgacatatattctggatactatccgaggtaattttgaagtttaatataaatgctcatatcaaatgaatatagaactaatattgtcgggaacacctaatagaaaggaatactattatagcaaatcacagaatgatagactcaagcataaaacttggcagttttatctgcttcaaaatgccattgatcattattcctgtattttctctgaaactgattataaaaaccaatgtccagctactcttttgtttttgacacttgaagaaatggagatcgatttgatttgtttataagcagacacactgcaatttacaaagatctctttacggttttataaaattatcttccagtttgtacatttatatggaattgttctttatcaagggtagctaatgacatgaaaataattgtgaaatatggaattatttctgacacatgaagcccactaaactatgctttcttataatgcatatttcttctcagtttaaatgtatgtaaatatcgaagctatatggtatgatttataaagataaatgggccaaagtgtacattgagactggcagccatctatggtaccactgaaaccctgacccagaaaagtggcttgcttggacacccagctgcctttgtttctgcattaaaccaatattgatcacacatatgacacaggctagtcctataaaagtaatgacttcatagaaatggcattataatttttaagttgatactctacaggtagctattgatataattagttttaataaaacatgctgcaaccatggtatacaacaaaaatacatttctttggtgattgaaattaaggccgtatttacaatgacttaatataagactgacttttatcctgcttcataacttgtatggagaactcaccaagaaagaattcaatactgtgaaatatgcagcaagaagattggtctttacctaggctgtgtttcctaagctctgagttttcagcaccagtagatttgtattaaaagaaaaaaaaatggggccttagcttctggcttttaattttgccagctaaggacataaaacaaaaataaacaaacaaaaacaaatagccatctgctatcagcatcattatgtaaaagaaaatatattttagcccctaaaattaggaagaatgtaatctcagaataaaggttgtcatttaagttgaataaatatatagctttatgaaaaacacaaaaaaaaaaaa

SEQ ID NO: 4214 - DNA, 1216 bp, Homo Sapiens
  NM_016146
tgacgcatactatagcgctgttttcctgcactgataaacgaaaagcaatccaccaggtctcggcagctaactttccggcactacttatgcccgagcgtgtcgctcccagtgcgcaagtgcagcaggtggctgcacggggggcgcgggaggaggaggaggaggaggaggaggctggggtggggccggcggcaagtgctgtgatgcggttccggggaggggccgtcgggtagaggctgaataccagtttccgagcggcaaggcagcgatggcgatttttagtgtgtatgtggtgaacaaagctggcggcttgatttaccagttggacagctacgcgccacgggctgaggctgagaaaactttcagttatccgctggatctgctgctcaagctacacgatgagcgtgtgttggttgctttcggccagcgggacggcatccgagtgggtcatgcagtgctggccatcaatggcatggacgtgaatggcaggtacacggccgacgggaaagaggtgctggagtatctgggtaaccctgctaattacccggtgtccattcgatttggccggccccgcctcacttctaatgagaagcttatgctggcctccatgttccactcgctctttgccatcggctcccagctgtctcctgaacagggaagctcaggcattgagatgctggagacagacacattcaaattgcactgctaccagacactgacagggatcaagtttgtggttctagcagatcctaggcaagctggaatagattctcttctccgaaagatttatgagatttactcagactttgccctcaagaatccattctattccttagaaatgcctatcaggtgtgagctctttgaccagaacctgaagctagctctggaggtggcagagaaggctggaacttttggacctgggtcataggctgaacctgttatggacccccaaattctgagagttcctgcaacaagaatactgctgttgacactccagtggaaatcccagcagccttgttagtgcacttgaaagtgggagaatgctgaccctgatgacttgtactgattcctgagccttaacactgtgctctttccttctgtatataccatggtcttactttccaactctgtacagatttatttatggaggagctaggtccataaatgttgtaataaatattcctttgatcttggtgtttgcaaaaaaaaaaaaaaaaaa

SEQ ID NO: 4215 - DNA, 896 bp, Homo Sapiens
  NM_016167
cagaggtcagacggtctagcgctgcgtgggccatggtgcagctccgaccgcgagcgtctcgcgccccggcgtcggcggaggcgatggtggacgagggccagctggcctcggaggaggaggaggcggagcacgggctgttgctcgggcagcccagcagcggcgcggccgccgagcccctggaggaagacgaggaaggggacgatgagtttgacgatgaggccccggaggagctgactttcgccagcgcccaggcggaagcgagagaagaggagcggcgagtgcgggagaccgtgcgcagggataaaacgctcctgaaggagaagaggaagcgacgcgaggagctgttcatcgaacagaagaaaagaaaactccttccagacactattttggagaagttaaccacagcttcacagactaacatcaagaaatcgccaggaaaggtgaaagaagttaatttgcaaaagaaaaatgaagactgtgaaaaaggaaatgactccaagaaagttaaagtacaaaaagtacagtctgtcagccagaataaaagctacttggccgtaaggctaaaagaccaagatctgagagattcaaggcaacaagcagcacaagccttcatacataattcattatatgggccaggaaccaacaggactactgtaaataagttcctgtctcttgccaacaagaggttaccagtgaaaagagctgctgtccagtttttgaataatgcttggggaatccaaaaaaaacaaaatgccaagaggtttaaaagacggtggatggtcagaaagatgaaaactaagaagtaaatcaatgctaaatgaagaatctgtactttgtatgtatagaatttatctaataaatcattcatagatcaaaaaaaaaaaaaaaaaaaaaaa

SEQ ID NO: 4216 - DNA, 5862 bp, Homo Sapiens
  NM_016173
gcgtccgagggagcgcgcgacgggccacgcacgtccgggcgtccagttcggggcagcttctccggctggtgggtgggtggggcagcctttcaggcagggtggcaaccaactatatctgaggaccagagccattttggggcaccagagcttgtgacctctccatctccacccagctgggtccaggggccactctcagcactcacctcagcagctgacatcataaagcagacttgggaacctggaagcactctggagaacctttccctgagacatggagctttggggccgaatgctgtgggccctcctgtctggcccagggaggaggggaagtacccggggctgggccttcagctcatggcaaccccaaccacctctggctgggttatccagtgccatagaactggtcagccactggactggggtctttgagaagaggggtatccctgaggcccgggaatccagtgagtacatcgtggctcatgtccttggagccaaaacatttcagagcctgaggccggcactttggacccagcccttgacctctcagcaactacagtgtatccgggagctgagtagccgtcgattgcagaggatgccggtgcagtacatccttggagagtgggacttccaggggctcagcctaaggatggtgcccccagtgtttattcctcggccagaaacagaggaactggttgagtgggtgctggaagaggtggcccagaggtcccatgctgtgggatccccaggcagccccctcattctggaggtgggctgcggatcaggagccatctccctcagcctgctgagccagctcccccagagccgagtcattgctgtggataagcgggaagctgctatctctctgacccatgagaatgctcagaggcttcggttgcaggacaggatttggatcatccacctcgacatgacctcagaaaggagctggacacacctgccctggggccccatggacctgattgtcagcaaccctccctacgtcttccaccaggacatggagcagctggcccctgagatccgcagctatgaagaccccgcggccctggatggtggggaggagggcatggacatcattacccacattctggccttggcaccccggctcctgaaagactctggtagtatcttcttagaagtggacccaaggcacccggagcttgtcagcagctggcttcagagccggcctgacctgtaccttaatcttgtggctgtgcgcagggacttctgtgggaggccccggttcctgcatatccggaggtctgggccatagcatggctgccctgtggatgccttgtcagtgccgccagcctgaccagaggggaggtggatggcactttccagagcccaggttcttatggcatttcccagggttctgtgatttccccatgctctgcatttctaggatatttctaggacacctggattggctccatcacatcagagtggctgagggcagttgctctgtgttggtgaaattgctgtgggggtatcgggggatatggccagtaaagtattgagagactaacaaatggtgacctaatgttttgtccatgacttgcaggtcccctgacccccttactcccaggtagcactggggcaagggtttccttctgccccagcagggctggccgtcagtcccctgcttggtagtggtgtgggggtgcagtgtggaggaaggcacgtgagtcctcactcctggccttggataccatgggtcctggcatagagcagctcactcccagggattgattagtcctccactgccctgggtgcatgcgtacacaattccctggccaagcctggctcgagcacaggaagctcatctgcgttttggctcaaggatgactgcctgctttctggaggggagggtctggaggtctttgctgcacagttcctgggtcgcacatccacgttcatttaactgaaggcttgagccagtgaggggtgtttcctttttatccccatagcttttagctaaaacatccctcccgagttgaccccctggggtttcaaataacccatgtgtccctggttggggctggggagagtgagaagctgagatactgggcacagggttgtggcctccaccccagctctggtctgtgcagactcatggccaccaggaggcctgcagatccagccttcctgtcaacagcgacaggaaatctctaggttggtgagtgctggtgatgtgagcctacatcagggtgggtcctaagaaacatggcaaaccaggctgtctcattccactagactgccccctgccaccctggcacttcccagggcctggcagtatggtctgatgggcagtatggtccaataggcagcatcctctgctgcagctgggagagctgagttccagggctgtgtcctgcagtgggaccttgggcaactcctttccctatgagaagctggctcttctgagtccagggccaacgccaactggcaacctctttactcttagtcaagtggaatgtgcatgctggcatctgaatgtccattcgccaggcatggagagcaagagaaggtatgtactgcctgaggtcacatgacagtgaccaagtggagacagtaagttagatccctccctttggggagcctatattgctggagtcatacccagcctaagtgttgccctgcactatggctggaggacacatttggtagaggtcacactgcagctcccagtgccccagtgtcctgccctgtgcccagccccagctgcatggactctgagctgcccctggcttcctttaaggaggctgctccagaaggaacctgggtggggagggcgaagggggtgcacaaccagggcaaggctccccacttccttagtcccccatgctcacagacctttgcctgctaaggtcctcaccagtattgccctttctgtctttctccttgtgccctttggctcttgctgtcttcagcagcatctcagggtagctgccctgacctcggagcagtctgtcgcccccctacacctcagccagtcctggcttccctgatggtctctccctcctggcctcaggcccattcctgaggaagggccttggcgagcttgtggatgttgcaccagaagagagtgcagtgttggagagtgacactgtcggggcagctggggccacaagcaggagccggcctcgggcacaactttctgcccagaaaaatgtgcagcttgactctgctgaggaaaaggtccaagccaagaggactggcaggcggggcctcaagcctgcagccactggcttgattgggccctggacgttgagcccagatgttggagccacaccagcctggatttcaatcccagaatctgcccctcaccaggatgtgaccttgggcagatgacttcacctcactcagccttggcttctaaggctgagaaatgggacttaatgctttattttataggatgcatgtgaggagcccatggaatgtgcctggcttggcacattgtggcatttttccttgccttcctcggagggcagacacagggaggaaggacccagtgccctcaggcgtccatctgatgcatgggaccaacataaggcaggcagggatacaaggcagtctggaaagaagggaaggcaggagtttcagtcttgggctcttgactcctcactgttgtctagagatggagccagcaggctggtagcctggcagcctacatctcccctcagcctctcctcactatggccccagtgccttgaggcccaggccagggcagccagtggctctagctcagggaaagccaggcccacctgccctatcccctcccttgctcctgaggccaaagccagagactcgaacagcctccccaccaccaccagcatatgtcaaggagcacttgcaggcagaatgggaggaggacatggagctgatggagtccaggctgtgcaagcccctgaggtcttgagagatgtgcccactgcccgtgcagcctccttcagccagagcccagagcatagacaggagtgtaggagtccctgtttgatgtactctgggagagtaattctatctcctcttctgatagttggggaaactgaggccttgtctcacagttggatgcttttcccagttgtcagtgggtttctccatgggtctcatacagctgccttattgaaataggccccgaaccccctaaatgcaaaaaatactcttttttgctcctttacccccacctggaccctgggctattggctgctcccaatccttgccccaaacacttagctggctccccatgacttaagtgtgttctcttgtgtcctatggaatccagttctgaagaggtgggggaggacaactgtgggaaaagccctgggggcccctcccaaggccccatcagtgctctgagtaggctgtcatcagaacaaagggctccactgctgacaaggtttgagaactgctggcttgaggtgagaacccctttaacctctgcgggacagcatgtctttccctatccaccttcgattcttttctcttttttttcttcattggctccttcttagtggattctcttctctactgccctgggcttcagcctttgtgcagtactctcgatgccctgaacacacaccttccctttgcccaggcggtgcaaacaatccacttcttcaagctccaacacaaatgctgcctcctttaggatgcctgctctgtgctctccctgcctcccctagcccatacctctgctggcaccttctgtaccatgccttcagaaaccttcttatccccctcatctctggggccccctgtggatctggcatacccaagttcagtaaatgtctatcagtaagctgatggtacatgcattttctagaatagagctgggacttcccatgtggcccacatctgacctggcagcccatgtattccggtcattagggatgggaagccatgaggacctggccttctgcccgacccaggcagccattcaagttgagcaatggccacttcgaagactcaagtgcacctgatccctgcgcaacagccacaccaggagaacaggctgtccttggcggcagtaggagcaggcgccaggtttcctggagctcttggcttcagccagcccccagccagagtcctggctaggacagtgacctgatctcctcctcatgaccttctgccctggacaagccccctgaactggatttgggactgtcaaagcaactctacccctgctctggtaggctgaacagtgaccccccaaaatggcagtgtcttaatcacctaaaccttaacatgtgactatattaccttcacatagcaaaatggactttgcagatgtgattaaggatcttgagatggaaggagtatcctggatttttcaggtaaactgagtataatcacaagggcctctgtaaaggaggcaggagtgtcagagtgacggaagaaaatgtatgtaacaatggaagcagaggtcagagtgatgcaattgctggaggaagagccatgagccgaggaatgcagacagcctcttctcctctggggcctcaagaagaatgcagtcctgccaataccttgattttaagccctgtgaaactgatttcagattgctgacctccagaacagtaagatcataaatttgtgttgttttcacatgtgtgaaaacacatgtgtgataatttgttacagcagccacgggaaacgaatatagattgtggtgcccaaattagagtgctgctgtaacacacgcctactgattgaagtggctttggaattgcaacgtggaaatgggcagaggctggaagaattttgagagtcatgataaattgccttaaccacctctcttctgataggtgatgtggccaggggaactcttcctcaaccttcagacctaaa

SEQ ID NO: 4217 - DNA, 2273 bp, Homo Sapiens
  NM_016183
acagagctgggatagcgcgcgaggccctcggtcggacgggacgctcgggattcagggactgcctcggcacacgggaagttgccctacaggcgcgggagaaagcgcaggcggcggcttggcagggagaggcaggctgcagtgcacattgggtcaggcacacgcgaggggcagcccccgagggccgtcccagagtcccccgcgccgccggggtcctaacggggtgcaccgtcttccgccgcacgtggattcagcgcgatgcccaaatccaagcgcgacaagaaagtctccttaaccaaaactgccaagaaaggcttggaattgaaacaaaacctgatagaagagcttcggaaatgtgtggacacctacaagtaccttttcatcttctctgtggccaacatgaggaacagcaagctgaaggacatccggaacgcctggaagcacagccggatgttctttggcaaaaacaaggtgatgatggtggccttgggtcggagcccatctgatgaatacaaagacaacctgcaccaggtcagcaaaaggttgaggggtgaggtgggtctcctgttcaccaaccgcacaaaggaggaggtgaatgagtggttcacgaaatacacagaaatggactacgcccgagctggtaacaaagcagctttcactgtgagcctggatccagggcccctggagcagttcccccactccatggagccacagctcaggcagctgggcctgcccaccgccctcaagagaggtgtggtgactctgctgtctgactacgaggtgtgcaaggagggcgatgtgctgaccccagagcaggctcgcgtcctgaagctttttgggtatgagatggctgaattcaaggtgaccatcaaatacatgtgggattcacagtcgggaaggttccagcagatgggagacgacttgccagagagcgcatctgagtccacagaagagtcagactcagaagatgatgactgaaagggactcgggactgaaggtctcctggaagcttctgggtctcactggaccatcaggactgctgccgcccctctggagagagcagctttttatttgtctgtagacagggaacatgatgggcactgacctcctgtaaagaataaaactgtgggccgggcgcggtggctcacgcctggaatcccagcactttgggaagccgaggtgggcagatcataaggtcgggagattaagaccatcctggctaacacggtgaaaccccgtctctactaaaaatagaaaaaaaaactagttgggcatagtggcatgtgcctgtagtcccagctactcaggaggctgaggcaggagaatcacttgaacccgggaggtggaggttgccgtgagttgagattggaccactgctctccagcctgggcaacagagtaaaactctgtcccaaaaaaaaaaaaagaatacaaccttgcaggatgtctctcctggagacagcaagagggagaggagggagagggctctttcttagaaaagaggcctttggtgagcccagaagtttgaaaccagcctgggcaattcagcaagatcccgtctctacaaaaaataaaaaaaaattagtcgtggtgccacttgcctgtggtccccactgcttgggaggctgaggtgggagaattgcttaagcctgagagttggaggctcagtgagccatgatcatgccactgcactccagcctgggtggccattgaattctgcgtggattgcctcagtttgccttgtcagccaacttccactggctgccttggcactgccatgacagcacagctccacaccagagctggggtttctcttcagtcctgggtaccccttggcagagggatttgctgaggaaaattaggtatccttcctagccctccacacacttccaaaccagggctgcggatctgatggatgccaggaagacagccttgggctgagagtgacatcactgcaagagttgagagccagcgtctaaagtgtccacggcatcctgggaggttttatccttggtgactctaatggtagatttttgtccaccttgttctatttgcttttgtttgtttttgatttttctgttttaaaattttaaggagagatggggtttcaccatgttgcccaggctggtctcaaactcctgagctcaagcgatctacccaccttggcctcccaaagtgctgggattataggtgtgagccaccgcatccagcccacattgttctatttgtatttcatgaaagcagttctgaatgagagtaaatcagcttcagggtgta

SEQ ID NO: 4218 - DNA, 1602 bp, Homo Sapiens
  NM_016185
ggcttaggctgagccgtggccgccacagcccatcgtaatgccgcatggtgcttggcactccagagagccaataggaatgaaagaattcatttgaatcggccaatgccggcgggttagggggcgggggttgaaaaccctataaaggcgtcgatcggccggacaggcggcagcggcggctcctgcagcggtggtcggctgttgggtgtggagtttcccagcgcccctcgggtccgaccctttgagcgttctgctccggcgccagcctacctcgctcctcggcgccatgaccacaaccaccaccttcaagggagtcgaccccaacagcaggaatagctcccgagttttgcggcctccaggtggtggatccaatttttcattaggttttgatgaaccaacagaacaacctgtgaggaagaacaaaatggcctctaatatctttgggacacctgaagaaaatcaagcttcttgggccaagtcagcaggtgccaagtctagtggtggcagggaagacttggagtcatctggactgcagagaaggaactcctctgaagcaagctccggagacttcttagatctgaagggagaaggtgatattcatgaaaatgtggacacagacttgccaggcagcctggggcagagtgaagagaagcccgtgcctgctgcgcctgtgcccagcccggtggccccggccccagtgccatccagaagaaatccccctggcggcaagtccagcctcgtcttgggttagctctgactgtcctgaacgctgtcgttctgtctgtttcctccatgcttgtgaactgcacaacttgagcctgactgtacatctcttggatttgtttcattaaaaagaagcactttatgtactgctgtcttttttttttttcttttgaagaacaggtttctctctgtccttgactcttgggtctgtgggccatggcatgagtgttttctagtagtagattggagggaaagctttgtgacacttagtactgtgtttttaagaagaaataatttggttccagatgtgttagaggatcttttgtactgaggtttttaacactttacttgggtttaccaagcctcaactggacagaccataaacagtccacaggcaccgttcctgccaggccccaacccacagggagtctctccgcagagccttcttggtgttgccctaacttgccagtggcctttgctcagagcctcctcctgtgacatgtgaacaatgaagaggcctgcgcctcctgccttgccgcctgcaaagcaaagaaactgccttttattttttaaccttaaaaagtagccagatagtaacaagactggctggctgatgagcaaagcctttgctctcacgcagaggaaggcttggatgtacaatgaaactgcctggaactaaaagcagtgaagcaagggaggcaatcacactgaagcgggtcttcctccaggaacggggtcccacaggcgtgttgttttaaataacctgatgctgtgtgcatgatgctggtgcttgaccatgaaaggaaagtctcatccttaaaatgtgttgtacttcacaatcctggactgttgcttcaagtaaacaatatccacattttgaaa

SEQ ID NO: 4219 - DNA, 3423 bp, Homo Sapiens
  NM_016203
gcggccgcccgtagcctaattgcgcagagggctcgccttgcacctcctcttcccccgccgccctccctctcgcccagaaaggaggacggacccagctgcaggctccgagctggtttattctgcggccgaggattacatttatgcacgaacgggcttactggttccagattccccacttgggcacaggcataggaggcttgttttccaaattgctggttttaattgcacctgcctttcagattacctctgggaatctgtgggaggagccgagagggtggaaaatgtttcttagctttgcaaaaggaagaaaactttgtcacccagcgggagacctcagccacgagtaacccggggagacaccagaaccgggacgggctttgactgatttgcctacgagggttccgtaggaaaggacgcttgaattcggcgcttcggcggcggcggcggccgcgcgagttccctgctcaccctccctctccgcggaagtccccacgaggtggcttcagggtgtaacagagcgcgcggctccagtccgaaggcagcggccgggggagggaaggaggggaccgaacccccgaggagtttcgcagaatcaacttctggttagagttatgggaagcgcggttatggacaccaagaagaaaaaagatgtttccagccccggcgggagcggcggcaagaaaaatgccagccagaagaggcgttcgctgcgcgtgcacattccggacctgagctccttcgccatgccgctcctggacggagacctggagggttccggaaagcattcctctcgaaaggtggacagccccttcggcccgggcagcccctccaaagggttcttctccagaggcccccagccccggccctccagccccatgtctgcacctgtgaggcccaagaccagccccggctctcccaaaaccgtgttcccgttctcctaccaggagtccccgccacgctcccctcgacgcatgagcttcagtgggatcttccgctcctcctccaaagagtcttcccccaactccaaccctgctacctcgcccgggggcatcaggtttttctcccgctccagaaaaacctccggcctctcctcctctccgtcaacacccacccaagtgaccaagcagcacacgtttcccctggaatcctataagcacgagcctgaacggttagagaatcgcatctatgcctcgtcttcccccccggacacagggcagaggttctgcccgtcttccttccagagcccgaccaggcctccactggcatcaccgacacactatgctccctccaaagccgcggcgctggcggcggccctgggacccgcggaagccggcatgctggagaagctggagttcgaggacgaagcagtagaagactcagaaagtggtgtttacatgcgattcatgaggtcacacaagtgttatgacatcgttccaaccagttcaaagcttgttgtctttgatactacattacaagttaaaaaggccttctttgctttggtagccaacggtgtccgagcagcgccactgtgggagagtaaaaaacaaagttttgtaggaatgctaacaattacagatttcataaatatactacatagatactataaatcacctatggtacagatttatgaattagaggaacataaaattgaaacatggagggagctttatttacaagaaacatttaagcctttagtgaatatatctccagatgcaagcctcttcgatgctgtatactccttgatcaaaaataaaatccacagattgcccgttattgaccctatcagtgggaatgcactttatatacttacccacaaaagaatcctcaagttcctccagctttttatgtctgatatgccaaagcctgccttcatgaagcagaacctggatgagcttggaataggaacgtaccacaacattgccttcatacatccagacactcccatcatcaaagccttgaacatatttgtggaaagacgaatatcagctctgcctgttgtggatgagtcaggaaaagttgtagatatttattccaaatttgatgtaattaatcttgctgctgagaaaacatacaataacctagatatcacggtgacccaggcccttcagcaccgttcacagtattttgaaggtgttgtgaagtgcaataagctggaaatactggagaccatcgtggacagaatagtaagagctgaggtccatcggctggtggtggtaaatgaagcagatagtattgtgggtattatttccctgtcggacattctgcaagccctgatcctcacaccagcaggtgccaaacaaaaggagacagaaacggagtgaccgccgtgaatgtagacgccctaggaggagaacttgaacaaagtctctgggtcacgttttgcctcatgaacactggctgcaagtggttaagaatgtatatcagggtttaacaataggtatttcttccagtgatgttgaaattaagcttaaaaaagaaagattttatgtgcttgaagattcaggcttgcattaaaagactgttttcagacctttgtctgaaggattttaaatgctgtatgtcattaaagtgcactgtgtcctgaagttttcattatttttcatttcaaagaattcactggtatggaacaggtgatgtggcataaggtgagtgcacggtatgttcagatcacagtgccttatgtccgaatacagcaatatgtcaccgccgcagccggggcgcacgcgtgtgaaacaacaccgagcttgaatgtggaagtctttgaaccttttaccaaatcagtttgttttctttagatttgtcaaaaagttgtaatttgaatataaataattactttaaaattgtaatgacacttttacacgtaagtgttttgttctgggctaccgtgtcaacgaggctgctttacaacagctttatttatttttactttcatgcaatttttttacacatcttttggtggagtaaacttcaccacatccatgaataaactctcagttattttgaaatggcaaatttctcattatttaagtttggatctggaaaggacatgacttctgaaatagccgctgctgggttttaaaagctgaggtctctcaaagtgtggaggagacgttgccgtcaggcgggagccaagtgccgggaagatgtctattttttttcttgtgtattgaaatgtaaaatcatgatgtttgttatgactgctgatgcgattgtttttgtaaattttattgtggcatatacagtattgtcatacagttgaagagaaacaatgtttcctaatgtaagtgctctgaaaatgttgacactgtatatatatatatgaggatagtttgttttttttttgttttgggtttttttttttcagattgaaaaattaaaatagatcctactatctaccattttgttaaaaaaaaaaaaaaaaaa

SEQ ID NO: 4220 - DNA, 3018 bp, Homo Sapiens
  NM_016205
gcccggagagccgcatctattggcagctttgttattgatcagaaactgctcgccgccgacttggcttccagtctggctgcgggcaacccttgagttttcgcctctgtcctgtcccccgaactgacaggtgctcccagcaacttgctggggacttctcgccgctcccccgcgtccccaccccctcattcctccctcgccttcacccccacccccaccacttcgccacagctcaggatttgtttaaaccttgggaaactggttcaggtccaggttttgctttgatccttttcaaaaactggagacacagaagagggctctaggaaaaagttttggatgggattatgtggaaactaccctgcgattctctgctgccagagcaggctcggcgcttccaccccagtgcagccttcccctggcggtggtgaaagagactcgggagtcgctgcttccaaagtgcccgccgtgagtgagctctcaccccagtcagccaaatgagcctcttcgggcttctcctgctgacatctgccctggccggccagagacaggggactcaggcggaatccaacctgagtagtaaattccagttttccagcaacaaggaacagaacggagtacaagatcctcagcatgagagaattattactgtgtctactaatggaagtattcacagcccaaggtttcctcatacttatccaagaaatacggtcttggtatggagattagtagcagtagaggaaaatgtatggatacaacttacgtttgatgaaagatttgggcttgaagacccagaagatgacatatgcaagtatgattttgtagaagttgaggaacccagtgatggaactatattagggcgctggtgtggttctggtactgtaccaggaaaacagatttctaaaggaaatcaaattaggataagatttgtatctgatgaatattttccttctgaaccagggttctgcatccactacaacattgtcatgccacaattcacagaagctgtgagtccttcagtgctacccccttcagctttgccactggacctgcttaataatgctataactgcctttagtaccttggaagaccttattcgatatcttgaaccagagagatggcagttggacttagaagatctatataggccaacttggcaacttcttggcaaggcttttgtttttggaagaaaatccagagtggtggatctgaaccttctaacagaggaggtaagattatacagctgcacacctcgtaacttctcagtgtccataagggaagaactaaagagaaccgataccattttctggccaggttgtctcctggttaaacgctgtggtgggaactgtgcctgttgtctccacaattgcaatgaatgtcaatgtgtcccaagcaaagttactaaaaaataccacgaggtccttcagttgagaccaaagaccggtgtcaggggattgcacaaatcactcaccgacgtggccctggagcaccatgaggagtgtgactgtgtgtgcagagggagcacaggaggatagccgcatcaccaccagcagctcttgcccagagctgtgcagtgcagtggctgattctattagagaacgtatgcgttatctccatccttaatctcagttgtttgcttcaaggacctttcatcttcaggatttacagtgcattctgaaagaggagacatcaaacagaattaggagttgtgcaacagctcttttgagaggaggcctaaaggacaggagaaaaggtcttcaatcgtggaaagaaaattaaatgttgtattaaatagatcaccagctagtttcagagttaccatgtacgtattccactagctgggttctgtatttcagttctttcgatacggcttagggtaatgtcagtacaggaaaaaaactgtgcaagtgagcacctgattccgttgccttgcttaactctaaagctccatgtcctgggcctaaaatcgtataaaatctggatttttttttttttttttgctcatattcacatatgtaaaccagaacattctatgtactacaaacctggtttttaaaaaggaactatgttgctatgaattaaacttgtgtcgtgctgataggacagactggatttttcatatttcttattaaaatttctgccatttagaagaagagaactacattcatggtttggaagagataaacctgaaaagaagagtggccttatcttcactttatcgataagtcagtttatttgtttcattgtgtacatttttatattctccttttgacattataactgttggcttttctaatcttgttaaatatatctatttttaccaaaggtatttaatattcttttttatgacaacttagatcaactatttttagcttggtaaatttttctaaacacaattgttatagccagaggaacaaagatgatataaaatattgttgctctgacaaaaatacatgtatttcattctcgtatggtgctagagttagattaatctgcattttaaaaaactgaattggaatagaattggtaagttgcaaagactttttgaaaataattaaattatcatatcttccattcctgttattggagatgaaaataaaaagcaacttatgaaagtagacattcagatccagccattactaacctattccttttttggggaaatctgagcctagctcagaaaaacataaagcaccttgaaaaagacttggcagcttcctgataaagcgtgctgtgctgtgcagtaggaacacatcctatttattgtgatgttgtggttttattatcttaaactctgttccatacacttgtataaatacatggatatttttatgtacagaagtatgtctcttaaccagttcacttattgtactctggcaatttaaaagaaaatcagtaaaatattttgcttgtaaaatgcttaatatcgtgcctaggttatgtggtgactatttgaatcaaaaatgtattgaatcatcaaataaaagaatgtggctattttggggagaaaattaaaaaaaaaaa

SEQ ID NO: 4221 - DNA, 2286 bp, Homo Sapiens
  NM_016207
gttcctcacccccgcttcgccctcacactttcgggatgtctgcgattcctgctgaggagagcgaccagctgctgatccgaccccttggagctgggcaagaagtaggaagatcatgtattattctcgagttcaaaggaagaaaaataatgctcgactgtgggatccaccctggcctagaaggaatggatgctcttccttatattgatttaattgacccagctgagattgatctcctattaattagtcatttccatttggatcactgtggagctctgccctggtttctacagaagacaagtttcaaaggaagaacatttatgactcatgccacaaaagctatttatagatggcttctttctgattatgtcaaagttagtaacatatcagcagacgacatgctgtataccgagacagatttggaagaaagcatggacaaaattgaaactatcaactttcatgaagttaaggaagttgcgggaatcaagttttggtgttaccatgcaggtcacgtcctaggagccgccatgttcatgattgagatcgcaggcgtgaagcttttgtacactggtgatttctcaagacaagaagataggcacttaatggcagctgaaattcctaatattaagcctgatattcttatcattgaatctacttatgggacccatatccatgagaaacgtgaagagcgagaagcaagattctgtaacactgtccacgatattgtaaacagaggaggcaggggtctcattcctgtctttgctcttggaagggctcaggagctgctcttgattctagatgagtactggcagaatcacccagaactacatgacattccaatatactatgcatcatctttggccaagaagtgtatggcagtgtaccagacatatgtaaatgccatgaatgacaaaatccgcaaacagatcaacatcaataatccctttgttttcaaacacattagtaacctcaagagcatggatcattttgatgacattggtcccagtgttgtaatggcctccccaggcatgatgcaaagtggcttatccagagaattatttgaaagctggtgtactgataagaggaatggtgtcattatagcgggatactgtgtagaagggacacttgccaagcacatcatgtctgaacctgaagaaatcactactatgtctggacagaagttaccactgaaaatgtctgttgattacatttctttctcagctcacacggattaccagcaaaccagtgaatttattcgtgctttgaaaccgcctcatgtgattttagtccatggagaacagaatgaaatggccagattgaaagcagcactgattcgagaatatgaagataacgatgaagttcacatagaggttcataatcctcggaatacagaagcagtgaccttaaacttcagaggagaaaaactagccaaggttatgggatttttagcagacaaaaaaccagaacaaggccagcgggtctcaggaatacttgttaaaagaaactttaattatcacatactttctccttgcgacctgtccaattatactgacctggccatgagcacggtgaagcagacccaagccattccatatactggtccctttaatttgctctgttaccagctgcagaaattgacaggtgatgtggaagaattagaaattcaagaaaaacctgctctgaaagtgttcaaaaatattactgtaatacaagaaccaggcatggtggtattagaatggctggcaaacccttctaatgatatgtatgcagatacagtaacaactgtgatattggaagttcagtcaaatcccaaaataagaaaaggtgcagtacagaaggtttctaaaaaattagaaatgcacgtttacagcaagaggttggagatcatgctccaggacatatttggagaagactgtgtaagtgtaaaggatgactctattcttagcgtcacagtggacgggaaaactgccaaccttaacttggagacacggactgtagaatgtgaagagggaagtgaagacgatgaatccctccgagaaatggtggagctggctgcacagagactgtacgaggccctgacgccagttcactgagactgtgcctgtatatgaactttgaaaaaatacttgactctacttttgttacctaaaataaaatgcattcgtttctctgggaaaaaaaaaaaaaaaaaaaaaaaaaaaaaaaaaaaaaaaaaaaaaaaaaaaaaaaaaaaaaaaaaaaaaaaaaaaaaaaaaaaaaaaaaaaaaaaaaaaaaaaaaaaaaaaaaaa

SEQ ID NO: 4222 - DNA, 2712 bp, Homo Sapiens
  NM_016210
agccaatcggaggccgggggcgcggagcgtgcagggaggcaaggcgctgtagcttcggggatcccccgaggctgctcggcccggccccacctccgccgtgggtcccggccctacccaccctagctcaggccggcagagccagcgctcgcggatgcggctggtgcgcagtagcgggcctggccagcggctcggggcttgcagggagggcggatctcgggtcggacccgcagccccagacgccgggcttgggggttccccccgccccggcctcctgccagtcactaccacccctagcctctccaactgagctcggcgccgggagaggattaagtttgatcactatgatcatctcacccacagacagaggatgcagggcttcatttttgttcccaaaaacaggggcaccgtagatacgtaaacacccaggaaggcagggggctccctttatccaaggaggtggctgtgcaggtggccaccacaggtggcaggaaccacaggctggggcactccggagtcaggagtgagtgggcaggttgactggcatcaggcagcctctcagccagggccctctccgcatcagcatgaactccaggaccgcatctgctaggggctggttcagcagccgcccacccacctctgagtctgacctggaacctgccacagatgggccagcctccgagaccactaccctcagcccagaggccaccacctttaatgacaccagaatccctgatgcagctggtggcacggccggcgtgggtaccatgcttctgtcctttgggatcatcacggtgataggcctggctgtggccttggttttgtacatcaggaagaagaagaggctggagaagctacgccaccagctcatgcccatgtacaacttcgaccccacggaggaacaagatgagttggagcaggagctgctggagcatgggcgggacgccgcctctgtacaggctgctacttctgtgcaggccatgcagggcaagactactctgccctcccagggcccactgcagagacccagccggctggtgtttaccgatgtggccaatgccatccatgcgtgagtggcctgggacaagcctggacttctgatagagacccatcacggtgcctacagagctccccactccctgattgtcaagacctactctgaagatcttccctgccaagacacaagagggctgagccaggtcctagctgttctccagacccacctgctgactttagactctaagagagggccctagccaggctggacttctgaccactgacttctcctgacctgagggccctggcacagagggcatccctcatgctgagaaggtcaagagcctctgctggcttcctcatcccctgtccagatccctcacatcagggtctgccccgctaatgtggaggaaatgagggagatacggagtgggagggattgggggaggaaaggggaggtttccctctgttagggagagacctgttttttggaatctggagcctcctctggggtggggagaggaaaccacccaagttatagggacagggtagggcagcatctgttatgggccctgagaagcccagagatggagctgaaactgtccagtatgcaaggatgccaggagaagggcaattcacacccagggtccatccatactacggagggtccaggaggtctcccagccacccatccttggcaaccagatgttactggggccaagctaggatgggagctgagggggaaggaagtaggggaatggaagtggaaggatgcagcccccccagacctgccgagaggcctcatgcatgtgcatgagtgtgcccatgggcagacatgtgcctgtcccagcacagcgggcagaatgagattgtccacactggccccaccctccaagtcgacctctaccccatggtatgtagtggagcatcagggtaggctatcttctctgccttcaatcttcagggactgcagggaagagggaagcacgcacagcacggttcctctctccactgcattgtttcactgggctcacctgcttctgaaaacggctccctgtcttgggctctaatgaggatctggggttgggagaggctgttggtctgagggcagtaatcacaggctgcaggctagagggggcagttatgactgcctgaaagtgggtgagggattgcacttcagaaaaacatctaaaaaacttagtctatgtttgaattccccacctccatcccatctatgggaagagccgttcagtgtttagagagtggggagatgggtccctgcacttggcctctccataagccttggagggtcagggctgataccaggggtcctggcaagccattgggcagagacagaccacaagagcagggcatttttttacgctgggcatacatatgcacacaagcatgcacagaggcatgtcccgtgcccagcctctccaccgtcactgtccgctgctggctggaggggatgcaggggtagtgtatgcagaccttccactgggcaaatgccatgtgtcaggagggaaaggcctaggaagcccccatggggaaggttctggatttattccctcctctaaatgctataaatacgttagcacttgagtcgactggaggctgccaggaattcaggatgcatacagctgtaatttaacccagagcagctccacgtgagagcattaaagatgtaatgaagatgtttacatggaaaaaaaaaaa

SEQ ID NO: 4223 - DNA, 2737 bp, Homo Sapiens
  NM_016219
atccgtgtgatgggcgggctgttgacggcgctgcgatggctgcctgcgagggcaggagaagcggagctctcggttcctctcagtcggacttcctgacgccgccagtgggcggggccccttgggccgtcgccaccactgtagtcatgtacccaccgccgccgccgccgcctcatcgggacttcatctcggtgacgctgagctttggcgagaactatgacaacagcaagagttggcggcggcgctcgtgctggaggaaatggaagcaactgtcgagattgcagcggaatatgattctcttcctccttgcctttctgcttttctgtggactcctcttctacatcaacttggctgaccattggaaagctctggctttcaggctagaggaagagcagaagatgaggccagaaattgctgggttaaaaccagcaaatccacccgtcttaccagctcctcagaaggcggacaccgaccctgagaacttacctgagatttcgtcacagaagacacaaagacacatccagcggggaccacctcacctgcagattagacccccaagccaagacctgaaggatgggacccaggaggaggccacaaaaaggcaagaagcccctgtggatccccgcccggaaggagatccgcagaggacagtcatcagctggaggggagcggtgatcgagcctgagcagggcaccgagctcccttcaagaagagcagaagtgcccaccaagcctcccctgccaccggccaggacacagggcacaccagtgcatctgaactatcgccagaagggcgtgattgacgtcttcctgcatgcatggaaaggataccgcaagtttgcatggggccatgacgagctgaagcctgtgtccaggtccttcagtgagtggtttggcctcggtctcacactgatcgacgcgctggacaccatgtggatcttgggtctgaggaaagaatttgaggaagccaggaagtgggtgtcgaagaagttacactttgaaaaggacgtggacgtcaacctgtttgagagcacgatccgcatcctgggggggctcctgagtgcctaccacctgtctggggacagcctcttcctgaggaaagctgaggattttggaaatcggctaatgcctgccttcagaacaccatccaagattccttactcggatgtgaacatcggtactggagttgcccacccgccacggtggacctccgacagcactgtggccgaggtgaccagcattcagctggagttccgggagctctcccgtctcacaggggataagaagtttcaggaggcagtggagaaggtgacacagcacatccacggcctgtctgggaagaaggatgggctggtgcccatgttcatcaatacccacagtggcctcttcacccacctgggcgtattcacgctgggcgccagggccgacagctactatgagtacctgctgaagcagtggatccagggcgggaagcaggagacacagctgctggaagactacgtggaagccatcgagggtgtcagaacgcacctgctgcggcactccgagcccagtaagctcacctttgtgggggagcttgcccacggccgcttcagtgccaagatggaccacctggtgtgcttcctgccagggacgctggctctgggcgtctaccacggcctgcccgccagccacatggagctggcccaggagctcatggagacttgttaccagatgaaccggcagatggagacggggctgagtcccgagatcgtgcacttcaacctttacccccagccgggccgtcgggacgtggaggtcaagccagcagacaggcacaacctgctgcggccagagaccgtggagagcctgttctacctgtaccgcgtcacaggggaccgcaaataccaggactggggctgggagattctgcagagcttcagccgattcacacgggtcccctcgggtggctattcttccatcaacaatgtccaggatcctcagaagcccgagcctagggacaagatggagagcttcttcctgggggagacgctcaagtatctgttcttgctcttctccgatgacccaaacctgctcagcctggatgcctacgtgttcaacaccgaagcccaccctctgcctatctggacccctgcctagggtggatggctgctggtgtggggacttcgggtgggcagaggcaccttgctgggtctgtggcattttccaagggcccacgtagcaccggcaaccgccaagtggcccaggctctgaactggctctgggctcctcctcgtctctgctttaatcaggacaccgtgaggacaagtgaggccgtcagtcttggtgtgatgcggggtgggctgggccgctggagcctccgcctgcttcctccagaagacacgaatcatgactcacgattgctgaagcctgagcaggtctctgtgggccgaccagaggggggcttcgaggtggtccctggtactggggtgaccgagtggacagcccagggtgcagctctgcccgggctcgtgaagcctcagatgtccccaatccaagggtctggaggggctgccgtgactccagaggcctgaggctccagggctggctctggtgtttacaagctggactcagggatcctcctggccgccccgcagggggcttggagggctggacggcaagtccgtctagctcacgggcccctccagtggaatgggtcttttcggtggagataaaagttgatttgctctaaccgcaaaaaa

SEQ ID NO: 4224 - DNA, 3937 bp, Homo Sapiens
  NM_016221
gtcaaagtctacgtaggaagtcgtagggaaggcagcgaggaagacgctggctctcgggtcacgtgatgcgccgggagcgtcatcgcctcctccctccccaagatggcgtccttgctgcagtcggaccgggttctctatctagtccagggagaaaagaaggttcgggccccgctctcgcaactctacttctgccgctattgtagcgaactgcggtcgctggaatgtgtgtctcacgaggtggactcccattattgtcccagttgtttagaaaatatgccatcggctgaagccaaactaaaaaagaatagatgtgccaattgttttgactgtcctggctgcatgcacaccctctctactcgggccacgagcatctccacacagcttccagatgacccagccaagaccaccatgaagaaagcctattacctggcatgtggattttgtcgctggacgtctagagatgtgggcatggcagacaaatctgtagctagtggcggttggcaggaacctgaaaatcctcacacacaacggatgaacaaattgattgaatattaccagcagcttgctcagaaagagaaggttgagcgagatcgcaagaaactggcacgacgtagaaactatatgcctctggctttttcggacaaatatggtcttggaaccaggcttcagcgaccacgagctggtgcatccatcagtacccttgccggactttcccttaaagaaggagaggatcagaaagagataaagattgagccagctcaggctgtggatgaagtggaacctctacctgaagactattatacaagaccagtaaatttaacagaggtaacaacccttcagcagcgtctgttacagcctgacttccagccagtctgtgcttcacagctctatcctcgccacaaacatcttctgatcaaacggtccctgcgctgccgtaaatgtgaacataatttgagcaagccagaatttaacccaacgtcaatcaaattcaaaatccagctggtcgctgtcaattatattccagaagtgagaatcatgtcaattcccaaccttcgctacatgaaggagagccaggtcctcctgactcttacaaatccagttgagaacctcacccatgtgactctcttcgagtgtgaggagggggaccctgatgatatcaacagcactgctaaggtggtggtgcctcccaaagagctcgttttagctggcaaggatgcagcagcagagtacgatgagttggcagaacctcaagactttcaggacgatcctgacattatagccttcagaaaggccaacaaagtgggtattttcatcaaagttacaccacagcgtgaggagggtgaagtgaccgtgtgcttcaagatgaagcatgattttaaaaacctggcagcccccattcgccccattgaagaaagtgaccagggaacagaagtcatctggctcacccagcatgtggaacttagcttgggcccacttcttccttaaaaggttccactggagggcagatcccaaaggacagtatcaccgtaaacctgcgttaaaatgtggaagctgctgcttcattaggccttgtttataacgatgtacccatgcactacggaattctattgctaagaaagtgggagcataggcaaggcattgggaacacagggtagctgctgttgctcttgctctcacccctgttgacaccagtaagtctgtgtctccctcactgaaccctgcacgttgagtaacagcagcataattccatcctaggaaaggggatgggtgttccttggaatggcattgtatttaccacctgagaaactctgtactgtctcttgatctgatctcactaaggatcacaatgtcacagatgaaacttaaatgataacccaaaggtagacctgctgttaatgatccagcattggtcacaatgtaccaactgctttctgcattccgttaaatatcatctaacagtctaaaacatatcccttcattgccataatggctgccattttgccatagatttccatataactgaaaaactgaattgtcactttatctttagtatcatgatgattggaaaaacctgtgaagttgttaaggcactctcatttgccctctttttctaagtgaatacaggacacgtattagttgttcttaatttttttcccagtaaaatatggatcttttaagaagaatttgagaagcaaacaattacatgtcatgtcaagggggtagcagattccattcgttttcaatattgccacaatacccagggattaatgctgccacaggggggcaatctttatttgtcttacttcctaccccttccctgttctgcctctttaactcagttaagttgttctgtttgggacctggaaaagaacccaaagaaaacctgagtggacaggttcatttctggaatgcagaaaacattttaaaggctagatttttagaatattctcaactagcattctttccattgatttgaaggggaaattaactattataatctcttgaatccaaaactggatattaagaactttcccccttactaagtttaagacttttgtcatgtggtgagtcaaataagaccattttgattgtaaaccataaaatagttcagcaagtagcccacagttctggcctaacagcagacttgctgttttcacttggtatcctggagttgggttgctaaccttaatttctatgatgttttctaaaatgaaacttgataaagtagaccaccagctgcaccgtgttttctgtaaaagtattgttagtaagtggccaagagacttgaggaaaatacagattttttgtttaccttggtcttgttttaagtcttaaaaaattaaagataacattataatgtagaatacagatgggacatagtccttgtaagcttcccttgaaaatgttttaaatatttaggaagcttttaaaagacactaaattgtactctaaaagacactaaattgtactaattgtacaaaggtcaagccaattttatgaaacagtcctacagagtaatatatgtgatgcagtgtaagaaggaaaatactcatctctaacattatggtaataacatttagcctcttaggagttggagcagggggatgggtaattacagatttgcagactatagaaagagtttcatttttttgtgaccccacagagtctcaaatttttatttcactacctgctagagcctactgtgaaatcactgctccatatttgccagtggaggaaatgggcatagagtagagaatagcttcatatgtttacacgtttgcatagactacacacatgtcatgcgtttatggcaggtagctggtatttattccccaaagtaataatgttgaagtatgggtctcatcattcccatacacagaaacacaaaacactttgatcataaacttttttcttcagaagccaaactaacttgcagaataatagagccactggtttaatgtttcctcaagataggttttagtgtaagctagtattctgtgtgttcgtagaaatgattcaatacctgcagctggtgaattaggaattgtatttgttgccttttttatattagatgaggtgcaaaaattttaatgctagtcagtatgcaccaccacaggaaagttagatcccattagcacttgaaactacagctttggaaacttaggctaagttaatttggatttgttacttgattcacctactgaccttttcttttgtttgaagtgcttatcagcataatgagctaagtgtcatgcatatttgtgaagaaacaccctttttggtcccttttgggacagagaggtactccttgatctttatgaatgacaggttactgttttgccttattgcttaacttaatgtagtgaaataaagcagacaaagcttgaaaaaaaaaaaaaaaaaaaaaaaaaaaaaaaaaaaaaaaaaaaaaaaaaaa

SEQ ID NO: 4225 - DNA, 1089 bp, Homo Sapiens
  NM_016226
gaggagcctgaggaagagggcggcgacggtggtggtgactgagcggagcccggtgacaggatgttggtgttggtattaggagatctgcacatcccacaccggtgcaacagtttgccagctaaattcaaaaaactcctggtgccaggaaaaattcagcacattctctgcacaggaaacctttgcaccaaagagagttatgactatctcaagactctggctggtgatgttcatattgtgagaggagacttcgatgagaatctgaattatccagaacagaaagttgtgactgttggacagttcaaaattggtctgatccatggacatcaagttattccatggggagatatggccagcttagccctgttgcagaggcaatttgatgtggacattcttatctcgggacacacacacaaatttgaagcatttgagcatgaaaataaattctacattaatccaggttctgccactggggcatataatgccttggaaacaaacattattccatcatttgtgttgatggatatccaggcttctacagtggtcacctatgtgtatcagctaattggagatgatgtgaaagtagaacgaatcgaatacaaaaaaccttaaagccaggcctgtcttgatgatttttggttttttttcattgtcctgttgaaatcaagtaattaaacatttaagagccacaaaattgtatcacttttataatattttgcagtaaaatataataccatcttctctgttaatacataattgctccaagcttcctgtaaactataagaatatatttagtttacagtatatggattctatgaaaaaatgtccacaacacagtaattggtcacttgttaagaaaaatttatccttgtaagtatcttcaaagttgatatttggaactttattccaaaagtagtgcatgtggagaaagaatctagactttcttgtatacatttttctcttctccagtaataaacaattacctttcatttatactttgataacctgtatttaatttaaaaaaaaacataaaaatgaggaaccaagtgaaactacggatataaatattaaagtggacgagatgacctttca

SEQ ID NO: 4226 - DNA, 1348 bp, Homo Sapiens
  NM_016229
gggggccggagcgggaggcgtggggagaggtcgtgggcgggaccgcgaagggcggggagtggggcgggccggctcggattccggaaggctgagactccagtgacccggcgggaggagaggcaactttccctgtcgggcttgagttgggagaggagcagggcggccttgtagggacccgtccctgctcctgaccatcaccgtcactggggtcactgtgctcgtgttggtcctgaagagcatgaactccaggaggagagagccaatcaccttacaggaccctgaagccaagtacccgctgcccttgattgagaaagagaaaatcagccacaacacccggaggttccgctttggactgccttcgccggaccatgtcttagggcttcctgtaggtaactatgtccagctcttggcaaaaatcgataatgaattggtggtcagggcttacacccctgtctccagtgatgatgacagaggctttgtggacctaattataaagatctacttcaaaaatgtacacccccaatatcctgaaggtgggaagatgactcagtatttggagaacatgaaaatcggggagaccatcttttttcgagggccaaggggacgcttgttttaccatgggccagggaatcttggaatcagaccagaccagacgagtgagcctaaaaaaacactggccgatcacctgggaatgattgctgggggcacaggcatcacacccatgttgcagctcattcgccacatcaccaaggaccccagtgacaggaccaggatgtccctcatctttgccaaccagacagaggaggatatcttggtcagaaaagagcttgaagaaattgccaggactcacccagaccagttcaacctgtggtacaccctggacaggcctcccattggctggaagtacagctcaggcttcgttactgccgacatgatcaaggagcaccttcctcctccagcgaagtccacgctcatcctggtgtgtggcccgccaccactaatccagacggcggctcaccctaacctggagaagctgggttatacccaggacatgattttcacctactaacacctccacgtgctcagcaattttgcatgtcccttttcatctgtttcagagtaagttcaatttcaccacggtaaactgggatgttttcaaaagtgccttgccatgtaccttcgcgcacacactggttctcctcttttgggtgtgggcctaacaaaaagggctcaaggggctggagactggctgctggggcctccttgcttggaggctggaaagagctccatttcagtatctttctccgtggttttgtgaaataaactcaagtacaaagcagacagccca

SEQ ID NO: 4227 - DNA, 2259 bp, Homo Sapiens
  NM_016230
aatgcgcctcacccctggcgaccccggaagtgggtcgggggcttggcctctgcccggccacagagccggagctggaggtgctgtcccgtctggcggcgatccccgggcagggcccggggccggggtttgaagatgctgaacgtcccttcccagtctttcccggcccccaggtcgcagcagcgtgtcgcctccggggggcgtagcaaggtacctttaaaacagggcagaagccttatggattggattcgactgaccaaaagtggaaaggatctaacgggattaaaaggcaggttaattgaagtaactgaagaagaacttaagaaacacaacaaaaaagatgattgttggatatgcataagaggtttcgtttataatgtcagcccttatatggagtatcatcctggtggagaagatgaactaatgagagcagcaggatcagatggtactgaactttttgatcaggttcatcgttgggtcaattatgaatccatgctgaaagaatgcctggttggcagaatggccattaaacctgctgttctgaaagactatcgtgaggaggaaaagaaagtcttaaatggcatgcttcccaagagccaagtgacagatacacttgccaaagaaggtcctagttatccaagctatgattggttccaaacagactctttagtcaccattgccatatatactaaacagaaggatatcaatttagactcaataatagttgatcatcagaatgattcctttagagcagaaacaattattaaggattgtttatatcttatacatattgggctaagccatgaggttcaggaagatttttctgtgcgggttgttgagagtgtgggaaaaatagagattgttctacaaaaaaaagagaatacttcttgggactttcttggccatcccctgaagaatcataattcacttattccaaggaaagatacaggtttgtactacagaaagtgccagttaatttccaaggaagatgttactcatgatacgaggcttttctgtttgatgctgccaccaagcactcatcttcaagtgcccattgggcaacatgtttacctcaagctacctattacaggtacagaaatagtaaagccatatacacctgtatctggttccttactctcagagttcaaggaaccagttcttcccaacaataaatacatctactttttgataaaaatctatcccactggactcttcacaccagagcttgatcgtcttcagattggagattttgtttctgtaagcagtcctgagggcaattttaaaatatccaagttccaagaattagaagatctctttttgttggcagctggaacaggcttcacaccaatggttaaaatactgaattatgctttgactgatatacccagtctcaggaaagtgaagctgatgttcttcaataaaacagaagatgatataatttggagaagccaattggagaaattagcatttaaagataaaagactggatgttgaatttgttctctcagcacctatttctgaatggaatggcaaacagggacatatttcaccagctcttctttctgaatttttgaaaagaaatttggacaaatccaaagttctcgtctgcatttgtggaccagtgccatttacagaacaaggagtaaggttgctgcatgatctcaacttttccaaaaatgagatccatagttttacagcataatgaagagctgtcattgtcctttattcaactagtttatctaaatttgtgattgcttagggttttttaagagaacatttttgtacataacaaaaggttaactagaatccagccttcagtttcttaaatgaaatcaaatgttccttcagtacaggtaacttcttggctttcttttgtaccacaacttattttactactgatatttgacctggaaagttaatcatggcaacaaatacatacaggattctttgttatgaatcacaaatttccttgccatttaaattatatcactgttctacaataagcacttgtgttttatgacatgataaagtaaatgatcacttcgatcatgtttctatgctgtaaaatgtcttattagcaatacagattaaattttaccttgcactgttaactcaggaaatgatcatttatgtccttgttattaatgttaaaacatagaatgttataacttattaagtgatccaaacatttttttgtgtgtgtatggcattgatgcagaatagaataaaattatacttaagttctttttaaaaaaaaaaaaaa

SEQ ID NO: 4228 - DNA, 3372 bp, Homo Sapiens
  NM_016234
taaaaccaggaagtgaagtccccgagcacgttagaaagcctgacatggcctgactcgggacagctcagagcagggcagaactggggacactctgggccggccttctgcctgcatggacgctctgaagccaccctgtctctggaggaaccacgagcgagggaagaaggacagggactcgtgtggcaggaagaactcagagccgggaagcccccattcactagaagcactgagagatgcggccccctcgcagggtctgaatttcctgctgctgttcacaaagatgctttttatctttaactttttgttttccccacttccgaccccggcgttgatctgcatcctgacatttggagctgccatcttcttgtggctgatcaccagacctcaacccgtcttacctcttcttgacctgaacaatcagtctgtgggaattgagggaggagcacggaagggggtttcccagaagaacaatgacctaacaagttgctgcttctcagatgccaagactatgtatgaggttttccaaagaggactcgctgtgtctgacaatgggccctgcttgggatatagaaaaccaaaccagccctacagatggctatcttacaaacaggtgtctgatagagcagagtacctgggttcctgtctcttgcataaaggttataaatcatcaccagaccagtttgtcggcatctttgctcagaataggccagagtggatcatctccgaattggcttgttacacgtactctatggtagctgtacctctgtatgacaccttgggaccagaagccatcgtacatattgtcaacaaggctgatatcgccatggtgatctgtgacacaccccaaaaggcattggtgctgatagggaatgtagagaaaggcttcaccccgagcctgaaggtgatcatccttatggacccctttgatgatgacctgaagcaaagaggggagaagagtggaattgagatcttatccctatatgatgctgagaacctaggcaaagagcacttcagaaaacctgtgcctcctagcccagaagacctgagcgtcatctgcttcaccagtgggaccacaggtgaccccaaaggagccatgataacccatcaaaatattgtttcaaatgctgctgcctttctcaaatgtgtggagcatgcttatgagcccactcctgatgatgtggccatatcctacctccctctggctcatatgtttgagaggattgtacaggctgttgtgtacagctgtggagccagagttggattcttccaaggggatattcggttgctggctgacgacatgaagactttgaagcccacattgtttcccgcggtgcctcgactccttaacaggatctacgataaggtacaaaatgaggccaagacacccttgaagaagttcttgttgaagctggctgtttccagtaaattcaaagagcttcaaaagggtatcatcaggcatgatagtttctgggacaagctcatctttgcaaagatccaggacagcctgggcggaagggttcgtgtaattgtcactggagctgcccccatgtccacttcagtcatgacattcttccgggcagcaatgggatgtcaggtgtatgaagcttatggtcaaacagaatgcacaggtggctgtacatttacattacctggggactggacatcaggtcacgttggggtgcccctggcttgcaattacgtgaagctggaagatgtggctgacatgaactactttacagtgaataatgaaggagaggtctgcatcaagggtacaaacgtgttcaaaggatacctgaaggaccctgagaagacacaggaagccctggacagtgatggctggcttcacacaggagacattggtcgctggctcccgaatggaactctgaagatcatcgaccgtaaaaagaacattttcaagctggcccaaggagaatacattgcaccagagaagatagaaaatatctacaacaggagtcaaccagtgttacaaatttttgtacacggggagagcttacggtcatccttagtaggagtggtggttcctgacacagatgtacttccctcatttgcagccaagcttggggtgaagggctcctttgaggaactgtgccaaaaccaagttgtaagggaagccattttagaagacttgcagaaaattgggaaagaaagtggccttaaaacttttgaacaggtcaaagccatttttcttcatccagagccattttccattgaaaatgggctcttgacaccaacattgaaagcaaagcgaggagagctttccaaatactttcggacccaaattgacagcctgtatgagcacatccaggattaggataaggtacttaagtacctgccggcccactgtgcactgcttgtgagaaaatggattaaaaactattcttacatttgttttgcctttcctcctatttttttttaacctgttaaactctaaagccatagcttttgttttatattgagacatataatgtgtaaacttagttcccaaataaatcaatcctgtctttcccatcttcgatgttgctaatattaaggcttcagggctacttttatcaacatgcctgtcttcaagatcccagtttatgttctgtgtccttcctcatgatttccaaccttaatactattagtaaccacaagttcaagggtcaaagggaccctctgtgccttcttctttgttttgtgataaacataacttgccaacagtctctatgcttatttacatcttctactgttcaaactaagagatttttaaattctgaaaaactgcttacaattcatgttttctagccactccacaaaccactaaaattttagttttagcctatcactcatgtcaatcatatctatgagacaaatgtctccgatgctcttctgcgtaaattaaattgtgtactgaagggaaaagtttgatcataccaaacatttcctaaactctctagttagatatctgacttgggagtattaaaaattgggtctatgacatattgtccaaaaggaatgctgttcttaaagcattatttacagtaggaactggggagtaaatctgttccctacagtttgctgctgagctggaagctgtgggggaaggagttgacaggtgggcccagtgaacttttccagtaaatgaagcaagcactgaataaaaacctcctgaactgggaacaaagatctacaggcaagcaagatgcccacacaacaggcttattttctgtgaaggaaccaactgatctcccccacccttggattagagttcctgctctaccttacccacagataacacatgttgtttctacttgtaaatgtaaagtctttaaaataaactattacagatacttaaaaaaaaaaaaaaaaaaa

SEQ ID NO: 4229 - DNA, 2625 bp, Homo Sapiens
  NM_016237
gcggatgtctgtttcctgggatattgtgagggcgggcggagatgtagacccggtagtgttgtgccttgtggtgacaactggcggcagcgcgccgcgggcccgagacttagtctcgggccgccatggccagcgtccacgagagcctctacttcaatcccatgatgaccaatggggttgtgcacgccaatgtgttcggcatcaaggactgggtgacgccgtacaagatcgcggtgctggtgctgctgaacgagatgagccgcacaggcgagggcgccgtcagcctcatggagcggcggaggctcaaccagctgctcctgcccctgctgcagggcccagatattacactgtcaaaactttacaagttaattgaagagtcttgtccacagctggcaaattcagtgcagatcagaatcaaactgatggctgaaggcgagttgaaggatatggaacagttttttgatgacctttcagattctttctctggaactgaaccagaggttcacaaaacaagtgtagtaggtttgtttctgcgtcacatgatcttggcctacagtaagctttctttcagccaagtgtttaaactgtacactgcccttcagcagtacttccagaatggtgagaaaaagacagtggaggatgctgatatggaactgaccagtagagatgagggtgaaagaaaaatggaaaaagaagaacttgatgtatctgtaagagaagaggaggtatcttgcagtgggcctctgtcccaaaaacaagcagaattttttctttctcaacaggcttctttgctaaagaatgatgagactaaggccctcactccagcttccttgcagaaggaattaaacaatttgttgaaatttaatcctgattttgctgaagcgcattatctcagctacttaaacaacctccgtgtccaagatgttttcagttcaacacacagtctcctccattattttgatcgtctgattcttaccggagccgaaagcaaaagtaatggggaagagggctatggccggagcttgagatacgccgctctgaatcttgccgccctgcactgccgcttcggtcactatcaacaggcagagctcgccctgcaggaggcaattaggattgcccaggagtccaacgatcacgtgtgtctccagcactgtttgagctggctttatgtgctggggcagaagagatccgatagctatgttctgctggagcattctgtgaagaaggcagtacattttgggttaccgtacctcgcctccctgggaatacagtcccttgttcaacagagagcttttgctgggaagacggcaaacaagctgatggatgccctaaaggactccgacctcctgcactggaaacacagcctgtcagagctcatcgatatcagcatcgcacagaaaacggccatctggaggctgtatggccgcagcaccatggcactgcaacaggcccagatgttgctgagcatgaacagcctggaggcggtgaatgcgggcgtgcagcagaacaacacagagtcctttgctgtcgcactctgccacctcgcagagctacacgcggagcagggctgttttgctgcagcttctgaagtgttaaagcacttgaaggaacgatttccgcctaatagtcagcacgcccagttatggatgctatgtgatcaaaaaatacagtttgacagagcaatgaatgatggcaaatatcatttggctgattcacttgttacaggaatcacagctctcaatagcatagagggtgtttataggaaagcggttgtattacaagctcagaaccaaatgtcagaggcacataagcttttacaaaaattgttggttcattgtcagaaactgaagaacacagaaatggtgatcagtgtcctactgtccgtggcagagctgtactggcgatcttcctcccctaccatcgcgctgcccatgctcctgcaggctctggccctctccaaggagtaccggttacagtacttggcctctgaaacagtgctgaacttggcttttgcgcagctcattcttggaatcccagaacaggccttaagtcttctccacatggccatcgagcccatcttggctgacggggctatcctggacaaaggtcgtgccatgttcttagtggccaagtgccaggtggcttcagcagcttcctacgatcagccgaagaaagcagaagctctggaggctgccatcgagaacctcaatgaagccaagaactattttgcaaaggttgactgcaaagagcgcatcagggacgtcgtttacttccaggccagactctaccataccctggggaagacccaggagaggaaccggtgtgcgatgctcttccggcagctgcatcaggagctgccctctcatggggtacccttgataaaccatctctagagaggacatccctgctgggctgctgtgcagagtataagattttggacttgttcatgtcccctctctccctataaatgatgtatttgtgacaccctatcttgtcaataaacagcattctgattagtttgtcttattttgttgctagtaactacgtatttgttttattccccttttcttcccttttggtagcaaaggacaccaactttttcttaataaatgggtattttgctaacaa

SEQ ID NO: 4230 - DNA, 3070 bp, Homo Sapiens
  NM_016238
gatggaccccggcgacgccgccattttggagtcttccctaaggatcctctaccggcttttcgagtcagtgctgccgccgctgcccgcggctttgcagagcaggatgaatgtgatagaccacgtgcgggacatggcggccgcggggctgcactccaacgtgcggctcctcagcagcttgttacttacaatgagtaataacaaccctgagttattctccccacctcagaagtaccagcttttggtgtatcatgcagattctctctttcatgataaggaatatcggaatgctgtgagtaagtataccatggctttacagcagaagaaagcgctaagtaaaacttcaaaagtgagaccttcaactggaaattctgcatctactccacaaagtcagtgtcttccatctgaaattgaagtgaaatacaaaatggctgaatgttatacaatgctaaaacaagataaagatgccattgctatacttgatgggatcccttcaagacaaagaactcccaaaataaacatgatgctggcaaacctgtacaagaaggctggtcaggagcgcccttcagtcaccagctataaggaggtgctgaggcagtgcccattagcccttgatgccattctaggcttgttgtccctttctgtaaaaggggcagaggtggcatccatgacaatgaatgtgatccaaaccgtgcctaacttggactggctctctgtgtggatcaaagcgtatgcttttgtgcacactggtgacaactcaagagcaatcagtaccatctgttcactagagaaaaaatccttattgcgagataacgtggacctattgggaagcttggcagatctgtacttcagagctggagacaataaaaactctgtcctcaagtttgaacaggcacagatgttggatccttatctgataaaaggaatggatgtatatggctacctactggcacgagaagggcggctagaggatgttgagaaccttggatgccgccttttcaatatctctgatcagcatgcagaaccgtgggtggtttctggctgtcacagcttctatagcaaacgctactcccgggccctctatttaggagccaaggccattcagctgaacagtaatagtgttcaagctctgctacttaagggagcagcacttaggaacatgggcagagtccaagaagcaataatccactttcgggaggccatacggctcgcaccttgtcgcttagattgttatgaaggtcttatcgaatgttacttagcctccaacagtattcgagaagcaatggtaatggctaacaacgtttacaaaactctgggagcaaatgcacagacccttacccttttagccaccgtttgtcttgaagacccagtgacacaggagaaagccaaaacattattagataaagccctgacccaaaggccagattacattaaggctgtggtgaaaaaagcagaactacttagcagagaacagaaatatgaagatggaattgctttgctgaggaacgcactggctaatcagagtgactgtgtcctgcatcggatcctaggagatttccttgtagctgtcaatgagtatcaggaggcaatggaccagtatagtatagcactaagtttggaccccaatgaccagaagtctctagaggggatgcagaagatggagaaggaggagagtcccacggatgccactcaggaggaggatgtggacgacatggaagggagtggggaagaaggggacctggagggcagcgacagtgaggcggcccagtgggctgaccaggagcagtggttcggcatgcagtgagggggcggcagctccatggccgcagtggcctgccctgctctgagcacttccgtggactgaaggaaccgtaggagcctgctctcagaaggacaatgattcagcatgtgattgcagcaggggtctctgccccctcgctcccaattcctagtcgtgacttcatttctaaaacagagcctgaccaaccttccatgtatctccatcctcccctgctccagccagggaggactgagggagtgccccgagacccacgcacatgttggggcttctgggccaagagtactttttatataactaatttctaaatccaaaagctcaaggaatagacagtgttctgtgacatggattggtttgaaggagttacccaccatcccagcacgataatgtcatctcccaagttggatggcagcacgatctggccctagggagcttcctgttcccagaagtcattgtcctgggctatccagatgtccctagtaaatcttgcttccttctgcaatgttagtaatgccttaagctgacagttgctattttgcagaacagttttcctctttgcttagctagtaacttgcctctgagcctgggctgatctgagaaacaggtgtgacaagagcatgaaccagaggtgcacctggggcagttccctaataaaactggtttgtacagtcatggtgttggggtgatcagaatggaagcccttttcaaaatagactcttagtatttttgtcttattcgcaatgcattgattcagccccagaattatttgccagaaatagactttcttcccctggtgttgggagccaggagggttggaaagctcaggaaccctgagctggttcatctgtttgcatattgggtaggttaatttccctggagcctgagagtctttggccagatttcagctgcgtctgcctggctcttttgctgcagctgtgagattggggtctggttccagcagtctgtcactggtcagcctgagtatcacaccctgagctctggggctgggagtttcttcccacaccctctcccttgtgccttaagttgcgatggctctgagtatacaattaatcggaggtgaggggtgggtgtcacagctaatcccaaattcaaaaattagtccaaggtgctgcaaaatataaatttgatgtcagtagaaagtcgtatcctaaaatgtaaaaactgtaagtgtacagtagttaatgagctcagaacatctgataactgcaatttaaaatgggcaaaaagttaaaaaaaaaaaaaaaaaaaaaaaaa

SEQ ID NO: 4231 - DNA, 1675 bp, Homo Sapiens
  NM_016243
ctccgacccgccccgcggcgcattgtgggatctgtcggcttgtcaggtggtggaggaaaaggcgctccgtcatggggatccagacgagccccgtcctgctggcctccctgggggtggggctggtcactctgctcggcctggctgtgggctcctacttggttcggaggtcccgccggcctcaggtcactctcctggaccccaatgaaaagtacctgctacgactgctagacaagacgactgtgagccacaacaccaagaggttccgctttgccctgcccaccgcccaccacactctggggctgcctgtgggcaaacatatctacctctccacccgaattgatggcagcctggtcatcaggccatacactcctgtcaccagtgatgaggatcaaggctatgtggatcttgtcatcaaggtctacctgaagggtgtgcaccccaaatttcctgagggagggaagatgtctcagtacctggatagcctgaaggttggggatgtggtggagtttcgggggccaagcgggttgctcacttacactggaaaagggcattttaacattcagcccaacaagaaatctccaccagaaccccgagtggcgaagaaactgggaatgattgccggcgggacaggaatcaccccaatgctacagctgatccgggccatcctgaaagtccctgaagatccaacccagtgctttctgctttttgccaaccagacagaaaaggatatcatcttgcgggaggacttagaggaactgcaggcccgctatcccaatcgctttaagctctggttcactctggatcatcccccaaaagattgggcctacagcaagggctttgtgactgccgacatgatccgggaacacctgcccgctccaggggatgatgtgctggtactgctttgtgggccacccccaatggtgcagctggcctgccatcccaacttggacaaactgggctactcacaaaagatgcgattcacctactgagcatcctccagcttccctggtgctgttcgctgcagttgttccccatcagtactcaagcactataagccttagattcctttcctcagagtttcaggttttttcagttacatctagagctgaaatctggatagtacctgcaggaacaatattcctgtagccatggaagagggccaaggctcagtcactccttggatggcctcctaaatctccccgtggcaacaggtccaggagaggcccatggagcagtctcttccatggagtaagaaggaagggagcatgtacgcttggtccaagattggctagttccttgatagcatcttactctcaccttctttgtgtctgtgatgaaaggaacagtctgtgcaatgggttttacttaaacttcactgttcaacctatgagcaaatctgtatgtgtgagtataagttgagcatagcatacttccagaggtggtcttatggagatggcaagaaaggaggaaatgatttcttcagatctcaaaggagtctgaaatatcatatttctgtgtgtgtctctctcagcccctgcccaggctagagggaaacagctactgataatcgaaaactgctgtttgtggcaggaacccctggctgtgcaaataaatggggctgaggcccctgtgtgatattgaaaaaaaaaaaaaaaaaaaaaaaaaaaaaaaaaaa

SEQ ID NO: 4232 - DNA, 9919 bp, Homo Sapiens
  NM_016248
gcttgcttgcccggctcgctcacgggtcgttgaggccggtgacatgtctgtgagctgcggaggctgcggcccccagatctttctctttgacactttgcaataaaaaagggcagtgagattgaataggtgttttgtggattaactcttcattgattatatacaacaaaaaatagttatggcgactttcagaaacaatcacatgaagactaaagcatctgtcagaaaaagcttcagtgaagatgtgttccagtctgtaaagtctttattgcagagtcagaaggaactatgcagtgtaacagcagaggactgtttacagcaggatgagcatgccaatttaactgaggtcacatttctgggttttaatgaagagacagatgctgctcatatacaggatttagctgcagtttctttggaacttccagatattctgaattcactccacttctgcagtctaaatgaaaatgaaattatttgtatgaagaatataaataaaccattagatataagcagtgatcctctaaatcagagtcatccttctggaatgctttgtgtcatgagagtgtcacctacatcaccaagacttaggattgattttatctttagtctcctaagtaaatatgctactggtataaggtacaccttggacacattcttgcatcagaagcaccaacttgagaccactgatgaagatgatgatgatactaaccagtctgtgtcatccatagaggatgactttgtcactgcttttgagcacttagaagaggaagagacttcaaagccatacaatgatggaatgaacattactgtgctaaggagccagtgtgatgctgcttcccagacggttactggtcatcatttagaaacccatgatttaaagattctcattagctctggacagcagaagtcattggctaaaccctcaacttcctcagtgaatgtcctgggacataaagaactaccttctgtgaaaacttcagtcacaacatcaatttcagagccttggacccaaaggagtttctataggtcatctaatgcttcagataaagatagtgatttacagaaaacatttttttcgtcttctcctgcctactcatctgaatcagaatgttcaagtccaagtcctgttattttcttggatgaagagggatatcaaaaaagcttaaaagcaaaacttgagctgcctaaaattcctgtgatgaaagatgatatagaggattcagactcagaagtaagtgaattttttgatagttttgatcagtttgatgaactagaacaaactttagagacttgcctgtttaacaaagatcccgtcatagggaagtcatcgcagaggaaagggcacaaacatggaaagtcatgtatgaatcctcaaaaattcaagtttgatcgtccagctctcccagctaatgttagaaagccaactcctcgtaaaccagaatctccatatggtaacctgtgtgatgctccggattctcctcgcccagtgaaggcatcaagggaagatagtggtttatttagtcctattcgatcctctgcttttagtcctcttggaggctgtactccagctgaatgtttttgccaaacagatattggtggagataggattcatgaaaatcatgattctgtttattacacctatgaagactatgcaaaaagcatttcatgtgaagtactaggctcagttcttcgtacccaccatactaataccctatcaaatattaacagtattaaacatggagaaaataaaactgtaacttttaagcatggaaaccttgatcaaaaaaataaatctaaaaataaatccttaatgattaaagatagcattcaaaaatttgcagcagatcttgtggaaaaaagttttggcagtgcatttaaagacttacagaaaggagtctcttcatgtaccaatgctttgtaccacttagccatcaaattgacatcatctgttttgcagatggcatttgatgagctgagaaggcagcgtgcattttcactaaaagaacgtgccattagtggcctggctaactttttggtgagtgaagctttatcaaatgccttaaaagatttacagtatgtaaagaagcagatattcacaaacacagttgctaggtttgctgcagatcttgctgaagagcttgtttttgaaggcatcatggaggtgtgtcagttttcatatcctcaaacgcctgcatctccacagtgtgggtcgtttgactttgaagacaaagtagtgaagttgtatgcaaaagatttgtctgaatctgtaatacaggaagcattcattgagctatcacaagttgatgtgacctttacaacaaaggcagcagttagtgtctctacggataatatcaagtatgtgagtgcagaaagtgtagtgccatcgacacaggctgtcacgttttccccttcttttcacaatcaagcaattatggtgacaaaaccagtgcaggaatataaaaaggaatacacagtgcagcaggccttgttttgtacttctggaattgttacttctataccggtgcccttggcaggaagtgcccttctcccatatcatatttcatctactgcatgtcaggccaaggctcatctgtcatctgatgatagtaattcaaatggtgattctgcccaagtgcatattgccacaaaaaacagagaagaaaaagcagcttgtctcagaaatatttgtttaccttcagaacacaatccaggtaatcagaatgattttaaaccaactaatgacgatattgaaatgcagagttcctcaaaattaccaaatgatcctgcaattattagcaacttttctgcagcagtggtgcatacgatagtaaatgaaactttagagtcaatgacatcattggaagttacaaaaatggttgatgaacgtacagattatttaactaaatctttaaaggagaaaacccctccattttcccactgtgatcaggcagtgctgcaatgcagtgaagctagtagcaataaggacatgtttgctgaccggttatctaaatctattattaaacattccatagataagagcaaatcagtgatcccaaatatagataaaaatgcagtatacaaggaaagcttgcctgtttctggagaagaatcacagttgacaccagaaaagtctcccaaatttcctgactctcagaatcagttaactcactgctcactttcagctgcaaaggattgtgttccagaatgtaaagtttctatggttcatggatcctccctagagacactgccatcttgtccagctgtgacaggtcagaaatctgacttgaaggaatctgctaaggatcaaccactgaaaaagcataacttgaatagtacatcacttgaggccttgtcttttggacaggaaaacccctttcctcattcacatactttctcatctacagcacttacctgtgtagatggtttgcatgtggaagataaacagaaagtcagagacagaaatgtaatacctgatactcctccatcaactcctctagtaccatcccgggctagttctgaatgggatatcaagaagttaactaaaaagctcaagggagaattagccaaagagtttgcacctgctacaccaccttctactccacacaactcatctgttggtagtttgtctgagaatgaacaaaatactatagaaaaagaagagttcatgttgaaactcatgcgatctctttctgaagaagttgagagtagtgaaagtggagagctcccagaagtggatgtgaagtcggagcactcagggaagaaggttcagtttgcagaagcattagctacacacatcctttctcttgcaactgaaatggcagcttcccatttagataacaaaataattcaagaacccaaggttaaaaacccttgcttaaatgtgcaaagtcaaagaagtgtgtcgcctacttttttaaacccctcagacgaaaatttgaaaacattatgcaattttgcgggtgatctggcagcagaagtcattacagaagctgagaaaatagcaaaagtccgaaattgtatgcttttcaagcaaaagaagaacagttgttatgctgatggtgacgaagattataaagtagaagagaagttggatatagaggctgtagtgcacccaagagaagtggatccgtttattctttcattaccaccaagttcttgtatgtcaggtctgatgtataagtatcccagctgtgaaagtgtgacagatgaatatgcaggtcaccttattcagatactaaaacaggaaggtggtaatagtgagttgataatggatcagtatgccaataggcttgcctaccgatctgttaaatcaggattacaggaagcagctaagacaaccaaagtgcagtgcaactcaagaatgttccctgtgccaagttcacaagtgaaaacaaacaaggaactgttaatgttttcaaacaaagagcaccaccaagaagcagacaaaaagagacaaagtaaaagaaatgaaggttacttttgtaaaaatcaaacttgtgaaaggaccctggatccatatagaaatgaggtctcccaactgtatagtttttcaacctctctggttcacagcataacaaaagatgctaaggaagagttgacagcctctctagttggcctaccaaaatccttaacagattcttgcttgtttgaaaaatctggatatgaagaagataatgagtgtcacgttacaccagaattgcctaagtctcttcagccttcctcacaaaatcacaggttttaccacagcactggcagtttaaatggatatggttgtggagacaatgttgttcaagctgtagaacagtatgccaaaaaagtagtggatgacactctagagctaactctaggatctacagtgttccgagtgtctgagaccacaaaatcagcagacagggtcacttatgcagaaaagttgtcacctcttacaggtcaagcttgcagatactgtgaccttaaagaactccacaattgcactggaaattcatctcagcactttttcagacagggttctctcgccagtagtaagccagcttctaatccaaaatttagcagccgctatcagaaatctaggatttttcatctcagtgtccctcagattcatgttaatcttgataagaaggcagtgcttgctgagaagatagttgctgaagccattgaaaaagctgagcgagagctgagcagtaccagcctggcagccgacagtgggatcggacaggagggtgccagctttgctgaaagccttgccacagaaaccatgacagcagctgtcacaaatgttgggcatgctgttagcagttcaaaagaaatagaagactttcagtcaaccgagtctgtcagtagccagcagatgaacctcagtattggtgatgacagcactggtagctggtccaatttaagttttgaagatgaacaccaagatgaaagcagcagttttcatcatctaagtgaaagtaatggtaacagcagtagctggagcagtcttggtttagaaggagatttgtatgaggacaatttatcctttccaacatcagacagtgatggaccagatgataaagatgaagagcatgaggacgaagtagaaggtttggggcaagatggaaagacactgctaattacgaatattgacatggagccatgcacggtagacccccagctaaggattattcttcagtggctcattgcctctgaggctgaagttgcagaactttattttcatgactctgcaaataaggagtttatgctactttcaaaacaattacaagagaaaggatggaaagtgggagacctcctgcaggctgtgcttcaatactatgaagtgatggaaaaagcttccagtgaggagagatgcaagtcgctgtttgattggctcttggaaaatgcatagagcaaaccccaaaccagtatattttagtatttgtttggggaggggaacaagccaataaagatgtttaggataaaatttgaatagtgaatattaacatcgtaagtcagttgggaggcaagtaaatatagctttctgagcgctttgtgttatcactcggtgtatatagttcatacttttgtaatctgtcaaaatactaccttcatttattcttctatacacatgtgtagtgtgtcaagaccctaagaacatgtatttgaaggaaggtctaaccagggggttttcaggggcattgtctgaccacattctttttgtatccaaatagtgctgctagaaactgcactgaagtggctgaggataggttccagtgatagagttataattttgctcctttgcaaacaaatggtatctaattaataactagtctgacatcagaaaataaaattgaggctgatttttaaaaatttctagtagatttttggcctttcctgtttttaaaaatcagtttcattttcatatttcatagatcagctattggtagctttttgatttccccaaactatttaatttcttagcagaaacattagtattttaggtttctataaacactataagtgatagtttcccccatcctttcattgacattatttgccaatgctgccagtcattctggcatgaaaggtgtgtgtgtgtgtgtgtgtgtgtgtgtgtgtgtgtgtgtgtgtaagggagtactttaaccttgccagtttgttccctcttttattttactgttttctttttagaaacccactgttaaaatttaaaaaggtgctttaaaataaaacgcctataaagattgtgcagtaagaatttttattgacaataattaaaattttttttgacaattttgggttcccaacttatcttacaagtgaaaacttaaattgtaaaacatgttgaaattttaaaaattaatgttaatatggaaatgcatttagagaagcccagtagtttttattgttggatttttgaaaaaacctctaccaagaatgtggtgttttttttgtttgtttgtttgtttgttttagaaaaattgggatttccccccaccccgccccacccagataaactatatctacactgtctcgtcaagttctctgacacgatctttctgggctctacatttcctactagtttgtgtccagaaactgcaagttgacatgaatagaggacaaaggttgtgtcttgcttttgtctctctcttccctccctgcaactctctctcccctcctcccactctcttccccctcccccctcctcccactgtctctcacctcccccaccccccactctctctcatctctcgctgtgtcctgtgtatgtgtgggtgtgtgtgtatttgggtgtgtaaatgttggttcttccactactggattttgtaatctaggataaatcactttttttggggactttgattttgctccattacgttttcattttttctgagcactgactgttctgaaagctgcacaaaacgtagaaagaagacatagcgcctgccagggaataggaaatgagggcacttacacattaatgtgaattagtaattgtggtatagaaatgttttatagtgaaagattcaaatttgcttttcaagaaaaatgccaaaagctatttaaataattcgaggttacatcgtaggttttgatttttctcaatttaagatacagaaatacagcaagccttaatataaagtttcctaaagtttcttcaagtattttttaaggtggagaaatgcaggaattgtataaccagaattgttcctgcctttagcttttcagaacttgagatgtggcagcactggactgggtttttttaaatgttaggactaggaatgtttgctcttgttaattatgaattaattgattattaagtttagaatgcatttttacaagtatctaactatcaaattgtgtttagtaacttgagtgtatgcacaagtttgatcaacagcaaaatagagttctgaatttcttttaaagtgatgatatattattttgtgaaactttgtgtttgaaaatgtttatttctgtttatggtgtaatcattctgaggtgaggcttttcttatttcctttgcattttgctagagctgtgctgagttcagcatttgcttatttaaccactacataatgacagaccagttattaggtattagcatgtgtggtaataataatagtggaacttcacacttacatcaattcagtgcaggggcatagaataaaatattaaatattggcagatgtatgaaaagaagtgtgagttaaaaatattgaatattggcaggtgtgaaaacaagtgtcaaaattcctcatatagagaaaataattttgagtttagagtattatcttttaattaagtgtagtctaaacttaactttctgtaaaggcactttgtggtttttccaaagatgttctagatctatttggttgctctatagtcaaacagctcttttgaagacaactgtcttattttattacaaattggcttgacatatttatactgtaacattgtaatattgctgtgctgtacattttggcccttacgaaatacgtctttttcagaactgttaaagttttgatgtacatcgagctgaattctgtttttaccagtttcaaaaccttcaagtgatatgtggaaaaaagtgaatgagacctctgatagggggttttcagaaccttgttcacaccaaaatgtgacagttctttcatgttttcctaaaccaagttaaaattacatgtatattttggtgttaaggttgatttttaagatacttctgatttgtacaaaaggaatgtttcctttataaatcacagaagaaaatgacaatatctgttggatatttgatataatttaatggtgttataaaacctttaagaggattcatggtgaatatatgtgataacatctttatactttgaaaaatgttccacttacccttcagatatttgttgtaagttaattcaattcttaatactttaattttgctccaacaagggctttatgttgctggtaagagaatttatttactaaatgcactatgtataaagtgaaagatagtttacttatctgactttgatattagatggctgacattagtgcacataatgcagagtttaaccttgattcttcaacagagtccagatttaaatgtctacttagttaattagttagctgatattcttccacaattaatatattcaatttcccatcagtatatcactttaaattttatgtttttctaaggaaactttccacagaattttaaacaactgatgcatccatactcagggtgtagggagaatactttgcatttaaaaaccctgtccacctgtcaccagcacaagagaattagagcttcagtgagaatttagaaaaattatactaaagtgagatgcattttttctcattttcagcaagactcctctaagcatttactcatttactgtattcctgctctgaagatgtggatacagaattagtcactcttgtcactttatttatttattggtttttttttaaccatctgtgtacattcctttcatagggtagagttctagttctagaagttcttattttgtttttgttgtaatgtttgaatactatttaatatccggttttaatattgctggatttgctacctttggttacttgtgcagtgttaaaagtaatccactttcttgtttaatataccagatacatagcaaaagcagcttggaataattatagctgtttatttggctgtgctcagttactatattaagatcttgtactgtgtaacagtaactcttttttgcttttcagtaatttaatatgttcacttaacaaaatacgaactttgagatgcactaaagttttgtttcagcagtggctcaaaaaatttcagaaattacttttgtaattatttgcaattaattgttcttttatcttacaattgtttaagcctgtgatctttcttctcccagctaagagttcttcaataaatttaagaaatacctgg

SEQ ID NO: 4233 - DNA, 2209 bp, Homo Sapiens
  NM_016256
ccacatgacccgaggccccggtccaatatggcgacctccacgggtcgctggcttctcctccggcttgcactattcggcttcctctgggaagcgtccggcggcctcgactcgggggcctcccgcgacgacgacttgctactgccctatccacgcgcgcgcgcgcgcctcccccgggactgcacacgggtgcgcgccggcaaccgcgagcacgagagttggcctccgcctcccgcgactcccggcgccggcggtctggccgtgcgcaccttcgtgtcgcacttcagggaccgcgcggtggccggccacctgacgcgggccgttgagcccctgcgcaccttctcggtgctggagcccggtggacccggcggctgcgcggcgagacgacgcgccaccgtggaggagacggcgcgggcggccgactgccgtgtcgcccagaacggcggcttcttccgcatgaactcgggcgagtgcctggggaacgtggtgagcgacgagcggcgggtgagcagctccggggggctgcagaacgcgcagttcgggatccgccgcgacgggaccctggtcaccgggtacctgtctgaggaggaggtgctggacactgagaacccatttgtgcagctgctgagtggggtcgtgtggctgattcgtaatggaagcatctacatcaacgagagccaagccacagagtgtgacgagacacaggagacaggttcctttagcaaatttgtgaatgtgatatcagccaggacggccattggccacgaccggaaagggcagctggtgctctttcatgcagacggccaaacggagcagcgtggcatcaacctgtgggaaatggcggagttcctgctgaaacaggacgtggtcaacgccatcaacctggatgggggtggctctgccacctttgtgctcaacgggaccttggccagttacccgtcagatcactgccaggacaacatgtggcgctgtccccgccaagtgtccaccgtggtgtgtgtgcacgaaccccgctgccagccgcctgactgccacggccacgggacctgcgtggacgggcactgccaatgcaccgggcacttctggcggggtcccggctgtgatgagctggactgtggcccctctaactgcagccagcacggactgtgcacggagaccggctgccgctgtgatgccggatggaccgggtccaactgcagtgaagagtgtccccttggctggcatgggccgggctgccagaggccttgtaagtgtgagcaccattgtccctgtgaccccaagactggcaactgcagcgtctccagagtaaagcagtgtctccagccacctgaagccaccctgagggcgggagaactctcctttttcaccaggaccgcctggctagccctcaccctggcgctggccttcctcctgctgatcagcactgcagcaaacctgtccttgctcctgtccagagcagagaggaaccggcgcctgcatggggactatgcataccacccgctgcaggagatgaacggggagcctctggccgcagagaaggagcagccagggggcgcccacaaccccttcaaggactgaagcctcaagctgcccggggtggcacgtcgcgaaagcttgtttccccacggtctggcttctgcaggggaaatttcaaggccactggcgtggaccatctgggtgtcctcagcccctgtggggcagccaagttcctgatagcacttgtgcctcagcccctcacctggccacctgccagggcacctgcaaccctagcaataccatgctcgctggagaggctcagctgcctgcttctggcctgcctgtgtctgctgccgagaagcccgtgcccccgggagggctgccgcactgccaaagagtctccctcctcctggggaaggggctgccaacgaaccagactcagtgaccacgtcatgacagaacagcacatcctggccagcacccctggctggagtgggttaaagggacgagtctgccttcctggctgtgacacgggaccccttttctacagacctcatcactggatttgccaactagaattcgatttcctgtcataggaagctccttggaagaagggatggggggatgagatcatgtttacagacctgttttgtcatcctgctgccaagaagttttttaatcacttgaataaattgatataataaaaggagccaccaggtggtgtgtggattctgaa

SEQ ID NO: 4234 - DNA, 4277 bp, Homo Sapiens
  NM_016257
ggcggctccggcgcagaccttggagagcacagctgccggcccgcgagccagcctcggttcccgcggcccgccgaggctcggagccatccagcgacccggcgaccggcctcaggccccgccatggggaagaccaacagcaagctggcccccgaggtgctggaggaccttgttcagaacactgagttcagcgagcaggagctgaagcagtggtacaagggcttcctgaaggactgccccagcggcatcctcaacctggaggagtttcagcagctctacatcaagttcttcccctacggcgacgcctccaagttcgcgcagcacgctttccgcaccttcgacaagaacggcgacggcaccatcgacttccgggagttcatctgcgccctgtcggtcacctcccgcggcagcttcgagcagaagctcaactgggcctttgagatgtacgacctggacggcgacgggcgcatcacgcgcctggagatgctggagatcatcgaggcaatctacaagatggtgggcaccgtgatcatgatgcgcatgaaccaggacgggctcacgccccagcagcgtgtggacaagatcttcaagaagatggaccaggataaggacgaccagattacattggaggagttcaaggaggcagccaagagtgacccatccattgtgttgctgctgcagtgtgacatgcagaagtagaagctggtgaggggcagggtccctggccagaaggggcatggccacctcccaacctgatgacctctctggctggcctcccaggaggagggacactccagcccccctctctggcccacccagtcctctgcccaagcccttcctcccctccatcaagatctttgagggaccacctcaccctgcaaaagagacaggtcctccagtaccctgtcttctagccccacctcccacttggccagaaccaatgtccattgggcataggggagttggcttttgccccaggaggtgaggttaaggagttgggggcctggggttctggttaggaattctcttgatcctgggattatgctttataggatgtggtcccacaggcctgtcacagggccaaattgggtctgtccattcctgaggctccagatcccataaagggggtctcttccccatcccttctactctacctggcccttccagccccagcctttggagcgttcattcagtcctttcttcagctaatgattactgagcacctgtttggtgctaaggatatggtcatttacaagacacatcttgtgccctctggaagctcatagggttgtgaggcaaacttccagccgtcagggtctcagctaagcagaaggtgctggaaggctggttagtctgggaggagctatttcatcttccagctcagctccacacaaagctgcagaaggacgaaatgaaaagcatttggaagtttaggagccacgtgagtgaaagttttaagaaaaatgaaatttatgtcatacttatttttttagtaccctttaaaggagctacagtcattttattatttcaggaggttaaaatatactctatattacttggtttattataaaatgattaaatgaatagagaaaatattaattttcaaggggaaaaaacctgagaagaaagggagaaaagaccatgaaatttaccagataacactttttaagactaagtcctgagctgccactctcagcagtttttgctgcttcagctcttcctttttattacctttttcaattcaacaagcaactttctgctacatacttactccggttgggtgctgacttcagggacaggaaaaagcaaggtttgcaaagagtgaaactagtgtatattccgtatcttggtagttcgtttctggattgggtttagtttcagaactggacttgttccttcactgccacagaatcagaaagagctagaagaaaaggctcacctggccactgtttaggcacccagacataatttatggacgaaatgcctaaaaatgtgccaggcatgctctgtttgagaggctttttctaaccccaaatcttagatctgccaggtagttcaacatcttccaagtgtgctggttctgctttccaatgcctgcttcccaattttggatccatgagctatacagctgcatgctttgactgccggaaaaattaatcttgcttcttcatcaggtctttctcctgtacttgtgatcagaaattacctttgacgtgcagtgacagttgatttcctcttgaactgccggtgaaaacagtctagtacacaggtgctgtcagcccagggtgggagcaggaaatgattgctgagcccggggcaggggaattgcatctgcaggaaagagatgcagcatgctcctcactcctgagtgcccacctgtcctgcttctctgcaggtgaaaactctgggggatgctgatcaatagagcttggtcccaagctctactgggcccttggaggtagcaaggccactgggttgctatcctcttgctggggatagcaaccactggtttgcaaccactgggttgctatccttttgctatcctcttgctcatgaccagccatatggtgaggctggggagttcacatcctcaggcaggaactagcagttgtttatccagcaatgcctcaaggatgttgcattgctcccaggagctggctattaggtatgtcttgtgcggtcagtcagcatcacagacacatagatgctcaccagcctggcttagctgggacctaaatcttctggtgaaaagcttttcactaagtgaggttccttccctgcaaatgctgaatctagcctaattcgcaaccacacagaatttcatggctttcaaaggcttgccatgtgccccatctcattctatactcacatcccatggaggtgaggattttcacttcttttctctagacttggaagctgagattcagagaggaagcatcccttgtgcaagatcacatagtcaggaggtgacacagggctaagacttgaaccaaggctctaagaggatttcttcttttcagagtctcttccctgtccatttctgtgactaagctgtgcagaggttgacagcagggcaagttacattgatattcatcctttataggcttcctgctaaaaagcttctgagattgtggtcttccaaaaaaaataggagcttggttgaagtccccacattttcaagcactcagtgttctgcctctggcagctgtgctaacagctcagtgctgtcctgggagtcctctgactcagaaccctcgaagcatcctgcattgtctttacccaccatcatcgtcactaagagaaacatgcctacccatgaaggcgtgtttgattactccaggcttctggacacacatacccatgggtgatttttgctcctcaggcccaatattctcagacagcccagcagtgtgaacacacaatgccaggccaggaactgggaccaccatcttgctgatggaaggaacaacaggtggcccaggacatgctcctgcatactcctgggtgtcccagggactgtgtgctcaggagcactgtggtagagcactggccctgccttgagaagagacacaggtctcccgtccctgcaccagctgagagagacttgccacaaagcacaaggctggcagagatttatgtatgacttgcacagacacaaaaatatacagacaatcaaaacattgatatattcaaactctcctttaaattccaatcttattgcaacaactctgtgaattgcaaggtcccagaatctgccttctcacatactctaccctcattcatccttttgggctaattgatgagcatcttatttcttatctctaaaaattatcagcaaaggctacttcagatggccactttagtcctttcagctgtagtcaggattatttaacttacctgtatatcaaaagtgaagaaaaagttagttcataagtaaaggcactaaatcctttcctgacaatggcagagtctctagaggtagaaatttgccttgctgcagagagagaaggaatggcgtgggatgggggaaagaaaagaaagagaagaagctggggtctccaggcagggtagtaagctgacactaaatattttttacacaaaaatgtattgaagcaacaaatatttcctgaagatccaccctgggtgaggctttgagctgactttagagatcactgtggggtcaagaatgtcttacatgttttattcatcattcttgaaaaaagaaataattcaaaccttggaattaaaaagtcagaaaaataaaaaaaaaaaaaaaaaaa

SEQ ID NO: 4235 - DNA, 3073 bp, Homo Sapiens
  NM_016258
ctttccaggtgttagtcgaaacctcgtggtgcgaccctggtcgtcccaaaccccctaggccttaatcctggggcggtgggggcggggaggccgtgagcacggcttccgctcctccaatccgccagagggcgcagcggccggcctctcccttcccggggttcttcgcgccgggccccttccgcgtgggtgagtgaatgtgagagtcagcgctcgcgccgcgcgcgccgcccgcctccgctgttcggcgctctgctttaggcggtggggggcgggcgcgcgcgtaaaagcatagagacgggcattgagctcttgggctagagcgtcgccgagtcggagccggagcctgagccgcgcgctgtgtctccgctgcgtccgccgaggcccccgagtgtcagggacaaaagcctccgcctgctcccgcagccggggctcatctgccgccgccgccgcgctgaggagagttcgccgccgtcgccgcccgtgaggatctgagagccatgtcggccagcagcctcttggagcagagaccaaaaggtcaaggaaacaaagtacaaaatggatctgtacatcaaaaggatggattaaacgatgatgattttgaaccttacttgagtccacaggcaaggcccaataatgcatatactgccatgtcagattcctacttacccagttactacagtccctccattggcttctcctattctttgggtgaagctgcttggtctacggggggtgacacagccatgccctacttaacttcttatggacagctgagcaacggagagccccacttcctaccagatgcaatgtttgggcaaccaggagccctaggtagcactccatttcttggtcagcatggttttaatttctttcccagtgggattgacttctcagcatggggaaataacagttctcagggacagtctactcagagctctggatatagtagcaattatgcttatgcacctagctccttaggtggagccatgattgatggacagtcagcttttgccaatgagaccctcaataaggctcctggcatgaatactatagaccaagggatggcagcactgaagttgggtagcacagaagttgcaagcaatgttccaaaagttgtaggttctgctgttggtagcgggtccattactagtaacatcgtggcttccaatagtttgcctccagccaccattgctcctccaaaaccagcatcttgggctgatattgctagcaagcctgcaaaacagcaacctaaactgaagaccaagaatggcattgcagggtcaagtcttccgccacccccgataaagcataacatggatattggaacttgggataacaagggtcccgttgcaaaagccccctcacaggctttggttcagaatataggtcagccaacccaggggtctcctcagcctgtaggtcagcaggctaacaatagcccaccagtggctcaggcatcagtagggcaacagacacagccattgcctccacctccaccacagcctgcccagctttcagtccagcaacaggcagctcagccaacccgctgggtagcacctcggaaccgtggcagtgggttcggtcataatggggtggatggtaatggagtaggacagtctcaggctggttctggatctactccttcagaaccccacccagtgttggagaagcttcggtccattaataactataaccccaaagattttgactggaatctgaaacatggccgggttttcatcattaagagctactctgaggacgatattcaccgttccattaagtataatatttggtgcagcacagagcatggtaacaagagactggatgctgcttatcgttccatgaacgggaaaggccccgtttacttacttttcagtgtcaacggcagtggacacttctgtggcgtggcagaaatgaaatctgctgtggactacaacacatgtgcaggtgtgtggtcccaggacaaatggaagggtcgttttgatgtcaggtggatttttgtgaaggacgttcccaatagccaactgcgacacattcgcctagagaacaacgagaataaaccagtgaccaactctagggacactcaggaagtgcctctggaaaaggctaagcaggtgttgaaaattatagccagctacaagcacaccacttccatttttgatgacttctcacactatgagaaacgccaagaggaagaagaaagtgttaaaaaggaacgtcaaggtcgtgggaaataaaaggcagttctacacagactgcagcaacggttgcatctgcatatcctaagaggaaaaaatgaccttcaagagaattaggacttttttcttaatttcactgacttcagagacgattgcagacttgcagtttaagtattggaatttcacaaaagacataggacttaactggaaaatgaaaaaaaaaagaaaaagaaaaaactaaacaaaaaatccctctaggtagtttaggtgaaaaatgtcccttttattttggctttggttgtgatttcagagcataatgctatgtttttttgtctttttactatgtttttcggatttttaagtccgtaagtgcatacagttttctctaatttttaaaccctttcctcctcccattttgacatttgcacttggagaacacttgagttgtgaaggttttgggcatccaccccagaaagtgggaatttgattttatccttccgaactggaagaacatttttatgaagaatttttgtctaggagaatataacagtgttacccaaggttgtgtctttaagggtggttcattttctctgaccttttgttactcaaagtaaagtactaggagtcctaagaaatgttctgttcttgtacattatactgattaagtcaggattaatttgatttcaaagctgagaacagtggtaaaaactcgtttacagaaatgcattttggaagagaaaaatactgtaaaacgtgtcgtgaatgtttcttcagtttcttgttcagccaatgaggaaagggcattgcctttctttttaccattaatcacttctcaataaacgtgagatcctgttgagcatcaaaaaaaaaaaaaa

SEQ ID NO: 4236 - DNA, 2505 bp, Homo Sapiens
  NM_016261
gcgcattgtcagctggagcgttcggtggacagtgagcatgcgtaccatatctgaagttcgtaaattgaaattgaacatgcgtaattaatctttctgaataggaaaaaatatatacacaacaaaactctccgtttatggaacatgcgcatttgttctcagtaagtttttcgttttgaaagtgagcatgcgcatggtgagtaggttggtccgaagtttgaaccggacagaagcgctggtcggcgtctggcggttgtttttagaggtaatacacctagtttgtggctcagcatgtcaattgtaacagtgcaacttggtcagtgtggcaatcagattggttttgaagtttttgatgctttgcttagtgactcacacagttcccagggactctgctctatgagagagaatgaggcatatcaagcatcttgcaaagaaagattcttcagtgaggaggagaatggagttccaattgcccgggctgttcttgttgacatggaacccaaagttatcaatcaaatgctgtcaaaggctgcccagtctggccaatggaaatatggtcaacatgcatgcttctgtcaaaaacaaggttctggaaacaactgggcatatggttactctgttcatggacccaggcatgaagaatctataatgaacataatccggaaggaagtggagaaatgtgactctttcagtggttttttcatcataatgagtatggctgggggcacaggatcaggattaggagctttcgttacacagaatttagaagatcagtactcaaactcattgaaaatgaatcagattatttggccttatggaactggtgaggttattgttcaaaactacaactccattttgacactttctcacttgtaccgatcttcagacgccctccttcttcatgagaatgatgccatccataagatctgtgcaaaactgatgaatatcaagcagatctcctttagtgatatcaatcaagtcctcgcacatcagctgggaagtgtgttccagcctacttattctgcagaaagctcatttcactacagacgaaatccactaggagacttaatggagcatttagttccccatcctgaattcaagatgctgagtgttcgtaacattcctcacatgtctgagaattcattggcatacaccacatttacttgggctggcctcctcaagcatttgagacagatgctcatttctaatgcaaagatggaagaaggtattgataggcatgtatggcctcctttatcaggacttcctcctcttagtaaaatgtctctcaacaaggacctgcattttaacacttccattgctaacttggtcattcttcgtgggaaagatgtgcaaagtgcagatgtggagggatttaaagatccagctctgtatacttcctggttgaagcctgttaatgctttcaacgtgtggaaaacccagcgggcctttagcaaatatgagaagtctgcagtgttggtcagcaacagccagttcttagtaaaaccacttgatatgattgttgggaaggcatggaatatgtttgcttcaaaagcctacattcatcagtacacaaaatttggaatcgaagaagaggactttttagacagtttcacgtcattagagcaggttgttgccagttactgtaatctctgatcttgaacaatgggaaaagtataccttaaggcatttctggactaaaatattttcaatactattttctctgtaaagttttcaaagttctccatcctggctaacacggtgaaacaccgtctctaccagaaaatacaaaaaattagccaggcgcggtggcgggtgcctgtagtcccagctactcgggaggctgaggcaggagaatgacgtgaacccaggaggcggagcttgcagtgagccgagatcgcgccactgcactccagcctgggcgacagagcgagactccgtctcaaaaaaaaaaaaaaaaaaaaatgttttcaaagttccattctgttaaagtaaccacgtagaatgctgagtctattctgcatactatgcccacagaaaaggaagaaaactttttaaaatggagaatcgcatgttttcaatgaaaacattcacttggtatttcatttgtaagaaaaaaaaatggtgcttttataaagaactttggggaaacactttgctgaaatgttgggactctggaactagccaagaaaagagaatattctctttgtctacatgttcctaaatctttactccaaaacaactccaaaaacaactcacaaagcatgaaccaaactttcacagcataatttcaagctaaggaattgtaattctgtacttaatatattcatgtttgaaatgaatgctttgaaccacaggagggagatgttgtcaaatgctacagtgtgaacatgtattttgaatattctgtaacagggcaagtttccactctaagcagctatttaaaaataaatatgaggattttggtaataaatgcttatgcttaagtacaaaagtaaaaaaaaaaaaaaa

SEQ ID NO: 4237 - DNA, 3620 bp, Homo Sapiens
  NM_016269
agcgccggcgaggcgcgggaggaggagaagcagtggggaggcgcagccgctcacctgcggggcagggcgcggaggagggacccgggctgcgcgctctcgggccgaggaaccaggacgcgcccggagcctcgcacgcggccaagctcggggcgtcccctcccctcggccgggcgaactcaaggggcgcagctctttgctttgacagagctggccggcggaggcgtgcagagcggcgagccggcgagccaggctgagaaactcgagccgggaacaaagaggggtcggactgagtgtgtgtgtcggctcgagctccgggcagaggcatttgggcccgaggcccccgctgtgactccccgagactccgcagtgccctccactgcggagtccccgcgcttgccggcaaaaactttattcttggcaaacttctctttctcttcccctcctcctcggcccccatcttctgctcctcctccttctctagcagattaaatgagcctcgagaagaaaaaccgaagcgaaagggaagaaaataagaagatctaaaacggacatctccagcgtgggtggctcctttttctttttctttttttcccacccttcaggaagtggacgtttcgttatcttctgatccttgcaccttcttttggggcaaacggggcccttctgcccagatcccctctcttttctcggaaaacaaactactaagtcggcatccggggtaactacagtggagagggtttccgcggagacgcgccgccggaccctcctctgcactttggggaggcgtgctccctccagaaccggcgttctccgcgcgcaaatcccggcgacgcggggtcgcggggtggccgccggggcagcctcgtctagcgcgcgccgcgcagacgcccccggagtcgccagctaccgcagccctcgccgcccagtgcccttcggcctcgggggcgggcgcctgcgtcggtctccgcgaagcgggaaagcgcggcggccgccgggattcgggcgccgcggcagctgctccggctgccggccggcggccccgcgctcgcccgccccgcttccgcccgctgtcctgctgcacgaacccttccaactctcctttcctcccccacccttgagttacccctctgtctttcctgctgttgcgcgggtgctcccacagcggagcggagattacagagccgccgggatgccccaactctccggaggaggtggcggcggcgggggggacccggaactctgcgccacggacgagatgatccccttcaaggacgagggcgatcctcagaaggaaaagatcttcgccgagatcagtcatcccgaagaggaaggcgatttagctgacatcaagtcttccttggtgaacgagtctgaaatcatcccggccagcaacggacacgaggtggccagacaagcacaaacctctcaggagccctaccacgacaaggccagagaacaccccgatgacggaaagcatccagatggaggcctctacaacaagggaccctcctactcgagttattccgggtacataatgatgccaaatatgaataacgacccatacatgtcaaatggatctctttctccacccatcccgagaacatcaaataaagtgcccgtggtgcagccatcccatgcggtccatcctctcacccccctcatcacttacagtgacgagcacttttctccaggatcacacccgtcacacatcccatcagatgtcaactccaaacaaggcatgtccagacatcctccagctcctgatatccctactttttatcccttgtctccgggtggtgttggacagatcaccccacctcttggctggcaaggtcagcctgtatatcccatcacgggtggattcaggcaaccctacccatcctcactgtcagtcgacacttccatgtccaggttttcccatcatatgattcccggtcctcctggtccccacacaactggcatccctcatccagctattgtaacacctcaggtcaaacaggaacatccccacactgacagtgacctaatgcacgtgaagcctcagcatgaacagagaaaggagcaggagccaaaaagacctcacattaagaagcctctgaatgcttttatgttatacatgaaagaaatgagagcgaatgtcgttgctgagtgtactctaaaagaaagtgcagctatcaaccagattcttggcagaaggtggcatgccctctcccgtgaagagcaggctaaatattatgaattagcacggaaagaaagacagctacatatgcagctttatccaggctggtctgcaagagacaattatggtaagaaaaagaagaggaagagagagaaactacaggaatctgcatcaggtacaggtccaagaatgacagctgcctacatctgaaacatggtggaaaacgaagctcattcccaacgtgcaaagccaaggcagcgaccccaggacctcttctggagatggaagcttgttgaaaacccagactgtctccacggcctgcccagtcgaccccaaaggaacactgacatcaattttaccctgaggtcactgctagagacgctgatccataaagacaatcactgccaacccctctttcgtctactgcaagagccaagttccaaaataaagcataaaaaggttttttaaaaggaaatgtaaaagcacatgagaatgctagcaggctgtggggcagctgagcagcttttctcccctcatatctgcgtgcacttcccagagcatcttgcatccaaacctgtaacctttcggcaaggacggtaacttggctgcatttgcctgtcatgcgcaactggagccagcaaccagcacatccatcagcaccccagtggaggagttcatggaagagttccctctttgtttctgcttcatttttctttcttttcttttctcctaaagcttttatttaacagtgcaaaaggatcgtttttttttgcttttttaaacttgaatttttttaatttacactttttagttttaattttcttgtatattttgctagctatgagcttttaaataaaattgaaagttctggaaaagtttgaaataatgacataaaaagaagccttctttttctgagacagcttgtctggtaagtggcttctctgtgaattgcctgtaacacatagtggcttctccgcccttgtaaggtgttcagtagagctaaataaatgtaatagccaaacccactctgttggtagcaattggcagccctatttcagtttattttttcttctgttttcttcttttctttttttaaacagtaaaccttaacagatgcgttcagcagactggtttgcagtgaattttcatttctttccttatcacccccttgttgtaaaaagcccagcacttgaattgttattactttaaatgttctgtatttgtatctgtttttattagccaattagtgggattttatgccagttgttaaaatgagcattgatgtacccattttttaaaaaagcaaggcacagcctttgcccaaaactgtcatcctaacgtttgtcattccagtttgagttaatgtgctgagcatttttttaaaagaagctttgtaataaaacatttttaaaaattgtcatttaaaaaaaaaaaaaaaaaa

SEQ ID NO: 4238 - DNA, 1655 bp, Homo Sapiens
  NM_016270
gcccgcccgcgccccgaccagcccggcctcgggcagccactcaccggtgtccccgtccgcgtccttcctccccgggtcccggccatggcgctgagtgaacccatcctgccgtccttctccactttcgccagcccgtgccgcgagcgcggcctgcaggagcgctggccgcgcgccgaacccgagtccggcggcaccgacgacgacctcaacagcgtgctggacttcatcctgtccatggggctggatggcctgggcgccgaggccgccccggagccgccgccgccgcccccgccgcctgcgttctattaccccgaacccggcgcgcccccgccctacagcgcccccgcgggtggcctggtgtctgagctgctgcgacccgagctggatgcgccgctggggcccgcactgcacggccgctttctgctggcgccgcccggccgcctggtcaaggccgagccccctgaagcggacggcggcggcggctacggctgcgcccccgggctgacccgtggaccgcgcggcctcaagcgcgagggcgccccgggcccggcggcttcgtgcatgcgaggtcccgggggccgccccccgccgccgcccgacacaccgccgctcagccccgacggccccgcgcgcctgcccgcgcccggtccgcgcgcctccttcccgccgcctttcggtggccctggtttcggcgcgcccgggcccggcctgcattacgcgccgcctgcgcccccagccttcggtctcttcgacgacgcggccgccgccgcggcagccctgggcctggcgccccccgccgcccgcggtctcctcacgccgcctgcgtccccgctggagctgctggaggccaagccaaagcgcggccgccgctcttggccccgcaaacgcaccgccactcacacctgcagctacgcgggctgcggcaagacctacaccaagagttcgcatctgaaggcgcatctgcgcacgcacacaggtgagaagccctaccactgcaactgggacggctgcggctggaagtttgcgcgctcagacgagctcacgcgccactaccgaaagcacacgggccaccggccattccagtgccatctgtgcgatcgtgccttctcgcgctccgatcacctggcgctgcacatgaaacggcacatgtagccgggacgcccccgcccacctgcgcgcggccgtggcgggtcccacgcgccgggcgcggccccctcccaaactgtgactggtatttattggacccagagaaccgggccgggcacagcgtggctacagagggtctccctcgatgacgacgacgacgacgccaccaccccagcccccgtctgtgactgaaggcccggtgggaaaagaccacgatcctccttgacgagttttgtttttcaaaatggtgcaataatttaagtggcatcttctctcccaccgggtctacactagaggatcgaggcttgtgatgccttgtgagaaataagggccttaatttgtactgtctgcggcattttttataatattgtatatagtgactgacaaatattgtattactgtacatagagagacaggtgggcatttttgggctacctggttcgtttttataagattttgctgggttggttttttttttaattaaaaagttttgcatcttttaaaaaaaa

SEQ ID NO: 4239 - DNA, 4575 bp, Homo Sapiens
  NM_016272
cagggaggggaagacggggagccggacgcacgaccggcgagcacagaagggcacaggagctgctccgcgagataccagcgagctgaggcgcggggctggctgggaagtagtcccggccgggccctggccccgcccctgcagggcggagggacgcatcacgcaggggtggggaagccggatccgtgcgcagggttgctaagggtgaaacttttcattgactttgctcacttcgggccggggcgcgggaaggtgcgggttgttggctgaggcaagccgtggctcgggcgacgcggggccaggagggcaggaccgtctgccggcgacagcccataccgtctgccgttgcgcgacacgaaccaccctccgatccgccatccccgcgtcgtcgccgctagtccgcccgcccgccctcgggccccccgctgccgagcccgacctcctaagagctgaaagaaattattgagagtcatagtccatagccccctgcttcgtcccccaaccctcaacgacgaaaaggacttcggtcccctggcccggcgacgcccgggaaggaaaggagagcgacctccgccccgcgctcaggccaccctggagggagaagccgccccgcggccggtagagcgccccgccgccgcggagacccgaagccgcctggagcccaaggctgtacacgtgccctgtgctgattctctgcctaggaaaggaccatgcagctagagatcaaagtggccctgaacttcatcatctcctacttgtacaacaagctgccccggcgccgggcagacctgtttggggaggagctagagcggcttttgaaaaagaaatatgaaggccactggtaccctgagaagccactgaaaggctctggcttccgctgtgttcacattggggagatggtggaccccgtggtggagctggccgccaagcggagtggcctggcggtggaagatgtgcgggccaatgtgcctgaggagctgagtgtctggattgatccctttgaggtgtcctaccagattggtgagaagggagctgtgaaagtgctgtacctggatgacagtgagggttgcggtgccccagagctggacaaggagatcaagagcagcttcaaccctgacgcccaggtgttcgtgcccattggcagccaggacagctccctgtccaactccccatcgccatcctttggccagtcacccagccctaccttcattccccgctccgctcagcccatcaccttcaccaccgcctccttcgctgccaccaaatttggctccactaagatgaagaaggggggcggggcagcaagtggtgggggtgtagccagcagtggggcgggtggccagcagccaccacagcagcctcgcatggcccgctcacccaccaacagcctgctgaagcacaagagcctctctctgtctatgcattcactgaacttcatcacggccaacccggcccctcagtcccagctctcacccaatgccaaggagttcgtgtacaacggtggtggctcacccagcctcttctttgatgcggccgatggccagggcagcggcaccccaggcccgtttggaggcagtggggctggcacctgcaacagcagcagctttgacatggcccaggtatttggaggtggtgccaacagcctcttcctggagaagacaccctttgtggaaggcctcagctacaacctgaacaccatgcagtatcccagccagcagttccagcccgtggtgctggccaactgaccatctacctgcccgtggggccaggagcacccaagaccacagaaaagagaaaggaaaggccaaaaaaaagaggaaaagaaaaatgtacaaaaagattttcgatcttctcactcttacttctagaaaaaagatccagcccaggcacggaatgggagggccctgcaaagcacccaagtgtgtttcactcaccccttaccgctcgcccaccggcctgtgatttatttggttggtttgggttttatatttctttttcttttttttttttcttacatgtagttttctatataacatctttaatgagtggcttcctgtgctaagaatggtccagatgtgaactgctgctccctgctcctcccttcctccttcacactcctagtttaggattgatgtgtccaagctcatagggaagaaagagctgcagctggagcctgaccctccctggaacagggagaggctggcccgtgtcactgcctctgtcacccagctatcctcgcactcaaagccatccaacctcagcaggccttctcgggccctgccacctgaataggtctgaccccagtccccactccctttcaggctgggccacagggagttgctggctggccacttgacaccctccccctggagctgatgtctgtgactacagggagattagcacttcgtctagtgaaactcctttcatctctgtcctatggccccaccccaccattccctctaggcccagaccatcatcatggccctggccattgatgtgtatgggctttctttccctcatgcagccccttcttccccaggctggatgttgtgggtagggaggggtgtgtgtgtgtgtatttggtttgctgtccttttttaaaggattccaagccatgtgaaacttcccttctggatgtgattctgggtcgcaagtccttatttatatgtgaggctggggaatgggctgggggtattggcagtccttttgcagggcagtgtgtgtggtggggtgacaccgctgtggcttagcccaagacactcccagaggaaaacactgcagaaggaactggtttgcagactgtggaaggatctgcagttttgtttttgaccaaaaaaataataataagttagctctgaagggcagagggaatacccaagcccctgatgcctatgagaagtccctggacttcaaccctcctgttgtttggccttagcccagagggagctgctcacctgagcacccttgggggtgggcagagaggcagggtgggattttagagttagtgtctgtgcgggggcagccctgagcctggagttgagactttggggtctcttagtttggaggtgttgagtgcatttgtgcccctgcctggttgagagcttcttggtacctcttgccaccccttctcactgccctgacccaaccccactggaccttgatgctgcgaggagtggtgtcctgacggactcagcactcccgcctgatgtattggatcataggagagcacttgctctcctgcctctgccaggagagggcttgttcctccaactctaggaggccaggcaagcatggacaggagccaagggagcagggtcattaactttttcttctttgcaaagtgggcacttggcatcagggtcccaatcaccagaaagcaccaaagcccctggcaccccacccactccatcctacccagggaccccaagtaggcaactgttatggcagtgggtccagcccaggccagcactgccagcctcctctccctgcagtaggcaccagctctacctcccccggcaggcaatgtcctggcttctcagcccagcaccatctgttcccctagacttctcaggggccagcccagtctgggccaccctttgtttccctcatcctcggctcccacacaggtgacagacccagcagatagcttctctctgggaaaggttggatgctgccttacatccccttctagccctcctcccatccacacacacaggcacccacccacaccaggtcggcttgtttctcacatgtagggagagaggggagaccaacccctttgtgtcttttgaaatacgaagaaaaatgtgtgttcaggagcatgactccagtgctgcgctcttgggcccagttcagtctgtcttgtctcaaatctaggcatttttgcttcaattttattttttttaagaatacaaaaacagaaatctgcactaatttacctggtttcgtaggaaaacttttttttattttttacattttttggtgtccgtttgtattgaataatttgctacatttgtaaaatgtaagaggtatataatatatgtatatttctaacgtaaaaaacataatttttttcttttcaagattttttcttaaaaagatgagagaaacatattttttcaggaaaaacaaactttaaaaaaaaaagaggagaaataaaaccttttctcccctttccccatcctctatctatccctctttcccaggaacaaatcaaaaggtggattatcttctgaagaatggaaactgttagtccagaatgatgtgtttttctcaatgcagtgagttatagattctctagttttctccctagggatgggaagggggcattgaggcaagcctggagaggagcccggggagcagggtcatgaacttttttctttagtgaaggaggaatacaatcaagggttttgtattcagaatgttgtgcaatattttggaatgggacattggtgtgtttagagattttagtttaaaaacaaaacaaaaagattgatcaaatctgtacagtttctattgttccagatttttttaagtttgtattaaaagcatgatacataatagccttcaaaaaaaaaa

SEQ ID NO: 4240 - DNA, 1627 bp, Homo Sapiens
  NM_016274
ggggacccgggccgcgtgggcgccgggatggagggcgccaaggggcggggagcgggcgtgcgtgtgtgtgcgagtgcgaatgcgagggaggccggccttgagtgaaaccggagctacaaagaaggggagagtccgggagcgggagggcgcgagggaggagcggcggctccggggcagctccgacgccctcccgcggggaaggagcccccgcggtgccgccgaggccccgacgcggggccgcccctcggctcgccgccccgcgcccgcgcccgctgggaatgatgaagaagaacaattccgccaagcggggacctcaggatggaaaccagcagcctgcaccgcccgagaaggtcggctgggtccggaaattctgcgggaaagggattttcagggagatttggaaaaaccgctatgtggtgctgaaaggggaccagctctacatctctgagaaggaggtaaaagatgagaaaaatattcaagaggtatttgacctgagtgactatgagaagtgtgaagagctccggaagtccaagagcaggagcaagaaaaatcatagcaagtttactcttgcccactccaaacagcccggtaacacggcacccaacctgatcttcctggcagtgagtccagaagagaaggaatcgtggatcaatgccctcaactctgccatcacccgagccaagaaccgtatcttggatgaggtcaccgttgaggaggacagctatcttgcccatcccactcgagacagggcaaaaatccagcactcccgccgccccccaacaaggggacacctaatggctgtggcttccacctctacctcggatgggatgctgaccttggacttgatccaagaggaagacccttcccctgaggaaccaacctcttgtgctgagagctttcgggttgacctggacaagtctgtggcccagctggcagggagccggcggagagcggactcagaccgcatccagccctccgcagaccgggcaagcagtctctcccgaccttgggaaaaaacagacaaaggggccacctacaccccccaggcacccaagaagttgacgcccacagagaaaggccgctgcgcctccctggaggagatcctatctcagcgggatgctgcctctgcccgcaccctccagctgcgggctgaggaacccccaacccctgccctccccaacccggggcagctgtcccggatccaggacctggtagcaaggaaactggaggagactcaggagcttctggcagaggttcagggactgggagatgggaagcgaaaggccaaggacccccctcggtctccgccggattctgagtcagagcagctgctgctggagacggaacggctgctgggagaggcatcatcgaattggagccaggcaaagagggtgctgcaggaggtcagggagctgagagacctgtacagacagatggacctgcagaccccggactcccacctcagacagaccaccccgcacagtcagtaccggaagagcctgatgtgagggcagggtggggtctggaacttgtcgggttggacagactcttatctccgtgttgctggataaagcttttttatttacctcaatcaaaaaaagaaaacaaaaatgaaaaaaaaaaaaaa

SEQ ID NO: 4241 - DNA, 3498 bp, Homo Sapiens
  NM_016275
tgcgcagtggggagcagctcgctcctgggctttgggctggctgcagtctgtctgagggcggccgaagtggctggctcatttaagatgaggcttctgctgcttctcctagtggcggcgtctgcgatggtccggagcgaggcctcggccaatctgggcggcgtgcccagcaagagattaaagatgcagtacgccacggggccgctgctcaagttccagatttgtgtttcctgaggttataggcgggtgtttgaggagtacatgcgggttattagccagcggtacccagacatccgcattgaaggagagaattacctccctcaaccaatatatagacacatagcatctttcctgtcagtcttcaaactagtattaataggcttaataattgttggcaaggatccttttgctttctttggcatgcaagctcctagcatctggcagtggggccaagaaaataaggtttatgcatgtatgatggttttcttcttgagcaacatgattgagaaccagtgtatgtcaacaggtgcatttgagataactttaaatgatgtacctgtgtggtctaagctggaatctggtcaccttccatccatgcaacaacttgttcaaattcttgacaatgaaatgaagctcaatgtgcatatggattcaatcccacaccatcgatcatagcaccacctatcagcactgaaaactcttttgcattaagggatcattgcaagagcagcgtgactgacattatgaaggcctgtactgaagacagcaagctgttagtacagaccagatgctttcttggcaggctcgttgtacctcttggaaaacctcaatgcaagatagtgtttcagtgctggcatattttggaattctgcacattcatggagtgcaataatactgtatagctttccccacctcccacaaaatcacccagttaatgtgtgtgtgtgttttttttttaaggtaaacattactacttgtaactttttttcttagtcatatttgaaaaagtagaaaattgagttacaatttgattttttttccaaagatgtctgttaaatctgttgtgcttttatatgaatatttgttttttatagtttaaaattgatcctttgggaatccagttgaagttcccaaatactttataagagtttatcagacatctctaatttggccatgtccagtttatacagtttacaaaatatagcagatgcaagattatgggggaaatcctatattcagagtactctataaatttttgtgtatgtgtgtatgtgcgtgtgattaccagagaactactaaaaaaaccaactgctttttaaatcctattgtgtagttaaagtgtcatgccttgaccaatctaatgaattgattaattaactgggcctttatacttaactaaataaaaaactaagcagatatgagttaaatttaaaagtttcaatttattgctcagtgtacctgttaacattatatttaacaattgcttaaatttttgtttttgatttatggataatttcttaagagtacacactttagatacacaaataatcgttcatttaccatctttaggatcattgaaactcatctcactaaagaaagttcacttgaacctctttatagcattgatactaggtgaacagaaattacctgactaataatttgtctaacatcatatatcagaattttattgtatatgatgaacaaaacttaaaattttttaaatttaatttttaaatactgtttcagagttctaaaaaggcagttttttaaaaaacttaagttgataaaaactgtaagaataatttagcagaaatagaaccagaatgtagaagagtagtcatgtaacagcagtaataacatacttcagcttccatataggaatagaagtggtagagccaaaagtgatttaggaaaagttataaggtacaggttgagtatcccttttccaaaaatgcttgggacaagaagtatttcagatttcataatttttttcaaagtttggaatatttgcattatacttaccagttgggcatcccaaatctgaaatctgaaatgttccatgagcatttcctttgagtgtcatgttggcactcaaaaaggttcaacattgagtccacttaacacttaggtgttagaagacctaactttctgtaacaattaaccttatactttgtttgtcatcgaatatttgttgaatgcatgtcaggtaatggtcttgattgtgatagcttcaaggtggaacatactgtaatctccagatgctaggaagttagtctaataattcactgcagaaaattgattaagtggctgtccttttaattaagagtgtggagtcataaacttaagttcttcatatagtgacaagagtccttagagattgttattcaagttccttagaaattgttatttaggtataatatcatcttgtctttgactagagcttgaaaccttgttatctgattgtgtaccactccaaattccctgccttctgcaagttgaatgtcttgctgaatgtgtctaggggttcatcttcagtaatcgacattccactagtgccatagttaacttcatgacatgtagacattcaaaacttgagccttggatgttcctgtggacctgacagttaaaaatataaagaacctaggattcaattccaactttctctgtttgccttgggttgaataacttatcttttggagaatagctttaagtggcttagacactgataaaattcagctgtgttgttgacgctcatctcttttgtcttacgcttagccatatttaaatcttgaatttaatagagtctagtgaaaaaaatgagtgggaagaatgaatataaaagtaataatataaggaaaaagggaaagtaaactatttagaatgtagttttgttatattcccagcatttcaatatttattagttacttgtaaattactgtggctgtgtagtttataaatgtctgtgcactatattaattagaagaccatagaacatgccagcaggttggctaatgctatgggggtttttaccacagttgccattgtggaagaaattatttggtacattaataaaaaaagttggtaaaacatggttttatacctcagtgtataagatgtgcaagacaaatatgcttatttccttttctagaatataagtgatattatttgcttatgacactaacactattaatgacaggagtcaatcagcctttacagctatcaaaatataatgagatcccaatgatgattcttttttactttgaatgttaattagtttgggactttgattggctggcaaacattttatcattgtcagaatttaatttagatttcaaaaatagcttacaggattttaaacatggtgtggtattctaaagccttttttttaaaaaaagagatctttttgagagaaacaaatgaggattgtaaagtttggggacttacctctgtagcattgtgaaaataaactttgattaagctgatttgaaaggaaaaaaaaaa

SEQ ID NO: 4242 - DNA, 1597 bp, Homo Sapiens
  NM_016285
agccgctgagaggctctgcgtgtgcgtgtgcgcgggtgacgccgtgtgtgtgcgagtgtgtgtgtgtgtgtgcgcgcgcgcgtgtgagagagagaaagggagagagagagggggactctgtgtgagggaaagaaaacaatttctcctgctctgcagcttctgttcaggatcaatgtgactctaagaacaaatggatgaatgaatatccatatgaagagaaaaacaataaagaatatcaacacctttgagaacagaatgttaatgcttgatgggatgccggcagtcagagtcaaaacagagcttttggaatctgaacaagggtctccaaacgtccacaactatcccgatatggaagccgttcccctgttgctaaataatgtgaaaggggagcccccggaggactcgttatctgtagatcacttccaaacacaaactgagccagtggacttgtcaataaacaaagccaggacgtcccctactgccgtttcatcctccccagtttccatgacagcatctgcctcctcaccttcttcaacttcaacctcttcatcgtcttctagtcgtctagcctcatccccaactgttatcacatcagtatcttcagcgtcatcttcgtcaacagtattaactccagggccccttgtggcctctgcatctggtgttggaggccagcagtttttgcacattatccatcccgtaccgccttcaagtcccatgaatttacagtctaacaaactgagtcatgttcaccgcatccccgtggtggtacagtcggtgcctgttgtctacacagctgtaaggtcacctggaaatgtgaacaacactattgtcgtgccgcttttggaggatgggagaggccatggcaaagcacaaatggacccccgaggcctatctcccagacaaagtaaaagtgacagtgatgatgatgacctgccaaatgtgaccttagatagcgttaatgaaactggatctacggccctttccatagccagagcagtacaagagtaagtatcacattcacaggatgaattaagaattgccaaggtgttcaatggataatggaaactgcagcatctcctgtcccccagccatgtcattctagctgtgaactggcacgaatgtcagcagcttttcattcagctgaatgctctttgggagattagggcagagaatggagtgttttaatgagttggaaattcatgctttgatgagatataagacctatgtgcatcttttctaatacctcctgcacccttctcctgaactctgcaaaaaaaaaaaaattgttatttttgaatgtcactatttgattatcatcatcattattattacacaaagtcaagggaaatatggcaaagtattgttatcttgttttgataggaaattacagaatagctttttggaagatttaaatttggaaaataatatgttcatcctttgaaaagtagtactcatatgttatttttaaatgaatcttttctctgtccttttacctggaccgcagggttagatttcagccctcgtttattgaaaatagctgcttttctatcagtcaaccttgtacctagaattgaacctaaatgattgaaaaaaaaaa

SEQ ID NO: 4243 - DNA, 3938 bp, Homo Sapiens
  NM_016287
gttctccgcccccgccgccgccattacggagctcccagtggttgattcttcaccacactgaaaccattaggaaaaatccttgtggttaacagcagaggcttcagagtgtaacctgtactcgggcctagaaattatttaaaatggcgactgatacgtctcaaggtgaactcgtccatcctaaggcactcccacttatagtaggagctcagctgatccacgcggacaagttaggtgagaaggtagaagatagcaccatgccgattcgtcgaactgtgaattctacccgggaaactcctcccaaaagcaagcttgctgaaggggaggaagaaaagccagaaccagacataagttcagaggaatctgtctccactgtagaagaacaagagaatgaaactccacctgctacttcgagtgaggcagagcagccaaagggggaacctgagaatgaagagaaggaagaaaataagtcttctgaggaaaccaaaaaggatgagaaagatcagtctaaagaaaaggagaagaaagtgaaaaaaacaattccttcctgggctaccctttctgccagccagctagccagggcccagaaacaaacaccgatggcttcttccccacgtcccaagatggatgcaatcttaactgaggccattaaggcatgcttccagaagagtggtgcatcagtggttgctattcgaaaatacatcatccataagtatccttctctggagctggagagaaggggttatctccttaaacaagcactgaaaagagaattaaatagaggagtcatcaaacaggttaaaggaaaaggtgcttctggaagttttgttgtggttcagaaatcaagaaaaacacctcagaaatccagaaacagaaagaataggagctctgcagtggatccagaaccacaagtaaaattggaggatgtcctcccactggcctttactcgcctttgtgaacctaaagaagcttcctacagtctcatcaggaaatatgtgtctcagtattatcctaagcttagagtggacatcaggcctcagctgttgaagaacgctctgcagagagcagtagagaggggccagttagaacagataactggcaaaggtgcttcggggacattccagctgaagaaatcaggggagaaacccctgcttggtggaagcctgatggaatatgcaatcttgtctgccattgctgccatgaatgagccgaagacctgctctaccactgctctgaagaagtatgtcctagagaatcacccaggaaccaattctaactatcaaatgcatttgctgaaaaaaaccctgcagaaatgcgaaaagaatgggtggatggaacagatctctgggaaagggttcagtggcaccttccagctctgttttccctattatcccagcccaggagttctgtttccgaagaaagagccagatgattctagagatgaggatgaagatgaagatgagtcatcagaagaagactctgaggatgaagagccgccacctaagagaaggttgcagaagaaaaccccagccaagtccccagggaaggccgcatctgtgaagcagagagggtccaaacctgcacctaaagtctcagctgcccagcgggggaaagctaggcccttgcctaagaaagcacctcctaaggccaaaacgcctgccaagaagaccagaccctcatccacagtcatcaagaaacctagtggtggctcctcaaagaagcctgcaaccagtgcaagaaaggaagtaaaattgccgggcaagggcaaatccaccatgaagaagtctttcagagtgaaaaagtaaattttataggaaaaaagggtatcatgatgaaattcaaaatcttattttctaaggtcagtgtgcatttgtttagttttgatgcttttcaaattacattattttcctcccctatgaacattgtggggagggactctaaataaaccagtttaggcatttgctagctttaggtgcttttattggtgcctgcccttttccttgttcattttaatttctgcaataatcctggactttcctaaactatgtaatgtatacttgtcctttttctctgcctcccccaaccccctgttgtttttatggtcagctttgccttttttttttcttccaattttatctaaacagttgcagagatttttatatttgtagaaagcatcaagaacggtatgccagtcaggtcctggaagtaaaatggaggcacaatatagcactgactgagttgtaaagcctcctgcctggagacttcagttatagctgtaataattaatcttatttataaaagccactccactaaccttttctctccaactgtaaacacagagacagctttgggaataagccaaaaacagggtgatctcattagattttgaagatatatgactcctttgggctacatttcatattgatcaatttctaggtatttttcactggcccaaagtattgcattcccttaacagcaagcacaagttctctatatcacttgttttttgttgttgttgttgttgtcgtcgttgttttgagacggagtcttgctcaggtgccccggagtgcagtggtgcaatctcagctcactgcaacctccacctcctgggttcaagcaattctcctgcttcagcctcccgagtagctgggattacaggtgtgtaccaccacgcctggcaatttttttgtatttttagtagagatggggtttcgccgtgttggtcaggctggtctcgaactcctgacctcaggtgatccgcctgcctcggcctcccaaagtgctgggattacaggagtgagccactgtgcctggcctatcccacttggtttttgactgaaggggaagtgtagaaatatattgatttgtgatttctggtgtcacctgtgttaccaaaaatcaaaacaaatcttttttattttttattattattattatttttgagacagagtctcgctctgtcgcccagtgtggagtgcagtggtgtgatcttggctcactgcaaactccgcctcccaggttcaagcgattctcccacctcagcctcctgagttgggtcctacaggcgcacacgaccacgcccagctaattttttgtatttttagtagagttggggtttcaccatgttagccaggatggtctcgatctcctgacctcgtgatccactcacctcagcctcccaaaatcctggggttacagatgtgagctaccactcacggcccaaatcttcttgatcatatgtttaaatatattttttaatatttggagcatgagttgtcacttcttgtttgccttttttataaggaaatgttggagagttacatcattgctaatgtagaaatgttaagtggaaaaatatacagtttggtaaaataaactagattctacatttatttgtgggtttttttcccctcctttctttccacagcacttttgatatcaagcaagtggcttcctttttgagatattaaaaaaaaaaagaaaaggaaaaaagtaaatgaagcccaactacctaaccctttcttatttgtatttgttttagtattgtgaagttgtgttaaatagtactagctagaaatacaaatttctggttatcatttctcttccctgtggcacttgacattttaattgtcttaaagtttttgaagtacatcttctggccccttgagtactgccagaggcaaaagatgtttgtttcttattcattccacttttgtctcctgggatcccttctgtagcctaaagtatggctgggaaatggacttgagaagattggcttgaattagatcataatcatgtgtgatcccatcatgaattcattggaatttgtgttgcatgtaaggcaatctttcctgttgtaaatcttccttttttaatgtacatatattttgaaaaatatgaataaacatgaaattttaaaagctgaaaaaaaaaaaaaaaaa

SEQ ID NO: 4244 - DNA, 3846 bp, Homo Sapiens
  NM_016289
gcagtgcgcacgtcaaagccgggctcgggccgcaagcggggcgaggggttcggggagcggcgcggcctgggagacacagagccttcaggcgccggggcgggggcacaggcgaagactaaggcggcgccgggccccacagcagcagccgcagcccaagcgagcgcagcagcgcggcggcagccgcgggagcccctgggcagccgtccgcccgcgcagccgccgccgccgcgggagcccgtcgccgggagcaggagcgggcggaagacaacggaggggccgagcgtccgagccactccgcggggaccgaacgagcagcccgaagcggcggcggccgaggacggggacagcgacgacgcggaggcagagaagggaacgcccggcccagccccgtagcacaggcggagtgcagcggaggcccctgccgctgccgtcatgccgttcccgtttgggaagtctcacaaatctccagcagacattgtgaagaatctgaaggagagcatggctgttctggaaaagcaagacatttctgataaaaaagcagaaaaggctacagaagaagtttccaaaaatctggttgccatgaaagaaattctgtatggcacaaatgaaaaagagcctcagacagaagcagtagctcaacttgctcaagaactctataatagtgggctccttagcaccctggtagctgatttacagctcattgactttgagggcaaaaaagacgtggctcaaattttcaacaatattctcagaagacaaattggtacgagaactcctactgttgaatacatctgcacccaacagaatattttgttcatgttattgaaagggtatgaatctccagaaatagctctaaattgtggaataatgttaagagaatgcatcagacatgaaccacttgcaaaaatcattttgtggtcggaacagttttatgatttcttcagatatgtcgaaatgtcaacatttgacatagcttcagatgcatttgccacattcaaggatttacttacaagacataaattgctcagtgcagaatttttggaacagcattatgatagatttttcagtgaatatgagaagttacttcattcagaaaattatgtgacaaaaagacagtcactgaagcttctcggtgaactactactagatagacacaacttcacaattatgacaaaatacatcagtaaacctgagaacctcaaattaatgatgaacctgctgcgagacaaaagtcgcaacatccagtttgaggcctttcacgtttttaaggtgtttgtagccaatcctaacaagacgcagcccatcctagacatcctcctcaagaaccaggccaaactcatagagttcctcagcaagtttcagaacgacaggacggaggatgagcagtttaacgacgagaagacctatttagttaaacagatcagggatttgaagagaccagctcagcaagaagcttaatctccaataaacatctatgttaaatccaaattcagcatttgctgttagctattcagcatcaggcactcttattgattcatgaggaacattactgctaatctgctgttaagtgaacggtttttcattttacccttttgtttttcagtccaggttggagatcgtagctgctgctgcttgcacactagggcacatgtgggctttctcttgatctttgtgtcatttcagaattcaaagactgtgctacgggagttctgaacatggctgggttcatgaaggcaaatgtatggatgagagtgtggtttaggaaagagggcactgatatcagattagacctatgtgtttgcacccatctttgttggcgatctgagtgcagtgtggcaagtgcacacctggcatccctgcgtcagatcgcgcaccttcaggtcgcgcaccttcgctgaaggaagatgacgcagagctttatctgaaatcagaggggagctatccaaaatgggagtttgggggcagctaaagttgacatgcgaataaattgatactgaaacttagcaacttcttaaaagtgtaaagaagcctcataagatcataaggaaaatgtatatatgcttttcacagctttctagaattttttgacatttgattttcttgagacttgtaaacctggatatgttgaagggtatttgttaattttacttttcaaagatactttaaaacagtagagctagcaatgacaccttgcatttcatttcaacactgcttcaaggtttcttttgtatataattcttagaatgctcatttcttttaaatggtttaatttgtacagcagaggaatgttattgtagtagtatgtaactattacctaatactgagtttttgcaaaaaacaatgaatgctcatatgtaattgaaatacttcagatcacatgaaaatgctgatttaacatttaagtatcacagcattaaaagaaaaagaaagtaaaccagtcctttgtattcagttacctaatggggtgccatcaataagctgcgatacagccctggagctcagtcagccacaccttcctgcatcctattggccttattcattttaaatgagttaatgaatctgccagatctgtgaatgatagagattatgctaaattaatgctgattctttgtgtgtgtgggaaatctctgtagagcaccttttctttcttagactaagtaacccagtacaatagttgtgaactgaataattaaaactttggcttctcttaggaaaagacgacttcctagtcataggtgtcctatggggaaatttattttttttaatgtcctgttccttaatgctgcaaattatcagtatttataaagtaactgattttgcaccacttttttgttactgtgaccacggcagaacaatgtcttctagactatatctatgtaaagttattagaatggtatctgttcattttagtgatatgaagatcacaactaacaactgacaaatcagagtttgccagttcaaattcagcatggctgcagctgattaagaaattgatatgattattctttgctagcctctcttactaatggaattatatactggccagtaaaatgggcctcccaattgctgtttcagcaggttttaaaccttcaggaacaccagttaggaaaatagctccagaaaatatagatatattttatttttattaaaatggcagtctacatcataattggcatttctcaagactgtctttaccagaatctgtgtgaaataaggcaatctagtctccttgaaaaaaaaatctcttggatgtttaggaaggaagacttggccgtgatgtggtgtcctggctttgtggtgtagtgctgtgtgtatggagttagtgtaaaaacatggattacaccaagtggaagaaacgtcttcttgccaagctcattcttagaacttacacatctagaacagcttccactttggcagtgaggtcgtagccttttaggtggaagaagtgagggtgcagcgtgtcagacacaacattcatgttactcttacattggaatctgaaggtagttcagacttcgtgggttttgtttttaagcaaaacaatgtgaaaacatttaagtttgaaatgttgcatttgaagttatgatcatttaatatattcatattaccaagactattatactggaagtggtttttgtgttataaaggtttaattttacataaggcagttacttaatgtgatttttaacccttaaaaaagtggagatgtatacatttgttaacaatgccatgaaagcattttctttctcctaaggaaaagtgaatttcttatcagaatatctggctggccctgtaatttaaattaaaataaaattttggagaaacagcaaaaaaaaaaaaaaaaaa

SEQ ID NO: 4245 - DNA, 2629 bp, Homo Sapiens
  NM_016290
gaagtcgggggtgggtccctccggacgccgaagtgggctcgggatgcggggctgggaccctcccgattccggggcggattccggacgccgggaccggccattactggtgccgggttgggcttctccagatgccggggctgggtccttcccaaggttgagacaaaaggatgccacggagaaagaaaaaagttaaagaagtctccgaatctcggaacctggagaagaaggatgtggaaactaccagttctgtcagtgtgaagaggaagcgtagacttgaggatgcattcattgtgatatccgatagtgatggagaggaaccaaaggaggaaaatgggttgcagaaaacgaagacaaaacagtcgaatagagcaaagtgtttggccaaaagaaaaatcgcacagatgacagaagaagaacagtttgctctggctctcaaaatgagtgagcaggaagctagggaggtgaacagccaggaggaggaagaagaggagctcttgaggaaagccattgctgaaagcctgaatagttgccggccttctgatgcttccgctaccagatctcgacctctggccactggaccgtcttcccagtcccatcaagagaaaaccacagactctgggctcactgaaggcatatggcagctggtacctccatcactgtttaaaggctcacatatcagtcagggaaacgaggctgaggaaagagaggagccttgggaccacactgaaaaaactgaagaggagccggtctctggcagctcaggaagctgggaccagtcaagccagccagtgtttgagaatgtgaacgttaaatcttttgacagatgtactggccactcggctgagcacacacagtgtgggaagccacaggaaagtactgggaggggttctgcttttctcaaagctgtccagggtagcggggacacatctaggcactgtctacctaccctagcagatgccaaaggtctccaggacactgggggcactgtgaactatttctggggtattccattctgccctgatggagtagaccctaaccagtataccaaggtcattctctgccagttggaggtttatcaaaagagcctgaaaatggctcagaggcagctccttaataaaaaaggttttggggaaccagtgttacctagacctccttctctgatccagaatgaatgtggccaaggagagcaggctagtgagaaaaatgaatgcatctcagaagatatgggagatgaagacaaagaggagaggcaggagtctagggcatctgactggcactcaaaaaccaaggatttccaggaaagctcaattaaaagcttgaaagagaaacttttgttggaggaagaaccaacaaccagtcatggtcagtcttcccaagggattgttgaagaaacttctgaagagggaaactctgtacctgcttcacaaagtgttgctgctttgaccagtaagagaagcttagtccttatgccagagagttctgcagaagaaatcactgtttgtcctgagacccagctaagttcctctgaaacttttgaccttgaaagagaagtctctccaggtagcagagatatcttggatggagtcagaataataatggcagataaggaggttggtaacaaggaagatgctgagaaggaagtagctatttctaccttctcatccagtaaccaggtatcctgcccgctatgtgaccaatgctttccacccacaaagattgaacgacatgccatgtactgcaatggtctgatggaggaagatacagtattgactcggagacaaaaagaggccaagaccaagagtgacagtgggacagctgcccagacttctctagacattgacaagaatgagaagtgttacctctgtaaatccctggtcccatttagagagtatcagtgtcatgtggactcctgtctccagcttgcaaaggctgaccaaggagatggacctgaagggagtggaagagcatgttcaactgtggaggggaagtggcagcagaggctgaagaacccaaaggaaaaaggccacagtgaaggccgactccttagtttcttggaacagtctgagcacaagacttcagatgcagacatcaagtcttcagaaacaggagccttcagggtgccttcaccagggatggaagaggcaggctgcagcagagagatgcagagttctttcacacgtcgtgacttaaatgaatctcccgtcaagtcttttgtttccatttcagaagccacagattgcttagtggactttaaaaagcaagttactgtccagccaggtagtcggacacggaccaaagctggcagaggaagaaggagaaaattctgaatttctagggtccaaaagttgacaaaaccattagtaggaggggtgggccatgttcattaagccatagtggtccctagttcattgttgagcaagttttagccctgcagttttcaccaccagcacctacccagcattctggtttttatgttttttatgatctatgcagacaactgtgtattctgttttataacagtttgtttgaatttacttacagttaaaaaatttaaatatatttatgtttgtacgaaatcttatttcaatagatggaaattttaataaaaaaaaaaaaaaaaaaaaaaaaa

SEQ ID NO: 4246 - DNA, 1813 bp, Homo Sapiens
  NM_016291
gagccaatagtgaggggcaccgggagcgaggtgcagggggcggggctcggcctggccgcagccattttggtgcgagagaaacaataggacggaaacgccgaggaacccggctgaggcggcagcagagcatcctggccagaacaagccaaggagccaagacgagagggacacacggacaaacaacagacagaagacgtactggccgctggactccgctgcctcccccatctccccgccatctgcgcccggaggatgagcccagccttcagggccatggatgtggagccccgcgccaaaggcgtccttctggagccctttgtccaccaggtcggggggcactcatgcgtgctccgcttcaatgagacaaccctgtgcaagcccctggtcccaagggaacatcagttctacgagaccctccctgctgagatgcgcaaattcactccccagtacaaaggtgtggtatctgtgcgctttgaagaagatgaagacaggaacttgtgtctaatagcatatccattgaaaggggaccatggaattgtggacattgtagataattcagactgtgaaccaaaaagtaagctcctaaggtggacaacaaacaaaaaacatcatgtcttagaaacagaaaagacccctaaggactgggtgcgtcagcaccgtaaagaggagaaaatgaagagccataagttagaagaagaatttgagtggctaaagaaatctgaagtcttgtactacactgtagagaagaaggggaatataagttcccagcttaaacactataacccttggagcatgaaatgtcaccagcaacagttacagagaatgaaggagaatgcaaagcatcggaaccagtacaaatttatcttactggaaaacctgacttcccgctacgaggtgccttgtgtccttgacctcaagatgggcacacgacaacatggtgatgatgcttcagaggagaaggcagccaaccagatccgaaaatgtcagcagagcacatctgcagtcattggtgtgcgtgtgtgtggcatgcaggtgtaccaagcaggcagtgggcagctcatgttcatgaacaagtaccatggacggaagctatcggtgcagggcttcaaggaggcacttttccagttcttccacaatgggcggtacctgcgccgtgaactcctgggccctgtgctcaagaagctgactgagctcaaggcagtgttggagcgacaggagtcctaccgcttctactcaagctccctgctggtcatttatgatggcaaggagcggcccgaagtggtcctggactcagatgctgaggatttggaggacctgtcagaggaatcagctgatgagtctgctggtgcctatgcctacaaacccatcggcgccagctctgtagatgtgcgcatgatcgactttgcacacaccacctgcaggctgtatggcgaggacaccgtggtgcatgagggccaggatgctggctatatcttcgggctccagagcctgatagacattgtcacagagataagtgaggagagtggggagtgagcttgctagctgctccagtacttgagagcgactctgtgtcccaggcacagctgtgctgcgtcagggaggaagccagtatggccaggtggtggctcctgcagcctggagctgatgtgcagtggcctctgtgagccccagcctgagccagtcccagctgtgcttggagtctttatttattttaactatttcttcaacattccacatttgatgatgatacctctttcttccctgagtgtatatgttctaatacaaatctttttgtttattgtaaaaaaaaaaa

SEQ ID NO: 4247 - DNA, 2310 bp, Homo Sapiens
  NM_016292
gaggaagccccgccccgcgcagccccgtcccgccccttcccatcgtgtacggtcccgcgtggctgcgcgcggcgctctgggagtacgacatggcgcgcgagctgcgggcgctgctgctgtggggccgccgcctgcggcctttgctgcgggcgccggcgctggcggccgtgccgggaggaaaaccaattctgtgtcctcggaggaccacagcccagttgggccccaggcgaaacccagcctggagcttgcaggcaggacgactgttcagcacgcagaccgccgaggacaaggaggaacccctgcactcgattatcagcagcacagagagcgtgcagggttccacttccaaacatgagttccaggccgagacaaagaagcttttggacattgttgcccggtccctgtactcagaaaaagaggtgtttatacgggagctgatctccaatgccagcgatgccttggaaaaactgcgtcacaaactggtgtctgacggccaagcactgccagaaatggagattcacttgcagaccaatgccgagaaaggcaccatcaccatccaggatactggtatcgggatgacacaggaagagctggtgtccaacctggggacgattgccagatcggggtcaaaggccttcctggatgctctgcagaaccaggctgaggccagcagcaagatcatcggccagtttggagtgggtttctactcagctttcatggtggctgacagagtggaggtctattcccgctcggcagccccggggagcctgggttaccagtggctttcagatggttctggagtgtttgaaatcgccgaagcttcgggagttagaaccgggacaaaaatcatcatccacctgaaatccgactgcaaggagttttccagcgaggcccgggtgcgagatgtggtaacgaagtacagcaacttcgtcagcttccccttgtacttgaatggaaggcggatgaacaccttgcaggccatctggatgatggaccccaaggatgtccgtgagtggcaacatgaggagttctaccgctacgtcgcgcaggctcacgacaagccccgctacaccctgcactataagacggacgcaccgctcaacatccgcagcatcttctacgtgcccgacatgaaaccgtccatgtttgatgtgagccgggagctgggctccagcgttgcactgtacagccgcaaagtcctcatccagaccaaggccacggacatcctgcccaagtggctgcgcttcatccgaggtgtggtggacagtgaggacattcccctgaacctcagccgggagctgctgcaggagagcgcactcatcaggaaactccgggacgttttacagcagaggctgatcaaattcttcattgaccagagtaaaaaagatgctgagaagtatgcaaagttttttgaagattacggcctgttcatgcgggagggcattgtgaccgccaccgagcaggaggtcaaggaggacatagcaaagctgctgcgctacgagtcctcggcgctgccctccgggcagctaaccagcctctcagaatacgccagccgcatgcgggccggcacccgcaacatctactacctgtgcgcccccaaccgtcacctggcagagcactcaccctactatgaggccatgaagaagaaagacacagaggttctcttctgctttgagcagtttgatgagctcaccctgctgcaccttcgtgagtttgacaagaagaagctgatctctgtggagacggacatagtcgtggatcactacaaggaggagaagtttgaggacaggtccccagccgccgagtgcctatcagagaaggagacggaggagctcatggcctggatgagaaatgtgctggggtcgcgtgtcaccaacgtgaaggtgaccctccgactggacacccaccctgccatggtcaccgtgctggagatgggggctgcccgccacttcctgcgcatgcagcagctggccaagacccaggaggagcgcgcacagctcctgcagcccacgctggagatcaaccccaggcacgcgctcatcaagaagctgaatcagctgcgcgcaagcgagcctggcctggctcagctgctggtggatcagatatacgagaacgccatgattgctgctggacttgttgacgaccctagggccatggtgggccgcttgaatgagctgcttgtcaaggccctggagcgacactgacagccagggggccagaaggactgacaccacagatgacagccccacctccttgagctttatttacctaaatttaaaggtatttcttaacccgaaaaaaaaaaaaaaa

SEQ ID NO: 4248 - DNA, 5377 bp, Homo Sapiens
  NM_016297
gcgcagccgcgcagcggtgggaggactgcggggctcttgaggccagctgcagagcttgtggaggccatggggcgcgtcgtcgcggagctcgtctcctcgctgctggggttgtggctgttgctgtgcagctgcggatgccccgagggcgccgagctgcgtgctccgccagataaaatcgcgattattggagccggaattggtggcacttcagcagcctattacctgcggcagaaatttgggaaagatgtgaagatagacctgtttgaaagagaagaggtcgggggccgcctggctaccatgatggtgcaggggcaagaatacgaggcaggaggttctgtcatccatcctttaaatctgcacatgaaacgttttgtcaaagacctgggtctctctgctgttcaggcctctggtggcctactggggatatataatggagagactctggtatttgaggagagcaactggttcataattaacgtgattaaattagtttggcgctatggatttcaatccctccgtatgcacatgtgggtagaggacgtgttagacaagttcatgaggatctaccgctaccagtctcatgactatgccttcagtagtgtcgaaaaattacttcatgctctaggaggagatgacttccttggaatgcttaatcgaacacttcttgaaaccttgcaaaaggccggcttttctgagaagttcctcaatgaaatgattgctcctgttatgagggtcaattatggccaaagcacggacatcaatgcctttgtgggggcggtgtcactgtcctgttctgattctggcctttgggcagtagaaggtggcaataaacttgtttgctcagggcttctgcaggcatccaaaagcaatcttatatctggctcagtaatgtacatcgaggagaaaacaaagaccaagtacacaggaaatccaacaaagatgtatgaagtggtctaccaaattggaactgagactcgttcagacttctatgacatcgtcttggtggccactccgttgaatcgaaaaatgtcgaatattacttttctcaactttgatcctccaattgaggaattccatcaatattatcaacatatagtgacaactttagttaagggggaattgaatacatctatctttagctctagacccatagataaatttggccttaatacagttttaaccactgataattcagatttgttcattaacagtattgggattgtgccctctgtgagagaaaaggaagatcctgagccatcaacagatggaacatatgtttggaagatcttttcccaagaaactcttactaaagcacaaattttaaagctctttctgtcctatgattatgctgtgaagaagccatggcttgcatatcctcactataagcccccggagaaatgcccctctatcattctccatgatcgactttattacctcaatggcatagagtgtgcagcaagtgccatggagatgagtgccattgcagcccacaacgctgcactccttgcctatcaccgctggaacgggcacacagacatgattgatcaggatggcttatatgagaaacttaaaactgaactatgaagtgacacactcctttttcccctcctagttccaaatgactatcagtggcaaaaaagaacaaaatctgagcagagatgattttgaaccagatattttgccattatcattgtttaataaaagtaatccctgctggtcataggaaaacacacggttctaattaagtgtgaaggtatagctattgcacttatgccatctccaaaatttcttaagtattctttcactatccattaggagtttttcttaaacttgtctgataataagaatcacctggagttaggaggtggtggttgcagtgagccaatctcaccattgcacttcagcctgagcaacacgagcaaaactccgtctcaaaagtaaataaaaataatcacctggagtttgttaaaccatatggattctcaagctcctctcttgaagattctgattcagtaggtctgggagtggcgcgctggattttgatcaaaattgtagagcattttaaggtgagtacctgagggagaacttaaagacatcttagttggggagtagtccttttgaattttacagctagatataatcttcagtcagataaaatttatgggagctggtgtcttatgcctgactcttagtaatttcataccggtttgaagtacgtgtgcccatgcctaaagccttgactttcagaatgttgtcttttgattcttctgtcttgatttgattaggggtgaaatttagaagtcttagtaatgtaacttgaagatgttaaacaaaaatctcaagtaaaatgaaaagcaaatatgggctactgaattaagaaactggcattctagtattaaatcctcacttcaggagcttttaaaaatactgagacccccccataaccagagattcagattcaaagactgaggataggaccttagcattgtagctatttaaagtttctaatgtgcacccagggttgggaatcaccaatgtgggtgtgaaaatgcctacaaagggttttagtgccttagaagtcctaagaagcccaatctgtatcaaagcagatccattttgcaaggatctttcttttagaactttctcagttctcttagtaagaactttagaagtaatcttgataataagcacagacagcctaacagcagaggcaacttaaataactcctgagcagttggcactagaacagaatacttggaatgacaccaaagttaaccaagtccagcatatgtccaaagagttaagtgtttcatttactgtagcattctgggtgagaaattggttgctgaaatcttaagacagtggtctcaaccttggctgcacattggaatcacctgtagggttttaaagcatccaaatggtaattaacaggcagcaaaacttcagaactagttctgcatctactgtgcaaagatcatgattaactgtcaagacactggtagaacagaacaagcaaaagattaagagttcaaaagtaaatgcaaccaatttaacatgtagtgttattaaaaaattacaaaggcctagaccagcctgggcaacatggtgaaaccccatctctacaaaaaatttttaaaaagttggccaggcatggtaatgcgcgcctgtggtcccagctgctcgggaggctgaggtgggaggatcacttgagccttggaggtcaaggctgcagtgaatcatgatcatgccactgtactccagcctgggcaacagagaccatcttaaaaaaaaaaaatccttccattgaatagaaacttcaaagtccttcatcagatcatggcattagctactttagcaaaatagtgtaaactttggttctgagtaaaaatgacttcttccctaccacagttgtgaatgttaatatgctgataaaactgccaagatatatttgataggtaggggattaaactcatggtttgtcaaaagagtgtttttttctagttttattcttaacagatatgttgaggtattcatatttgtttccttttgtggttttaatgaagacaatttgtaaagtaatactgttatgtatatgctaaatgttggtaaatactaattaatttccatcatttgtagacttgttttgcaatgggatatatttttacttataataccaatttaggctgggcgcagtggctcacgcctgtaatcccagcactttgggaggccaaggcaaacggatcacgaggtcaggagatcaagaccatcctggccaacatggtgaaaccccatctctactgaatacacaaaaattggctggacatggtggcgcatgtctgtaatcccagctactgtaatctcagctacttgggaggctgaggcaggagaattgcctcaaccgggaggcggaggttgcagtgagccaagatcgcaccactgcactccagcctggcaacagagcgagactctgtctcagaaaaaaaaaacaaaaaccagtttaggctgggtatggtggctcaccagcactttgggaggctgaggcaggtggatctcttgaggtcgggagtttgagaccagcctggccaacatggtgaaaccctgtctttactaaaaatacaaaaattagccaggcatggtggcgtgtgccagtaatcccagctacttgggaggctgaggcgcgagaatcgcttgaaccctggagatggaggttgcagtgagcagagatcgcaccactgcactccagcctgggcaagagtgagactgtgtctcaaaaggaaaaaaaaaaaattaaaaatgttgctggtattacatcaaacctactctggataaattttccagtagggcatctgaaattgctttggcaaaagcaaaacaggttatcaatacaccaaggacatcaagtagttttaatgcaactacagtgttgagtgcttttttactgggagaaaaatcctagcagaacctgctactctgggcgcattaggtagttttatgcaactatagtattaagagttttattggaagaaaaaacactgtcagagcttactgctccagacctttttttttaatagaagagactggtaaaaatgatgcaggggctgaatgaaagccagctctgctccagtggctctctgagttgagcatgcatcagttaccttaagggcttgttaaaacatcgctaggctccaccctgtttattcaataagtttgttatgggatataagaagatgcattttattaagttccccagtgatgctgctgttctactataggaaccacacttgaagaactagttctacaattcagctgtatgttgtaaaggagtcaagtcaatgaaggagttataaagagttgctgaaaaatggagtaacagtgtatgggacttcacatcagttctccttattgattgttagtttgatccctcttgttcttttgttgtaaacattttctataattaggaaatgccatttaagagtgagagaggtatatatctatgagccattgtgtttggtgttttacaagaactttaccatactggtgtgtagtccattctgtacagtttaaaagtgattcacgatttgcaggctttttatcagatcacaaaaaaatcagtctttaagcatttgcttggtaaggtttcttaagattaggtttataatacaaccatctgtaatgtatctctcgtttgagcttgtgggccatacaattcattaactagatgaatacattgtggacagcatcctcactacccctctctactcactcacaaagaaccatgatacactggaatgtttttctctggaatcctctttctactcttgtattaaaatttttccccacttcatgattatattcaaaataaacaactacatcatta

SEQ ID NO: 4249 - DNA, 2596 bp, Homo Sapiens
  NM_016302
tgtcccagcctcctttgcgggtaaacagacatggccggcgaaggagatcagcaggacgctgcgcacaacatgggcaaccacctgccgctcctgcctgcagagagtgaggaagaagatgaaatggaagttgaagaccaggatagtaaagaagccaaaaaaccaaacatcataaattttgacaccagtctgccgacatcacatacatacctaggtgctgatatggaagaatttcatggcaggactttgcacgatgacgacagctgtcaggtgattccagttcttccacaagtgatgatgatcctgattcccggacagacattacctcttcagctttttcaccctcaagaagtcagtatggtgcggaatttaattcagaaagatagaacctttgctgttcttgcatacagcaatgtacaggaaagggaagcacagtttggaacaacagcagagatatatgcctatcgagaagaacaggattttggaattgagatagtgaaagtgaaagcaattggaagacaaaggttcaaagtccttgagctaagaacacagtcagatggaatccagcaagctaaagtgcaaattcttcccgaatgtgtgttgccttcaaccatgtctgcagttcaattagaatccctcaataagtgccagatatttccttcaaaacctgtctcaagagaagaccaatgttcatataaatggtggcagaaataccagaagagaaagtttcattgtgcaaatctaacttcatggcctcgctggctgtattccttatatgatgctgagaccttaatggacagaatcaagaaacagctacgtgaatgggatgaaaatctaaaagatgattctcttccttcaaatccaatagatttttcttacagagtagctgcttgtcttcctattgatgatgtattgagaattcagctccttaaaattggcagtgctatccagcgacttcgctgtgaattagacattatgaataaatgtacttccctttgctgtaaacaatgtcaagaaacagaaataacaaccaaaaatgaaatattcagtttatccttatgtgggccgatggcagcttatgtgaatcctcatggatatgtgcatgagacacttactgtgtataaggcttgcaacttgaatctgataggccggccttctacagaacacagctggtttcctgggtatgcctggactgttgcccagtgtaagatctgtgcaagccatattggatggaagtttacggccaccaaaaaagacatgtcacctcaaaaattttggggcttaacgcgatctgctctgttgcccacgatcccagacactgaagatgaaataagtccagacaaagtaatactttgcttgtaaacagatgtgatagagataaagttatctaacaaattggttatattctaagatctgctttggaaattattgcctctgatacatacctaagtaaacataacattaatacctaagtaaacataacattacttggagggttgcagtttctaagtgaaactgtatttgaaacttttaagtatactttaggaaacaagcatgaacggcagtctagaataccagaaacatctacttgggtagcttggtgccattatcctgtggaatctgatatgtctggtagcatgtcattgatgggacatgaagacatctttggaaatgatgagattatttcctgtgttaaaaaaaaaaaaaatcttaaattcctacaatgtgaaactgaaactaataatttgatcctgatgtatgggacagcgtatctgtaccagtgctctaaataacaaaagctagggtgacaagtacatgttccttttggaaagaagcaaggcaatgtatattaattattctaaaagggctttgttcctttccattttctttaacttctctgagatactgatttgtaaattttgaaaattagttaaaatatgcagttttttgagcccacgaatagttgtcatttcctttatgtgcctgttagtaaaaagtagtattgtgtatttgctcagtatctgaactataagcccatttatactgttccatacaaaagctatttttcaaaaattaatttgaaccaaaactactactatagggaaaagatgccaaaacatgtcccctcacccaggctaaacttgatactgtattattttgttcaatgtaaattgaagaaaatctgtaagtaagtaaaccttaagtgtgaaactaaacatgttctttgttcaaataatgtaaaatatctactcataattttaaagttctaaaaaggctgctttgccacctacctctttgcttatattcaagggtttagtgggtccttccttccacatttgtatgataactttcgttttattggtagtcctttgctactttaaaactaatcaggttaaatgtttactcaaatgtagtaatagtatgaggccaaaatacatgccttgaaggtggagtgaaatcagttgagtgtcacactgcatatttatgtaaatagagtaaatgaaaattcaagaatacttccaatcaggatatgcccctgccttattttttctaaggtctacttttactactttaataattttgggtttgtgtgaaaaaa

SEQ ID NO: 4250 - DNA, 1487 bp, Homo Sapiens
  NM_016304
ctggtctaacagacccgcgagaacgaaggacgcttgcctttttccggtcggggaagggggaagaaggtaacttccggtgacggggttgcatcacttcctctcaagcttggcgtttgtttggtggggttacacgcgggttcaacatgcgtatcgaaaagtgttatttctgttcggggcccatctatcctggacacggcatgatgttcgtccgcaacgattgcaaggtgttcagattttgcaaatctaaatgtcataaaaactttaaaaagaagcgcaatcctcgcaaagttaggtggaccaaagcattccggaaagcagctggtaaagagcttacagtggataattcatttgaatttgaaaaacgtagaaatgaacctatcaaataccagcgagagctatggaataaaactattgatgcgatgaagagagttgaagaaatcaaacagaagcgccaagctaaatttataatgaacagattgaagaaaaataaagagctacagaaagttcaggatatcaaagaagtcaagcaaaacatccatcttatccgagcccctcttgcaggcaaagggaaacagttggaagagaaaatggtacagcagttacaagaggatgtggacatggaagatgctccttaaaaatctctgtaaccatttcttttatgtacatttgaaaatgccctttggatacttggaactgctaaattattttattttttacataaggtcacttaaatgaaaagcgattaaaagacatctttcctgcattgccatctacataatatcagatattacggatgttagattgcatctcagtgttaaatctttactgatagatgtacttaagtaaatcatgaaaattctacttgtaactatagaagtgaattgtggacgtaaaatggttgtgctatttggataatggcactaggcagcatttgtatagtaactaatggcaaaaattcatggctagtgatgtataaaataaaatattctttgcagtaaaatattccctttgttaatgttatagaaggggggatacaaaaaggaactaacaatttgtatggcagtgtcagatatttttattttagtatttcctgttttggtttatttgcatcttagaagagcataatgacattgtttgatgaagcctaattatgctggactgttttgacctggtttaacccttctgataggtagttgtggatgctggggatgagaactgaataatctttgcctggagtgacactacactctagaatttccactttggagaatactcagttccaacttgtgattcctgatagaacagactttacttttctagcccagcattgatctagaagcagaggaatcccagcgccttttaaaagttgttatgtggttttcttttaaaaagctcctgtttttggaaagtagaatttatgggtacaacgtatgttcattatttgtacataaaataaaaccatttaaaaagtaaaaaaaaaaaaaaaa

SEQ ID NO: 4251 - DNA, 1374 bp, Homo Sapiens
  NM_016309
agccggcgtgggcggcgtcactgagccgcgccagctgagccaggtagggccctaccctcttctgttgctttctccctgtggctcgcgccgtcccccgccgcccgtcgaccccgcttccatgtccctggcggacacagctcccaggaacctccacgcccatggccactaggcagagggaatcctctatcacctcctgctgttccacctcgagctgcgacgcagacgacgagggcgtgcgcggcacctgcgaagatgcttccctgtgcaagaggtttgcagtaagcattggctactggcatgacccttacatacagcactttgtgagactgtctaaagagaggaaagcccctgaaatcaacagaggatattttgctcgagtccatggtgtcagtcagcttataaaggcatttctacggaagacagaatgtcattgtcaaattgtcaaccttggggcaggcatggataccaccttctggagattaaaggatgaagatcttctcccaagtaaatattttgaggttgactttccaatgattgtcacgagaaagctgcacagtatcaaatgcaagcctcccctatccagccccattctagaactgcattcagaggacacacttcagatggatggacacatactggattcaaagagatatgccgttattggagcagatctccgagacctgtctgaactggaagagaagctaaagaaatgtaacatgaatacacaattgccaacactcctgatagctgaatgtgtgctggtttacatgactccagagcagtccgcaaacctcctgaagtgggcagccaacagttttgagagagccatgttcataaactacgaacaggtgaacatgggtgatcggtttgggcagatcatgattgaaaacctgcggagacgccagtgtgacctggcgggagtggagacctgcaagtcattagagtcacagaaagaacggctcctgtcgaatgggtgggaaacagcatcggccgtcgacatgatggagttgtacaacaggttacctcgagctgaagtgagcaggatagaatcacttgaattcctggatgaaatggagctgctggagcagctcatgcggcattactgcctttgctgggcaaccaaaggaggaaatgagcttgggctgaaggagataacttattaatctgtcgaaggcttatgccgagccagaagccgaagccacttgccctcctggaggagacctgcaagctccctgagcggtgggcgggcctcgtccgcaggtctcatcccacactcttgagaagccttggtcactacagtggtcgcacatgttcctcttcctgttcctgttgacatgtcgttgtttaaataaatctcacttgccaccagtaaaa

SEQ ID NO: 4252 - DNA, 824 bp, Homo Sapiens
  NM_016310
cggcagtgggagctgccgggagttggagcctgcggagttcgagaccatgctgctgttctgccccggctgcgggaacgggctgatcgtggaggagggacaacgctgccaccgcttctcctgcaacacgtgcccctacgtgcacaacatcacccgcaaggtaacaaatcggaagtacccaaaactgaaagaagtggatgatgtgcttggtggagcagctgcctgggagaatgttgactctactgcagagtcgtgtcccaaatgcgaacatcctcgtgcttacttcatgcagcttcagacccgctctgcagatgagccgatgaccaccttctacaagtgctgcaatgctcagtgtggacaccgctggagggattagggccaggatggcccagctgccctagtgtgtgcttgccttgtccctcggggtagatgcttagctggcagtatgagttgtgtgtcctgagggtctttgctagtgtggtggaaagataaaccttttgaggtgaagagccagggggtcaggaaatatggcctatctgccaggcagggtggatgaagtcatgaatgtctgggagtttttctgtgtggggaggagacagagacccataactaaatatgctctgtgtaaagtcctattctttcatcttccactttattggcagttgacattcccttactcccaatcaacactcttaaatatttgtactgtttgtaaaacttagtacatgtccctaaatatttaactgttacttgtaaacttgtgtaatttattatttattttaatcaaaattctgaatatttcatttaaatgaaagttggaatattgc

SEQ ID NO: 4253 - DNA, 2690 bp, Homo Sapiens
  NM_016312
agatggcggtagctgaggggttgaccgagagacccagttgaaggcctttacgaagtgaaagaggccgggagtcgccccctacccgcttctcgtagtcctgggagcacagcagaagtgtttttctttttttaatgaacaagtaaaccatacaaattgtcaacatgggacggagatctacatcatccaccaagagtggaaaatttatgaaccccacagaccaagcccgaaaggaagcccggaagagagaattaaagaagaacaaaaaacagcgcatgatggttcgagctgcagttttaaagatgaaggatccaaaacagataatccgagacatggagaaattggatgaaatggagtttaacccagtgcaacagccacaattaaatgagaaagtactgaaagacaagcgtaaaaagctgcgtgaaacctttgaacgtattctacgactctatgaaaaagagaatccagatatttacaaagaattgagaaagctagaagtagaatatgaacagaagagggctcaacttagccaatattttgatgctgtcaagaatgctcagcatgtggaagtggagagtattcctttgccagatatgccacatgctccttccaacattttgatccaggacattccacttcctggtgcccagccaccctctatcctaaagaaaacctcagcctatggacctccaactcgggcagtttctatccttcctcttcttggacatggtgttccacgtttgccccctggcagaaaacctcctggccctccccctggtccacctcctcctcaagtcgtgcagatgtatggccgtaaagtgggttttgccctagatcttccccctcgtaggcgagatgaagacatgttatatagtcctgaacttgcccagcgaggtcatgatgatgatgtttctagcaccagtgaagatgatggctatcctgaggacatggatcaagataagcatgatgacagtactgatgacagtgacaccgacaaatcagatggagaaagtgacggggatgaatttgtgcaccgtgataatggtgagagagacaacaatgaagaaaagaagtcaggtctgagtgtacggtttgcagatatgcctggaaaatcaaggaagaaaaagaagaacatgaaggaactgactcctcttcaagccatgatgcttcgtatggcaggtcaagaaatccctgaggagggacgggaagtagaggaattttcagaggacgatgatgaagatgattctgatgactctgaagcagaaaagcaatcacaaaagcagcataaagaggaatcccattctgatggcacatccactgcttcttcacagcagcaggctccgccgcagtctgttcctccttctcagatacaagcacctcccatgccaggaccaccacctcttggaccaccacctgctccaccattacggcctcctgggccacctacaggccttcctcctggtccacctccaggagctcctccattcctgagaccacctggaatgccaggactccgagggcccttaccccgacttttacctccaggaccaccaccaggccgaccccctggccctcccccaggtccacctccaggtctgcctcctggtccccctcctcgtggacccccaccaaggctacctccccctgcacctccaggtattcctccacctcgtcctggcatgatgcgcccacctttggtgcctccccttggacctgccccccctgggctgttcccaccagctcccttgccaaaccctggggttttaagtgccccacccaacttgattcagcgacccaaggcggatgatacaagtgcagccaccattgagaagaaagccacagcaaccatcagtgccaagccacagatcactaatcccaaggcagagattactcgatttgtgcccactgcactgagagtacgtcgggagaataaaggggctactgctgctccccaaagaaagtcagaggatgattctgctgtgcctcttgccaaagcagcacccaaatctggtccttctgttcctgtctcagtacaaactaaggatgatgtctatgaggctttcatgaaagagatggaagggctactgtgacagcttttgatgccagaaaaggcttctgttcacaacagtggcccatggagaaagaggctcttattaaacttagatgaaagagctgcttccattgtcagggtattttctaatttcagttcaaggaatatcctaaaatttagccttgttcagaatttactgcacataaaaaagggtatttcatccagaatagatcagttattgaagcagtgctgctaacatccattccctttcataccaccattttcaccctgtttcttcccctcctccagttctttggaaatttgtgatcgggggatcttagttgcttatttgttttgactcttgtgtgctgtgggcactggagtagagatttctggagaaaaaaaaacagtttatttcatcttgccttttgtgtttgagttatttttaatattttcctgtaaatattttgtaatattttacttgtaatgaaatggatcacaatgtcatttcctaatacaaggcaggatatgtgggaagaatatgtacaattatttgattaaaattatttcccactgacctaaactttcagtgatttgtgggaaaaataaataaatgttctacaccaaaaaaaaaaaaaaaaaa

SEQ ID NO: 4254 - DNA, 4751 bp, Homo Sapiens
  NM_016316
agagccaccgcggagcgcgcgcggggttggttgccgcgagcgtgggggagcgtggaccgcggcgctgctcagcggtggggctgccttcccccggccctcctccctggtccctggcgagggcactggcggcggcggggccggggtccgcaaggccggagaaggccgccgggcccgggcatggtggtctggggcaacgcggaagaagctccaccatgaggcgaggtggatggaggaagcgagctgaaaatgatggctgggaaacatggggtgggtatatggctgccaaggtccagaaattggaggaacagtttcgatcagatgctgctatgcagaaggatgggacttcatctacaatttttagtggagttgccatctatgttaatggatacacagatccttccgctgaggaattgagaaaactaatgatgttgcatggaggtcaataccatgtatattattccagatctaaaacaacacatattattgccacaaatcttcccaatgccaaaattaaagaattaaagggggaaaaagtaattcgaccagaatggattgtggaaagcatcaaagctggacgactcctctcctacattccatatcagctgtacaccaagcagtccagtgtgcagaaaggtctcagctttaatcctgtatgcagacctgaggatcctctgccaggtccaagcaatatagccaaacagctcaacaacagggtaaatcacatcgttaagaagattgaaacggaaaatgaagtcaaagtcaatggcatgaacagttggaatgaagaagatgaaaataatgattttagttttgtggatctggagcagacctctccgggaaggaaacagaatggaattccgcatcccagagggagcactgccatttttaatggacacactcctagctctaatggtgccttaaagacacaggattgcttggtgcccatggtcaacagtgttgccagcaggctttctccagccttttcccaggaggaggataaggctgagaagagcagcactgatttcagagactgcactctgcagcagttgcagcaaagcaccagaaacacagatgctttgcggaatccacacagaactaattctttctcattatcacctttgcacagtaacactaaaatcaatggtgctcaccactccactgttcaggggccttcaagcacaaaaagcacttcttcagtatctacgtttagcaaggcagcaccttcagtgccatccaaaccttcagactgcaattttatttcaaacttctattctcattcaagactgcatcacatatcaatgtggaagtgtgaattgactgagtttgtcaataccctacaaagacaaagtaatggtatctttccaggaagggaaaagttaaaaaaaatgaaaacaggcaggtctgcacttgttgtaactgacacaggagatatgtcagtattgaattctcccagacatcagagctgtataatgcatgttgatatggattgcttctttgtatcagtgggtatacgaaatagaccagatctcaaaggaaaaccagtggctgttacaagtaacagaggcacaggaagggcacctttacgtcctggcgctaacccccagctggagtggcagtattaccagaataaaatcctgaaaggcaaagcagcagatataccagattcatcattgtgggagaatccagattctgcgcaagcaaatggaattgattctgttttgtcaagggctgaaattgcatcttgtagttatgaggccaggcaacttggcattaagaacggaatgttttttgggcatgctaaacaactatgtcctaatcttcaagctgttccatacgattttcatgcatataaggaagtcgcacaaacattgtatgaaacattggcaagctacactcataacattgaagctgtcagttgtgatgaagcgctggtagacattaccgaaatccttgcagagaccaaacttactcctgatgaatttgcaaatgctgttcgtatggaaatcaaagaccagacgaaatgtgctgcctctgttggaattggttctaatattctcctggctagaatggcaactagaaaagcaaaaccagatgggcagtaccacctaaaaccagaagaagtagatgattttatcagaggccagctagtgaccaatctaccaggagttggacattcaatggaatctaagttggcatctttgggaattaaaacttgtggagacttgcagtatatgaccatggcaaaactccaaaaagaatttggtcccaaaacaggtcagatgctttataggttctgccgtggcttggatgatagaccagttcgaactgaaaaggaaagaaaatctgtttcagctgagatcaactatggaataaggtttactcagccaaaagaggcagaagcttttcttctgagtctttcagaagaaattcaaagaagactagaagccactggcatgaagggtaaacgtctaactctcaaaatcatggtacgaaagcctggggctcctgtagaaactgcaaaatttggaggccatggaatttgtgataacattgccaggactgtaactcttgaccaggcaacagataatgcaaaaataattggaaaggcgatgctaaacatgtttcatacaatgaaactaaatatatcagatatgagaggggttgggattcacgtgaatcagttggttccaactaatctgaacccttccacatgtcccagtcgcccatcagttcagtcaagccactttcctagtgggtcatactctgtccgtgatgtcttccaagttcagaaagctaagaaatccaccgaagaggagcacaaagaagtatttcgggctgctgtggatctggaaatatcatctgcttctagaacttgcactttcttgccaccttttcctgcacatctgccgaccagtcctgatactaacaaggctgagtcttcagggaaatggaatggtctacatactcctgtcagtgtgcagtcgagacttaacctgagtatagaggtcccgtcaccttcccagctggatcagtctgttttagaagcacttccacctgatctccgggaacaagtagagcaagtctgtgctgtccagcaagcagagtcacatggcgacaaaaagaaagaaccagtaaatggctgtaatacaggaattttgccacaaccagttgggacagtcttgttgcaaataccagaacctcaagaatcgaacagtgacgcaggaataaatttaatagcccttccagcattttcacaggtggaccctgaggtatttgctgcccttcctgctgaacttcagagggagctgaaagcagcgtatgatcaaagacaaaggcagggcgagaacagcactcaccagcagtcagccagcgcatctgtgccaaagaatcctttacttcatctaaaggcagcagtgaaagaaaagaaaagaaacaagaagaaaaaaaccattggttcaccaaaaaggattcagagtcctttgaataacaagctgcttaacagtcctgcaaaaactctgccaggggcctgtggcagtccccagaagttaattgatgggtttctaaaacatgaaggacctcctgcagagaaacccctggaagaactctctgcttctacttcaggtgtgccaggcctttctagtttgcagtctgacccagctggctgtgtgagacctccagcacccaatctagctggagctgttgaattcaatgatgtgaagaccttgctcagagaatggataactacaatttcagatccaatggaagaagacattctccaagttgtgaaatactgtactgatctaatagaagaaaaagatttggaaaaactggatctagttataaaatacatgaaaaggctgatgcagcaatcggtggaatcggtttggaatatggcatttgactttattcttgacaatgtccaggtggttttacaacaaacttatggaagcacattaaaagttacataaatattaccagagagcctgatgctctctgatagctgtgccataagtgcttgtgaggtatttgcaaagtgcatgatagtaatgctcggagtttttataattttaaatttcttttaaagcaagtgttttgtacatttcttttcaaaaagtgccaaatttgtcagtattgcatgtaaataattgtgttaattattttactgtagcatagattctatttacaaaatgtttgtttataaagttttatggatttttacagtgaagtgtttacagttgtttaataaagaactgtatgtatattttgtacaggctcctttttgtgaatccttaaaaactcaactctaggaagcaactactgtttattatactaaaaggctgaaaaacctccaggccagactgctaagctctgaaattcctgagaggtctcagaccgggattctacttgttccaagaaagggtaaagcttctaaaccatcttattcttgtctccaagcatgaacacaggagcatgttaagaaaatctttactacttcttccatgcggagaaatctacatattttgaattagaaacaccctcacacccacttgaagatttttttcctgggaacattatgtcccgtagatcagaggtggtgttgtctttttgcttctactggccattgagaaactttgatgataaaaaagaacggtatagatttttcaaacgtatataaaatatttttatgttatatgttatgccataactttaaaataaaaatagtttaaaattctaaaaaaaaaaaaaaaaaa

SEQ ID NO: 4255 - DNA, 1862 bp, Homo Sapiens
  NM_016319
ggaagtacggccggaagcccgccatagagtttagtggccagagcgactcttcagggaggtggcaggaaaggcttggaacagctgccggaggtgacggagcggcggccccgcccggtgcgctggaggtcgaagcttccagctctggacatcctgagcccaagtcccccacactcagtgcagtgatgagtgcggaagtgaaggtgacagggcagaaccaggagcaatttctgctcctagccaagtcggccaagggggcagcgctggccacactcatccatcaggtgctggaggcccctggtgtctacgtgtttggagaactgctggacatgcccaatgttagagagctggctgagagtgactttgcctctaccttccggctgctcacagtgtttgcttatgggacatacgctgactacttagctgaagcccggaatcttcctccactaacagaggctcagaagaataagcttcgacacctctcagttgtcaccctggctgctaaagtaaagtgtatcccatatgcagtgttgctggaggctcttgccctgcgtaatgtgcggcagctggaagaccttgtgattgaggctgtgtatgctgacgtgcttcgtggctccctggaccagcgcaaccagcggctcgaggttgactacagcatcgggcgggacatccagcgccaggacctcagtgccattgcccgaaccctgcaggaatggtgtgtgggctgtgaggtcgtgctgtcaggcattgaggagcaggtgagccgtgccaaccaacacaaggagcagcagctgggcctgaagcagcagattgagagtgaggttgccaaccttaaaaaaaccattaaagttacgacggcagcagcagccgcagccacatctcaggaccctgagcaacacctgactgagctgagggaaccagctcctggcaccaaccagcgccagcccagcaagaaagcctcaaagggcaaggggctccgagggagcgccaagatttggtccaagtcgaattgaaaggactgtcgtttcctccctggggatgtggggtcccagctgcctgcctgcctcttaggagtcctcagagagccttctgtgcccctggccagctgataatcctaggttcatgacccttcacctcccctaaccccaaacatagatcacaccttctctagggaggaggcaaatgtaggtcatgtttttgttggtactttctgttttttgtgacttcatgtgttccattgctccccgctgccatgctctctcccttgtttccttaagagctcagcatctgtccctgttcattacatgtcattgagtaggtgggtagccctgatgggggtcgctctgtctggagcataacccacaggcgttttttctgccaccccatccctgcatgcctgatccccagttcctataccctacccctgacctattgagcagcctctgaagagccatagggcccccacctttactcacaccctgagaattctgggagccagtctgccatgccaggagtcactggacatgttcatcctagaatcctgtcacactacagtcatttcttttcctctctctggcccttgggtcctgggaatgctgctgcttcaaccccagagcctaagaatggcagccgtttcttaacatgttgagagatgattctttcttggccctggccatctcgggaagcttgatggcaatcctggaagggtttaatctccttttgtgagtttggtggggaagggaagggtatatagattgtattaaaaaaaaaaaggtatatatgcatatatctatatataatatgacgcagaaataaatctatgagaaatctatctacaaactaccctgaaaaaaaaaaaaaaaaaa

SEQ ID NO: 4256 - DNA, 6980 bp, Homo Sapiens
  NM_016320
aaccgcggcggcgaggggcgggactccacggccctctcaccgctcctaccctgtgcctccccgaactccttctgcccctcctcttccctctcgccccttcccccttcagttcggtttcaaaagacgcgttgcccaatgaataacagggtcgacccagagtggcggccgcgtccaccaattcgcggacggcgagggcggagcgtccgcaacgagcctctgacgccgggcggcgtgtgacgcagtcgggccctctgcgcgctgcgcccgaagcggcggtcggtggcaggggtggtagcggcggcggcgacggtttcgtgggggccgcgcgctgctctgtgagcggcgggtggcagcaggggactcctgacacttccccttccccaccgaaccgcgctttctgaaacaaagactcattttgaagatgtttaacaaatcatttggaacaccctttgggggtggcacaggtggctttggcacaacttcaacatttggacagaatactggctttggcactactagtggaggggcatttggaacatctgcatttggttctagcaacaatactggaggcctctttggaaattcacagactaaaccaggaggattgtttggaaccagttcatttagccagccagctacctccacaagcactggctttgggtttggtacgtcaacaggaacagcaaataccttgtttggaactgcaagcacagggaccagtctcttctcatcccaaaacaatgcctttgcacaaaataaaccaactggctttggcaattttggaaccagtactagcagtggaggactctttggaaccacaaataccacctctaatccttttggcagcacatctggctccctctttgggccaagtagttttacagctgctcctactgggactactattaaatttaaccctccaactggtacagatactatggtcaaagctggagttagcactaacataagtaccaagcaccagtgtattactgctatgaaagaatatgaaagcaagtcactagaggaacttcgtttagaggattatcaggctaacaggaagggcccacagaaccaggtgggagcaggtaccacaactggcttgtttgggtcttctccagccacttccagcgcaacaggactcttcagctcctccaccactaattcaggctttgcatatggtcagaacaaaactgcctttggaactagtacaactggatttggaacaaatccaggtggtctctttggccaacagaatcagcagactaccagcctcttcagcaaaccatttggccaggctacaaccacccagaacactggcttttcctttggtaataccagcaccataggacagccaagcaccaacaccatgggattatttggagtaacccaagcctcacagcctggaggtctttttgggacagctacaaacaccagcactgggacagcatttggaacaggaacaggtctctttgggcagaccaatactggatttggtgctgttggttcgaccctgtttggcaataacaagcttactacatttggaagcagcacaaccagtgcaccttcatttggtacaaccagtggcgggctctttggttttggcacaaataccagtgggaatagtatttttggaagtaaaccagcacctgggactcttggaactgggcttggtgcaggatttggaacagctcttggtgctggacaggcatctttgtttgggaacaaccaacctaagattggagggcctcttggtacaggagcctttggggcccctggatttaatactacgacagccactttgggctttggagccccccaggccccagtagctttgacagatccaaatgcttctgctgcccagcaggctgttctccagcagcacatcaatagtctaacatactcaccttttggagactctcctctcttccggaatccgatgtcagaccctaagaagaaggaagagagattgaaaccaacaaatccagcagcccagaaggctcttactacacctactcattataaactgacaccccgccctgccactagagtccggccaaaggctttacaaacaacaggcacagccaagtcacatctctttgatgggctggatgacgatgaaccatccctagccaatggagcattcatgcccaagaagagcattaagaagttggttttgaagaaccttaataatagcaatctcttttctcctgttaatcgtgattcagaaaatctagcttcaccatctgaatatccagaaaatggagagagatttagtttcctaagcaaacctgttgatgagaatcaccagcaggatggagatgaagattcccttgtttcacatttttatactaaccctattgccaaacctattcctcaaaccccagaaagtgctggaaataaacacagcaacagcaacagtgtggatgataccattgttgcattaaacatgcgtgctgctttgcgaaatgggctggaaggaagcagtgaagaaacgtcttttcatgatgagtcacttcaggatgaccgagaagaaatagaaaataattcttaccatatgcacccagcaggtattattctcactaaggttggttactatactattccatctatggatgaccttgctaaaattaccaatgaaaaaggagagtgcattgtctctgatttcactattggtcggaaaggttatggttcaatctattttgaaggagatgtgaatttgacaaatctaaatttggatgatattgtgcatatccggaggaaagaagtagttgtctacttagatgataaccaaaaaccacctgtgggtgaagggctaaataggaaggctgaagttacattggatggagtttggccaacagataaaacatctcgttgtttaataaagagcccagatcgccttgctgatatcaactatgaaggaagattggaagcagtttcaaggaaacagggagctcaattcaaagaataccggcctgaaactggttcttgggtgtttaaggtctcccatttttctaagtatggccttcaggattctgatgaagaggaggaggagcatccgtctaaaactagtacaaagaagttgaagactgctcctttgcctcctgcaagccagactacgcccttgcagatggctcttaatggcaaacctgcacctccacctcagagccagagcccagaggtggagcagttagggagggttgtggaactggacagtgacatggtagatatcacccaggagccagttttggataccatgttagaagagagcatgcctgaggatcaggaacctgtgtctgcctcaacacatattgcatcttcactgggaattaatccacatgtcttacagatcatgaaagcatcattgcttactgatgaagaagatgtagatatggcactggatcaacgcttcagtcgcctgccttccaaagcagatacttctcaagaaatctgttctcccagactccccatttcagcatcccactcgtcgaaaactcgttcactagttggtgggttactacaatcaaaatttacaagtggagcttttctttcaccaagtgtctctgtgcaagaatgtcgtactcccagagcagcatctttaatgaatatcccatccacatcctcttggtctgtccctccacccctgacttctgtgttcacaatgcccagcccagcccctgaggttccgttgaaaacagtgggtacacgtaggcaactaggcctagtccctcgtgaaaagtctgtcacctatggcaagggaaaactcttgatggacatggccctattcatgggacgctcatttcgtgttggttggggccccaactggactcttgctaatagtggagaacagctgaatggctctcatgaactagaaaatcatcagattgccgattccatggagtttggattcctgcccaatccagtagctgttaaacccctaactgagtccccattcaaagttcacttagaaaaactcagtttgagacaaagaaagccagatgaagacatgaaattatatcagacacctctggagctcaaattaaaacacagcactgtccatgtggatgaactgtgtcctctcattgtccccaatctgggagttgctgtcattcatgactatgcagattgggttaaagaagcatcaggagacttaccagaagcacaaattgtgaagcactggagcctgacatggacactatgtgaagccctatggggccacctgaaggagcttgacagccagctaaatgaaccccgtgaatacattcaaattctggagcgaagaagagctttctcccgctggctatcctgtactgccacacctcagattgaagaggaagtctccttaacccaaaaaaacagccctgtggaggctgtattcagctacctcacaggcaaaaggatcagtgaggcctgctctctggcccagcagtcaggggatcatcgtcttgctcttcttttatctcagtttgtgggtagccagtcagtccgggagctgctcaccatgcagttggtggactggcatcagctccaagcagactccttcatccaggatgagagactgcgcatctttgctctgttggctggaaaaccggtgtggcagctctcagaaaagaagcaaataaacgtgtgctcccagttggattggaaacgctccctggctatccatctttggtatttgcttccaccaacagcctccatttctagggcgctcagcatgtatgaagaagcatttcagaatacctctgacagtgacagatatgcctgctccccacttccttcgtatctggagggttctggctgtgtgatagcggaggagcaaaactcacagacaccacttcgagatgtctgctttcaccttctaaaactctacagtgacagacattatgatctcaaccagctgctggagcctcgaagcataacagcagatcctttggactaccgcctaagctggcacttgtgggaagtgctgagggctcttaactacacccatctctcagcgcagtgtgaaggtgtgctacaggccagttacgctggccagcttgaaagtgaggggctctgggagtgggccatctttgtcctcctgcacattgacaactcaggcatacgtgagaaggctgttcgagagctgcttacccggcactgccagctgttggagacccctgaatcttgggctaaagagactttccttacccagaagctccgtgtacctgccaaatggatccacgaggccaaagctgtgcgagcacacatggaatctgacaagcacttagaggccctttgcttatttaaggctgagcactggaaccgctgccacaagctcatcatccgacacttagcttctgatgccatcattaatgagaactatgactacctgaaggggttcttggaagacctggcacctccagagcgcagcagcctaattcaggattgggaaacatctgggcttgtttacctggactatattagagtcattgaaatgctccgccatatacagcaggtggattgctcaggtaatgacctggagcagttacacatcaaagtgacttcactgtgcagtcggatagagcagattcagtgttacagtgctaaagatcgcctggctcagtcagacatggccaaacgtgtagccaacctgctgcgcgtggtgctgagtctgcatcatcctcctgatagaacctccgactcaacaccagaccctcagcgagtccctttgcgcctcttggctccccacattggccggcttcccatgcctgaggactatgccatggacgaactgcgcagccttacccagtcctatctgcgagaactggctgttgggagcctgtgagccccaggcactttgcatcacagtcacatgcccattcacaccacacagaggttccctgccttgtttggattggcactgtttgccattctctgggttggctgtggcatctaccctccctccctgctgccagaagcagcatcctccacttgttcagggcttttcttaatactgaacgtagcataagggcttctggaacccagaagaggagacagtttaccatcctcaagatcattcagtgtttttcctttaaaaaaatggtcaataaagctcctttggcagaatcccccaaagaaccagggtattctttttccatccctagccattctggatcttgtgaccctccatgccaaccagcttccctactcctaccctggcccttttatactaggactccttaggaggagtgagacaggtgataatggatccttaacagatgaactatccacagaaggaagagggatccgtctcttaagtaattggttagttaacactgaattttggaggcaaaggagggttggcctgagttaggaaacaaaatgggatctttctgacacacttagggcagaagtgaatgcctgtcacggagggattgatcttcagggctgtttttgttcctgcctttagagttccatgaacaccatacctttgctactactatgtgcaggaacccttggtcacatgtgacatgtctgtgggaagctcccagagtttggtttggtccctggttttcagtcttgctgagactctgtctggatttgcctgcagagtttggataaaaaatggcaggttgggtaaccctccctgttcatcccatgttagctccaaagcatttcccaccctccatctaccccttccagaagcaaaaacaaaccatgactgaggcaggcatggagttgggcgttaggggcaggcagagggcctttgctacactgctgacagctatagggagccccaggtaatggcatgagatagctggtgttagggctatctcaggcaatatggccacacctgggtctttatgcatgaagataatgtaaaggtttttattaaaaaatatatatatgtataaataaatgatctagatattttcctctttttctgaagctactttcttaaaaaataaataaaatgtttatagcattcctggtaaaaaaaa

SEQ ID NO: 4257 - DNA, 2538 bp, Homo Sapiens
  NM_016324
cgcccccaccgccacccaaccaagcatcacccattccagcacttccggcctgacccctgtccagcgcctttcctttctccagcttctgctctgccccaagagtggtcgccttcgtggcagggcacgactctctcccagctcgggtcgccgcccacattagtgtggggccctgcggcctagcgtccctcaccagaggcctccccttgcctagctggaccgccgagggacatcgacgagtatcctcctcctgctgtccccggcttcgcctgccgcccctaaccggccagtcaagatggccgccgctgggtgaggcaagctggcgcgccgcgggggcgtctgggagttgtagttcgggacggcgggctgacgcacttcgccgccggccgacgggcgccattgtgcggcgcgcgccggagtatcctgagctccagctggaccctaaattggatcctcttcctgctgagagtcccctaatgaacattgaggttgttgaggtcctcacactgaaccaggaggtggctggtccccggaatgcccagatccaggccctatatgctgaagatggaagcctgagtgcagatgcccccagtgagcaggtccaacagcagggcaagcatccaggtgaccctgaggccgcgcgccagaggttccggcagttccgttataaggacatgacaggtccccgggaggccctggaccagctccgagagctgtgtcaccagtggctacagcctaaggcacgctccaaggagcagatcctggagctgctggtgctggagcagttcctaggtgcactgcctgtgaagctccggacatgggtggaatcgcagcacccagagaactgccaagaggtggtggccctggtagagggtgtgacctggatgtctgaggaggaagtacttcctgcaggacaacctgccgagggcaccacctgctgcctcgaggtcactgcccagcaggaggagaagcaggaggatgcagccatctgcccagtgacagtgctccctgaggagccagtgaccttccaggatgtggctgtggacttcagccgggaggagtgggggctgctgggcccgacacagaggaccgagtaccgcgatgtgatgctggagacctttgggcacctggtctctgtggggtgggagactacactggaaaataaagagttagctccaaattctgacattcctgaggaagaaccagcccccagcctgaaagtacaagaatcctcaagggattgtgccttgtcctctacattagaagataccttgcagggtggggtccaggaagtccaagacacagtgttgaagcagatggagtctgctcaggaaaaagaccttcctcagaagaagcactttgacaaccgtgagtcccaggcaaacagtggtgctcttgacacaaaccaagtttcgctccagaaaattgacaaccctgagtcccaggcaaacagtggcgctcttgacacaaaccaagttttgctccacaaaattcctcctagaaaacgattgcgcaaacgtgactcacaagttaaaagtatgaaacataattcacgtgtaaaaattcatcagaagagctgtgaaaggcaaaaggccaaggaaggcaatggttgtaggaaaaccttcagtcggagtactaaacagattacgtttataagaattcacaaggggagccaagtttgccgatgcagtgaatgtggtaaaatattccggaacccaagatacttttctgtgcataagaaaatccataccggagagaggccctatgtgtgtcaagactgtgggaaaggatttgttcagagctcttccctcacacagcatcagagagttcattctggagagagaccatttgaatgtcaggagtgtgggaggaccttcaatgatcgctcagccatctcccagcacctgaggactcacactggcgctaagccctacaagtgtcaggactgtggaaaagccttccgccagagctcccacctcatcagacatcagaggactcacaccggggagcgcccatatgcatgcaacaaatgtggaaaggccttcacccagagctcacaccttattgggcaccagagaacccacaataggacaaagcgaaagaagaaacagcctacctcatagctctcaagccagttgaagaaaccttgccttttcagcttgaccctgcaatataacatgcacaggcctgcttgtgaatcaggactgaatgtgaaagggaagtattgagtgaggacattcccaaaaccaaaggacaactgaggagactgcccagcacataatgaataaataagaaaatgagtgaggagttattaacatcatttggaaaaaagatttcccattcacttgatattgtttgttcactcatttagtcattaaaagtgagattaataaaatctgaaaatgttatataataactttaaaaagccaggtaattaataatctgcactgatattacatccacagtaccacagtatttatgtgtatgaattaaggattaaaagataatgtggataaataaactattgatctatgtctgtgt

SEQ ID NO: 4258 - DNA, 2167 bp, Homo Sapiens
  NM_016327
gtctgggagcgagagtaagagataaaggcaagggcgcctgaccgggcctgggcacctcctcccactgcgggcaaagggcaggcagttcgtgcgcggacacaagcactggcggaccgtggccatggcgggcgctgagtggaagtcgctggaggaatgcttggagaagcacctgccgctccccgacttgcaggaagtgaagcgcgttctctatggcaaggaactcaggaagcttgatctgcccagggaagctttcgaagctgcctccagagaagactttgaactgcagggatatgcctttgaagcagcggaggagcagctgagacgaccccgcattgtgcacgtggggctggttcagaacagaatccccctccccgcaaatgcccctgtggcagaacaggtctctgcccttcatagacgcataaaggctatcgtagaggtggctgcaatgtgtggagtcaacatcatctgtttccaggaagcatggactatgccctttgccttctgtacgagagagaagcttccttggacagaatttgctgagtcagcagaggatgggcccaccaccagattctgtcagaagctggcgaagaaccatgacatggtggtggtgtctcccatcctggaacgagacagcgagcatggggatgttttgtggaatacagccgtggtgatctccaattccggagcagtcctgggaaagaccaggaaaaaccacatccccagagtgggtgatttcaacgagtcaacttactacatggagggaaacctgggccaccccgtgttccagacgcagttcggaaggatcgcggtgaacatttgctacgggcggcaccaccccctcaactggcttatgtacagcatcaacggggctgagatcatcttcaacccctcggccacgataggagcactcagcgagtccctgtggcccatcgaggccagaaacgcagccattgccaatcactgcttcacctgcgccatcaatcgagtgggcaccgagcacttcccgaacgagtttacctcgggagatggaaagaaagctcaccaggactttggctacttttatggctcgagctatgtggcagcccctgacagcagccggactcctgggctgtcccgtagccgggatggactgctagttgctaagctcgacctaaacctctgccagcaggtgaatgatgtctggaacttcaagatgacgggcaggtatgagatgtacgcacgggagctcgccgaagctgtcaagtccaactacagccccaccatcgtgaaagagtagccggcttcagtgcctgccttggggtgaggaagacacctctgccccagtggattagcaagtgtggcaggcttaacatgtccaggttctccccaataacattgtccaggttggttttaaaattcccaggcagggggagagtggcatggggagtgacttcttaatgggtaaggggctgcttacttctggggtattggaaatgtttggggactaggtagaggtgaatgtactaaatgccactgaatttgtatacttcagaatgtttgttatgtaaattttacctcaactaaaaaaaaaaatgcccaggtactgcttgtgcaggtggatttgaggttaggcagatgatgctgtccatcccgtacaccagtgggaagagggtgagggctgatccagagaccctgagcctacagcaaggctgtggtgggtcggatggtctttggatgtgtcagcttagctaggccacagtcaccagtaattcaatcagacactaatctaggtatttctgtgaaggtattttgtagatgtgacagaagtccattcccaattgactaagtaagtgagattatctcagataatctgggtcagcctgacctgattagtcagaaggcctaaagaacagagctaagggtttccctgaggaagaaattctgcctgaggacagcagcccagtgcttggcgagagttcctgacagtctgcccttctgatagcctgcctcacagagtttagacatgactagccagctcctacaatcactgaagtcaattccttgcaataaatctcaatatatcccctaaaaaaaaaaaaaaaaaaaaaaaaaaaaaaaaaaaaaaaaaaaaaaaaaaaaaaaaaaaaaaaaaaaaaaaaaaaaaaaaaaaaaaaaaaaaaaaaaaaaa

SEQ ID NO: 4259 - DNA, 4558 bp, Homo Sapiens
  NM_016329
atattggaatgagtcggagcgcggagcgccgccgccgcctccgccggagcgcgggtggaggggggcggggagagctgccggccgccccgctccgccgaacccagcaggaaggagggcgcgagcgggcgagcgcgggcagcacgggaggaaaaagcttccgcgcgggggagcgaaaagacggaaagaaagaaagaaaacgagcgcgagagggggaaaagcgagcgatcgagcgagcgcgcgcgcgaaaactccgggcagcactttcatttggacccgtggatacccattgaacagatgcttgaaacctgcaagtaatcttcagatcctagcagaaccataggcctttcctttgttttgggaggatatagcctgcctatatgctgtggaaatgaacggggagcagcagcttgatgcagatgccggctctggtatggaagaggtagaattaagctgggaagattatctagaagaaacagggtccacagcagttccctatgggtcttttaaacatgtggacacacgtttgcaaaatggatttgctcctgggatgaagctggaggtggctgtgagaacagatcctgagacctactgggttgccaccgttatcactacctgtgagcagttgctccttctccgctatgatggctatggggaggatcggagagcagatttctggtgtgacatcaggaaggctgatctctaccccattgggtggtgtgagcagaataagaagacccttgaagccccagaaggcatcagagataaagtatctgactgggatgagtttctgcggcagaccctgataggagcatgtagtcctcctgttccgctgctagagggcctccgtaatgggaggaatcctttagatctcattgctccaggatccagactagaatgtcaagctttccaggactctttaagcacttggattgttactgtagtagaaaacattggaggaaggctgaagctacgttatgaaggacttgaaagttctgacaattatgaacattggttgtattacttggatccatttcttcatcacgttggttgggctgctcaacagggatatgagcttcagcccccttcagccattagacatctaaaaaatgaagctgagtggcaagagattttggccaaagtgaaagaggaagaggaagagccattaccatcttacttatttaaggacaaacaagttattggcattcatacattctctgtaaacatgaaattggaagctgtagacccctggtctccttttgggatctctcctgctacagttgttaaggtttttgatgagaagtactttctggtggaaatggatgacttgcgtcctgagaaccacgcacggcgatcctttgtgtgccacgccgacagtcctggcatcttccctgtgcagtggagtctgaagaatggcctacacatcagcccccctccaggctacccaagccaggactttgactgggctgactacctcaaacagtgtggtgctgaagctgctccccagaggtgcttccctccgttaatttctgaacatgaatttaaggagaacatgaagctcgaggcggtgaaccccattctccctgaagaagtgtgtgttgctaccatcactgcagtgagaggctcctacctgtggctccagctggagggttctaagaagcctatacctgaatgtattgtgagtgtggaatccatggatatatttcctttgggctggtgtgaaaccaacggccaccccctcagcactcctcgccgagcacgagtatataaacagaggaaaattgcagtggttcagccagaaaaacaagtaccatcctcgaggactgtccacgagggcctgaggaatcaggagctgaactccacagagtcagttatgattaatggaaaatattgctgtccaaagatatacttcaaccaccgttgcttctcagggccatatcttaacaaaggaagaattgctgagctgcctcaatgtgtaggacctgggaactgtgttctggtccttagagaggtcctcactttacttatcaatgcagcctacaaacccagccgtgtccttcgggagctccagctggacaaagactctgtgtggcacggatgtggggaagtcctaaaagccaaatataaaggaaagagttatcgggctactgttgagatagtgaaaacagcagatcgggtgactgaattctgccggcaaacctgtatcaaactggaatgctgtcctaacctcttcggtccacggatggttctggataagtgttctgagaactgttctgtacttacaaagaccaaatacacacactattacggaaagaagaaaaataaaagaattgggaggccacctggtgggcatagtaacttagcttgtgccctgaaaaaagccagtaagaggagaaagaggcggaaaaatgtttttgttcataagaagaaacgctcctctgcatctgttgataataccccagcgggctctccccagggaagtgggggtgaagatgaggatgacccagatgaaggggatgatgattccctaagtgaaggcagtacatccgagcagcaggatgagctacaggaagaatcagaaatgtcagaaaaaaagtcatgctcctcttctcccacccaaagtgagatatccacatcgctgcctccagatagacaaaggagaaaaagggagcttcgcaccttttcattttctgacgatgaaaataaacctccttcaccaaaggaaataaggatcgaagttgctgaaaggcttcacctggacagtaaccccttgaagtggagtgtggcagacgttgtgcggttcatcagatccactgactgtgctccattagcaagaatattcctagaccaggaaattgatgggcaggccctgttgctccttacccttcccactgttcaagaatgcatggacttaaaattgggccctgccatcaaactttgccatcacatagagaggatcaagtttgctttttatgagcagtttgccaactgagaaggacaaccaaagtgagctggatctttgaagcacaaatgcagcaaatccttcaccctgctttataagtggagctggaatagtcctggggctctggggcctgcaggtatcagcttgctctctttgcactttcggggaaggaggactcacagtgaggaagcaaaaactgtgcacagaagtggatcacctgctggtggaaatgtggacatctcttgttcagcagatggcagtttttaaaaaataaaggttgtgaggaaaagacttatataagaagaaaagcatttccagtggtgtggcctgaaaacaaagaataacctaggctgctggaaagcacccttttggttgttttcattctgttccctcccattgtagattgaactttgttctctgctttctttttcttggaaagagaggacttagctttaagtcagcactgatttgggactgttcctaaggcatatcagtgcttcattgtcattgtgtttttaaactttttaaaattaaaacagttcattttggggatgattatgtggctctagggttttgaatgtatagtcacactttgatcattttaaaatcgattcttaggagttcctttgtttactacctctgttgataattgagcttacagccatgtatgaggttttttgtatgatgccatttttaagctacataaacactaaaattatgacagaatttggagggggggaaactgtttgctttcttaaaaacattatatggggcacttacaccagttccttaactgacctgatctgagaactctactgttactgttctccatcttgacccagccgaggctgcctgtgttaagtaacatcaccaagactgttagtatttctgtttaattgccctcttcctattcattctcagagggacttcagtgacttttattttgtgtttacttttctctagagttgtttgtctacctctgtttcatttctaaggtctttactttgggtgaaaatcagtaagtgttccatggacccacagcgaagcccatttgtccttctttccaggtgtctccagtgtagaagcacagcacagaaaacatgttttggagggtaacgcagagcatggagtttctgttagcagtgtcctcagtggcaggataaatactgagatgtggttaaggattctggaaacctctttgcctagccacacttagacttttttcagctaatcctttaaattgaatataatctttagtccgaggattcccatttaaacaactcagtattcttttaagtgtgtcttttagcccagctcaagttaacatgaaactccaggtgaattttcacttactattccattgctagctattatagaataatagcgtttgctgcactattctagtcatgaggagtgaggaaaaacatacataggttgtctcccttaaatggtttgctttgctgaattttttttatcctaatcacctgcaaatttataacccaatcattcttcctcaagatttgaaaatgttttaatcctgcaaactgggtgaattctaaacagctctacaaatataaggaaatattacagcaaatttta

SEQ ID NO: 4260 - DNA, 1386 bp, Homo Sapiens
  NM_016332
ggaagccgggattcgccctccggggagcgattggtcctcgggaggggcggggaggtggacgcgggtaccggcggtcgtcgggtcggcagcctttggtcagttggcagcggcaagcgcgctgcggttccggtggcgccatgtcgttctgcagcttcttcgggggcgaggttttccagaatcactttgaacctggcgtttacgtgtgtgccaagtgtggctatgagctgttctccagccgctcgaagtatgcacactcgtctccatggccggcgttcaccgagaccattcacgccgacagcgtggccaagcgtccggagcacaatagatctgaagccttgaaggtgtcctgtggcaagtgtggcaatgggttgggccacgagttcctgaacgacggccccaagccggggcagtcccgattctgaatattcagcagctcgctgaagtttgtccctaaaggcaaagaaacttctgcctcccagggtcactaggcgggcagcccacacccaccccagacggccaccacactgaggccacacgttggccattccaccttggagttggaaccctgggcgtcgagacaggaaggcagggcgcagtggttgaaacatcaggacactcccaaggccccggctctgaacaagaccttttcgtttcttggaaaagagactcatttgctgatggttcatgccttctgctgggacaggcctgggctgtgcagccacactgtcggctgacttagccccctgctcactctaggtgcctccaggaggtgagccctgggtgcagctggtctctgaatgacgttacaccctcaccttcttttcctggccctgtctctggactctcccctgtgaggcccaattccaagacagactctcgtcctcaccgaagcttaggcccacatctcccaggctgcttaggagacagaatggaaacggaggccgcccctgccagccgccctggccctggtcactgcatgatccgctctggtcaaacccttccaggccagccagagtggggatggtctgtgacctgctgggaaggcaggctgatggggcacacccttggcctctcgtccacgaggggagaaacctaaaccctgtttcacaatctgtgcggaagtagcttgcctcacttctgcttaggaaagcggctgttgctccataactctaaccagcacagggctgaggcctgcagtgcacacctgcagggaggcccttcccaaggtgtggtgactgtgccttactgtacatgctcggaggcctggccatataggagggtgggtgatgctgaaatcaccccccatcttaagtaattactttctggagtaatcaggtggaaatccatagacaaatgaaacattcagaaaaaaaaaaaaaaaaaaaa

SEQ ID NO: 4261 - DNA, 9379 bp, Homo Sapiens
  NM_016333
agaatgctctgcatcgacagcgggagacgagacgcgctcgggcgtcgctttgctgccgctaggccctgtgctcctccccgcagcggaaggcctacgaatacgcggtgtcttacgtcgcttcctccgttcttcgttgcactggccaacgggacgcttagtctttcggcaacggggtgaaaccttccttgtgcctgaaaaaacggtacttcgcggtgtggcttcggcgcctgcgcaaaaggccgcggggcgcactccagttcccggcaggccccgcgacgcgcgtttgcgtgctgacgcacgcagttagtcgtgctgacgtgcagcgcggcccaggcggggtgcgagtggcgcagttggagcccgttgcggcccctgaggaagcgaggaggcgtcggcgtcggctgaggcgggcggaccggcgaggcgaggcggcggccccaggcccgagggactcgggagctcgagcagcggcggcggcaagacctctccccctcggaggcggcgggcggaggcggcgggagcggtggtgccccccccgggcacggggccatgtacaacgggatcgggctgccgacgccccggggcagcggcaccaacggctacgtccagcgcaacctgtccctggtgcggggccgccggggtgagcggcctgactacaagggagaggaggaactgcggcgcctggaggctgccctggtgaagcggcctaatcctgacatcctggaccacgagcgcaagcggcgcgtcgagctgcgatgcctcgagctggaggagatgatggaagagcaggggtacgaggaacagcaaattcaggaaaaagtggcgacctttcgactcatgttgctggagaaggatgtgaaccctgggggcaaggaggagaccccagggcagaggccagcggtcacggagactcaccagttggcagaattaaatgagaagaagaatgaaagactccgtgctgcctttggcatcagtgattcttacgtagatggcagctcttttgatcctcagcgtcgtgcccgagaagctaaacaaccagctcctgagcctcccaaaccttacagccttgttcgggagtctagcagttctcgctcaccaaccccaaagcagaagaagaagaaaaagaagaaagatagaggacgcaggtcagagagcagctctcctcgacgggagagaaagaaaagctcaaagaagaagaagcacaggtcagaatctgagtccaagaaacgtaagcataggtctcccactccaaagagcaaacgtaaatctaaggacaaaaagcgaaagcggtctcgaagtacaacaccagcccccaagagccgccgggcccaccgttcaacttctgctgactctgcttcctcctccgatacttcccgcagtcggtctcgaagtgctgcagctaaaactcatacaactgccttggctgggcgaagtccttcccctgcttcagggcgacgcggggagggagatgcgcctttcagtgaaccaggtactaccagcacacaacggcctagtagcccggagactgctacgaaacagcctagcagcccttatgaagacaaagataaagacaagaaggagaaatctgcaactcgacctagcccctctccggaaaggagcagcacaggcccagaaccacctgctcccactccgctccttgctgagcgacatggcggctccccacaaccccttgcaaccacccccttaagccaggagccagtgaaccccccatctgaggcctctccaactcgggaccgttcaccacctaagtctcccgagaaacttccccagtcttcttcctcagagagcagcccaccatcccctcaacctaccaaagtttctcggcatgccagctcttccccagaaagtcctaaacctgctccagctccagggtcccaccgagagatttcttcttctcccacatctaagaatcgctcacatggccgagcaaaacgggataaatcacattctcataccccctcccgtaggatggggaggtcccgtagccctgccaccgctaagagagggcgatctcggtctcgaacccctaccaagagaggtcattctcgatcccgatctccccagtggcgtaggtccaggtctgcacagaggtggggaagatctagaagcccccagcgacgtggccgctctaggtctcctcagcgaccaggctggtctaggagcagaaatacccagagaagaggcaggtctaggtcagcaaggcgagggaggtcccactctagatccccagccactaggggtagatctcgttctagaacaccagcccgccggggcaggtcccgctctagaacacctgccaggcggagatcacgatccagaactcccaccaggcgtaggtctcggtctagaacaccagcccggaggggcaggtctcggtctagaacacctgctaggcgcagatctaggacccgatcaccagtacgacgcaggtctcgtagtagatcaccagccaggagaagtggcaggtcacgctctagaaccccagctagacgtggccgctcacgctccagaaccccagccagacgtggccgctcacgctctagaaccccagctagacgcagtggtcgctcacgctccagaacaccagccaggagagggaggtctcggtctaggacaccaagacgaggaagatcccgcagtagaagcttagttagacgtggaagatctcactctagaacacctcaaagaagaggcagatctggctcatcttcagagcggaaaaacaaatccagaacatctcaaagaagaagcaggtccaattcaagcccagaaatgaagaaatctcgcatttcttcaaggcggagcaggtctctctcttcaccacggtccaaagcaaaatctcgcttgtctttgaggcgcagcctttcagggtcttccccatgccctaaacaaaagtcacagacaccacccaggcgcagtcgctctggatcctcccaacctaaagctaaatctagaacgccacccagacgcagtcgctccagttcttctccgccacctaaacagaaatctaagacaccatcaagacaaagtcattccagttcatctcctcatcctaaagtgaaatctggaacaccaccgaggcaagggtccataacaagtccccaggccaatgagcaatctgtaacgccacagagacggagctgttttgaatcatcacctgaccctgagttgaaatctaggaccccttctagacatagctgctcagggtcctctcctcctagagtgaaatctagcacacctcccagacagagcccatctaggtcatcatctccacaacccaaagtgaaggcaataatatcaccaagacaaagaagccattctggctcctcttctccaagtcctagtagggtgacgtcgagaacaactccacggcgaagcagatcagtatctccctgctccaatgtggaatccagattgttgccaagatacagtcattctgggtcctcctcaccagataccaaagtgaaacctgaaacaccgccaagacaaagtcactcagggtctatttcaccataccccaaagtaaaggcccaaactccaccggggccaagtctttctggatcaaagtcaccatgtccccaagagaagtctaaagactcactagttcaaagttgccctggatccctctctctctgtgcaggagtaaaatctagcacaccaccaggcgagagctattttggtgtctcatctctgcaactgaaaggacaatctcaaacttcaccagaccacagatctgatacttcaagtccagaagtgagacagagtcattcagaatcaccatctctgcagagcaaatctcaaacatcacctaagggaggtcggtccaggtcttcatctccagtcactgagctggcatccagatctccaataagacaagatagaggtgagttctcagcgagtcctatgttgaaatctggaatgtctcctgagcagagcaggttccagtctgactcttcttcatatcctacagtggactcgaattctctcttggggcagagtagattggagactgctgaatcaaaagagaaaatggccttaccccctcaggaggatgctactgcatcacctcctagacagaaagacaaatttagtccctttccagtacaggataggcctgagtcttcactggtattcaaagacacacttagaaccccgccaagggaaagaagtggtgctgggtcatctccagaaacaaaagagcaaaatagtgcattgcctacgtcaagccaagatgaagagttaatggaggtggtagagaagtctgaagaacccgcaggccaaatcctgtctcatttgtcttcagaacttaaagaaatgtccacaagtaactttgaatcatctcctgaagtagaagaaaggcctgctgtgtctttgactcttgatcagagccagtcacaggcttctttggaagcagtagaagtcccttcaatggcctcatcttggggtgggccacatttttctccagaacataaagaactgtctaactccccactcagggagaacagctttggatcacctttagaatttagaaactcaggcccacttggtacagaaatgaatactggattttcttctgaggttaaagaagatttgaatggaccgtttcttaatcagctggaaacagatccatctctagacatgaaagaacaatcgacaagatcctctggacacagcagttctgagttatccccagatgcagtggaaaaggcagggatgtcttcaaatcagagcatctcttcacctgtgcttgatgctgtacccagaacaccctcgagagaaagaagtagttctgcatcttctcctgaaatgaaagatggtttacccagaactccatcaaggagaagcaggtctgggtcttctccaggacttagagatgggtctgggactccctcgaggcacagcctgtctgggtcctctcctggaatgaaagatatacctagaacgccatctagagggagaagcgaatgtgattcttccccagaaccgaaagctttgcctcagactcctaggccgaggagtcgttctccatcatccccagagctcaacaacaagtgtcttaccccccagagagaaagaagcgggtcagaatcatcagttgatcagaaaactgtggctcggactcccctggggcagagaagtcgttcgggatcctctcaagaacttgatgtgaaacccagtgcatcccctcaggaaagaagtgagtcagactcttctccagattctaaagccaagacaagaaccccacttcggcagaggagtcggtctggatcatctccagaggttgacagcaaatctcgactatcccctcggcgcagtaggtctggttcctcccctgaagtgaaagataagccaagagcagcacccagggcacagagtggttctgattcctctcctgaacctaaagctccagcccctcgggcccttcccagacgaagcagatcaggttcatcaagcaaaggcagaggcccttctcctgaaggaagcagcagtaccgagtcctctcctgaacatccgcccaaatccagaactgctcgcagaggttccaggtcatcaccagagcccaagaccaagtctcgtacaccacctcgacgtcgcagctctcgatcatctccggagctaacaaggaaggccagactgtcccgtagaagccgctctgcctcatcctcaccagaaactcgctctagaactcccccaaggcaccggagaagtccctcagtgtcttccccggagccagccgaaaaatcgaggtcttcacgccgacggcgctcagcttcatctccacgcactaagacaacctcaaggagaggccgctctccttcgccaaagcctcgtggactccagaggtcccgttcccgctcaaggagagagaaaacaagaacaacccgacgtcgagataggtctggatcttctcagtcaacctctcggcgaagacagcggagccggtcaaggtcgcgggttactcggcggcggaggggaggctctggttatcactcaaggtcacctgcccggcaggaaagttcccggacctcctctcgacgccgaagaggccgctctcggacacccccaaccagtcggaagcgttctcgctcacgcacatcaccagccccgtggaaacgctctagatctcgagcctctccagccactcaccggcgatccaggtccagaacccccctgataagccgacgtaggtccagatctcgaacttcaccagtcagccggagacggtcaaggtccaggacttcagtgactcgacgaagatcccggtcaagagcatccccagtgagcagaaggcgatccagatccagaacgccaccagtaacccgccgtcgttcaaggtctagaacgccaacaacacgccgccgctcccgttctagaactccaccagtgactcgcagaaggtccagatccaggactccaccagtaaccaggaggcgatctcgaagcagaacttcgcctatcactcgcagaagatcaagatccagaacatctccggtcacccgaaggagatctcgatctcgcacatctccagtaactcgaagaaggtcccgctctcgaacctcaccagtgacacgccgccgctctaggtcccggacacctccagctattcggcgccgctctagatctcgaacgccactgttaccacgcaaacgttctcgaagtcgctcaccacttgctatccgccgccgctccagatcccgtactccacgaacagctcggggtaaacggtccttaacaagatctcctccagccatccgcaggcgttctgcatctggaagtagttctgatcgttcacgatctgctactcctccagcaacaagaaatcattctggttcacggacacctccagtagcactcaacagttccagaatgagctgcttcagtcgtcctagcatgtccccaacacctcttgatcgctgcagatcacctggaatgcttgaaccccttggcagctctagaacacccatgtctgtcctgcagcaagccggcggctccatgatggatggtccaggtccccgaatacctgaccaccagagaacatctgtgccagaaaatcatgctcagtccaggattgcacttgccctgacagctatcagtcttggcaccgctcggcctcctccgtccatgtctgctgctggccttgctgcaagaatgtcccaggttccagccccggtgcctctcatgagtctcagaaccgcaccagcagccaaccttgccagcaggattcctgcagcctctgcggcagccatgaacctagccagcgccaggacacctgccattccaacagcagtgaacctggctgactctcgaacgccagctgcagcagcggccatgaacttggccagccccagaacagcggtggcaccttcggctgtgaacctggctgaccctcgcactcccacagccccagctgtgaacctagcaggggccagaaccccagctgccttggcagctctgagtctcacaggctctggcacaccaccaactgctgcaaactatccctccagctccagaacaccacaggctccagcctctgcaaacctggtgggtcctcggtctgcacatgccacagctcctgtgaatattgccggctccagaaccgccgcagccttggcccccgcgagcctcaccagtgctaggatggctccagcattgtctggtgcaaacctcaccagccccagggtgcccctttctgcctacgagcgtgtcagtggcagaacctcaccaccgctccttgaccgagctaggtccagaacaccaccgtctgccccaagccaatctaggatgacctctgaacgggctccctccccttcctctagaatgggccaggctccttcacagtctcttctccctccagcacaggatcagccgaggtctcctgtgccttctgctttttcagaccaatcccgttgtttgattgcccagaccacccctgtagcagggtctcagtccctttcctctggggcagtggcaacgaccacgtcctctgctggtgatcacaatggcatgctctctgtccctgcccctggggtgccccactctgatgtgggggagccacctgcctctactggggcccagcagccttctgcattagccgccctgcagccagcaaaggagcggcggagttcctcctcgtcgtcgtcgtcctctagctcctcctcttcttcatcatcgtcgtcgtcgtcctcctcctcctctggctccagttctagtgactcagagggctctagccttcctgtgcaacctgaggtggcactgaagagggtccccagccccaccccagccccaaaggaggctgttcgagagggacgtcctccggagccaaccccagccaaacggaagaggcgctctagcagttccagttccagctcctcctcttcatcttcctcctcctcctcctcctcctcttcttcctcctcctcttcctcttcttcttcttcctcctcatcttcctcctcctcgtcgtcttcctccccttcccctgctaagcctggccctcaggccttgcccaaacctgcaagccccaagaagccaccccctggcgagcggaggtcccgcagcccccggaagccaatagactccctcagggactctcggtccctcagctactcgcctgtggagcgtcgccgtccctcgccccagccctcaccacgggaccagcagagcagcagcagtgagcggggttcccggagaggccagcgtggggacagccgctcccccagccacaagcgcaggagggagacacctagccctcggcccatgagacaccgctcctccaggtctccataaattgtctttgggggattccaccacacccaatgctctggagccacaaggagtgtcccttcttccccagcagagccgtgggagggtccttgtctgctctcctttgaaccttggcagcccttggatggagggctccctttccctccccttttttttttctttgttcctgtgaaatgttaatctccgtgagttcttcctggttcatgtgttctggggggtttggggtgggagggaatgcagatgggagttgggggaggggaggatacagttcaggataccccagcctggagtcagggccagggaggcatggccccacttgtatccagaagttcccaggggtgattgtgatggtggttgggactggaggttgtataaggtgttcttggaaggaaggggcaggagttggaattagttggtccctactgtcccccatgaggttgtgaacccctccccccaacttttcatgtttcttaaaggcattttggttttttaaaatctgtacagcaagagcaactttttctgtcaaataaaaatgagaaatgcaggaaaaaaaaaaaaaaaaaaaaaaaaaaaa

SEQ ID NO: 4262 - DNA, 2150 bp, Homo Sapiens
  NM_016334
agcttgacggcgtcgggctggagagccgcagtcccggctgcagcacctgggagaaggcagaccgtgtgagggggcctgtggccccagcgtgctgtggcctccgggagtgggaagtggaggcaggagccttccttacacttcgccatgagtttcctgatcgactccagcatcatgattacctcccagatactattttttggatttgggtggcttttcttcatgcgccaattgtttaaagactatgagatacgtcagtatgttgtacaggtgatcttctccgtgacgtttgcattttcttgcaccatgtttgagctcatcatctttgaaatcttaggagtattgaatagcagctcccgttattttcactggaaaatgaacctgtgtgtaattctgctgatcctggttttcatggtgcctttttacattggctattttattgtgagcaatatccgactactgcataaacaacgactgcttttttcctgtctcttatggctgacctttatgtatttcttctggaaactaggagatccctttcccattctcagcccaaaacatgggatcttatccatagaacagctcatcagccgggttggtgtgattggagtgactctcatggctcttctttctggatttggtgctgtcaactgcccatacacttacatgtcttacttcctcaggaatgtgactgacacggatattctagccctggaacggcgactgctgcaaaccatggatatgatcataagcaaaaagaaaaggatggcaatggcacggagaacaatgttccagaagggggaagtgcataacaaaccatcaggtttctggggaatgataaaaagtgttaccacttcagcatcaggaagtgaaaatcttactcttattcaacaggaagtggatgctttggaagaattaagcaggcagctttttctggaaacagctgatctatatgctaccaaggagagaatagaatactccaaaaccttcaaggggaaatattttaattttcttggttactttttctctatttactgtgtttggaaaattttcatggctaccatcaatattgtttttgatcgagttgggaaaacggatcctgtcacaagaggcattgagatcactgtgaattatctgggaatccaatttgatgtgaagttttggtcccaacacatttccttcattcttgttggaataatcatcgtcacatccatcagaggattgctgatcactcttaccaagttcttttatgccatctctagcagtaagtcctccaatgtcattgtcctgctattagcacagataatgggcatgtactttgtctcctctgtgctgctgatccgaatgagtatgcctttagaataccgcaccataatcactgaagtccttggagaactgcagttcaacttctatcaccgttggtttgatgtgatcttcctggtcagcgctctctctagcatactcttcctctatttggctcacaaacaggcaccagagaagcaaatggcaccttgaacttaagcctactacagactgttagaggccagtggtttcaaaatttagatataagaggggggaaaaatggaaccagggcctgacattttataaacaaacaaaatgctatggtagcatttttcaccttcatagcatactccttccccctcaggtgatactatgaccatgagtagcatcagccagaacatgagagggagaactaactcaagacaatactcagcagagagcatcccgtgtggatatgaggctggtgtagaggcggagaggagccaagaaactaaaggtgaaaaatacactggaactctggggcaagagatgtctatggtagctgagccaaacacgtaggatttccgttttaaggttcacatggaaaaggttatagctttgccttgagattgactcattaaaatcagagactgtaacacttttgccttacgttcattttatcaagcatagcttggtatttattatgcttgtgtgatctaacatgagttagcatcccacacctcctcttctgatcctgccccattaaaataaccaagaggttatctgttcttttccgggaaaggggtggtatgcacctgaaatagattttaccaaaagaaaaaaaaaaaaaaaaaaaaaaaaaaaaaaaaaaa

SEQ ID NO: 4263 - DNA, 1853 bp, Homo Sapiens
  NM_016337
gagggtctgtggtcctctgatcaacataggctggtgggagtacaggactcgcctcctcagggttccctgtgctgccacttttcagccatggccacaagtgaacagagtatctgccaagcccgggcttccgtgatggtctacgatgacaccagtaagaaatgggtaccaatcaaacctggccagcagggattcagccggatcaacatctaccacaacactgccagcaacaccttcagagtcgttggagtcaagttgcaggatcagcaggttgtgatcaattattcaatcgtgaaagggctgaagtacaatcaggccacgccaaccttccaccagtggcgagatgcccgccaggtctacggcttaaactttgcaagtaaagaagaggcaaccacgttctccaatgcaatgctgtttgccctgaacatcatgaattcccaagaaggaggcccctccagccagcgtcaggtgcagaatggcccctctcctgatgagatggacatccagagaagacaagtgatggagcagcaccagcagcagcgtcaggaatctctagaaagaagaacctcggccacagggcccatcctcccaccaggacatccttcatctgcagccagcgcccccgtctcatgtagtgggcctccaccgccccccccacccccagtcccacctccacccactggggctaccccacctcccccacccccactgccagccggaggagcccaggggtccagccacgacgagagctccatgtcaggactggccgctgccatagctggggccaagctgagaagagtccaacggccagaagacgcatctggaggctccagtcccagtgggacctcaaagtccgatgccaaccgggcaagcagcgggggtggcggaggaggcctcatggaggaaatgaacaaactgctggccaagaggagaaaagcagcctcccagtcagacaagccagccgagaagaaggaagatgaaagccaaatggaagatcctagtacctccccctctccggggacccgagcagccagccagccacctaactcctcagaggctggccggaagccctgggagcggagcaactcggtggagaagcctgtgtcctcgattctgtccagaaccccgtctgtggcaaagagccccgaagctaagagcccccttcagtcgcagcctcactctaggatgaagcctgctgggagcgtgaatgacatggccctggatgccttcgacttggaccggatgaagcaggagatcctagaggaggtggtgagagagctccacaaggtgaaggaggagatcatcgacgccatcaggcaggagctgagtgggatcagcaccacgtaaggggccggcctcgctgcgctgattcgtcgagcccatccggcgacagaggacagccagaagcccagccagccccagactccagtgcaccagagcacgcacaggagcctgggcgcgctgctgtgaaacgtcctgacctgtgatcacacatgacagtgaggaaaccaagtgcaactcctgggtttttttagattctgcctgacacggaacaccaggtctgctcgtcttttttgtgttttatatttgcttatttaaggtacatttctttgggtttctagagacgcccctaagtcacctgcttcattagacggtttccaggttttctcccaggtgacgctgttagcgcctcagctggcggtgacagccggcccagcgtggcgccaccacacaccgcagagctgtccaggcacagctccgtccccagcgctcatggtgttgaaactgtctgtcatgcaccacggtgtctgtgtccacacagtaataaacggtttactgtccgcaaaaaaaaaaaa

SEQ ID NO: 4264 - DNA, 4420 bp, Homo Sapiens
  NM_016338
agttttcgcgcgtccgcgtcgtttggagctgcgacgccaaacatggcgtgttcctagaagccgctttcggcatcagtaggcggcggcgtggggtctggcagcgtggggagagggaccaaccgacgccacttcgtgttgggaagtgggagcgggagggccgggcaattcccgaccgaaccaaacggtttccatggatctcaatagtgccagcactgttgttcttcaggtgttaacacaggccaccagtcaggatactgctgtgttaaaaccagctgaggagcagttgaagcagtgggagacacagccaggtttctattcagtgttgctgaatattttcaccaaccacactttggatataaatgtaaggtggcttgctgtactgtattttaaacatggaattgatcgctactggagacgtgtagcacctcatgctctctcagaggaggagaaaactactctgcgtgcagggctcatcaccaacttcaatgaaccaataaaccagattgcaactcagattgcagtgctcattgcaaaagttgctagattggattgtcccagacagtggcctgaactaattcccactcttatagagtctgttaaagtccaggatgatcttcgacagcacagagcattacttaccttctatcatgttaccaagacactggcatctaaacgacttgctgctgatagaaaactattttatgatttagcttctggaatttataattttgcctgctctctgtggaatcaccacacagacacattcctgcaagaagtttcttctggcaatgaagctgcaattttgagttcactagaacgaacactgctatcattgaaagtgctgcgtaagttaactgttaatggatttgtggaacctcataagaatatggaggtgatgggttttttacatggaatatttgaacgtctaaaacagtttctggaatgcagtagaagtataggtacagataatgtgtgtagagatagactggaaaagaccatcattctttttactaaagtgcttttggacttcttggatcagcatcctttttcatttactcctctaattcagagatcactggaattttctgtaagctatgtttttacagaagttggtgaaggcgttacatttgaacgattcattgtccaatgtatgaatcttattaagatgattgtcaaaaattatgcttataagccatccaaaaattttgaagatagcagccctgaaactcttgaagcccataagattaagatggcattcttcacatatcctactttgacagagatatgtagaagattagtctctcattatttcctattaactgaagaagaactgacaatgtgggaagaagacccagaaggctttacagtggaagaaacaggaggagattcttggaaatatagtttgaggccatgcactgaagtattatttatagatatattccatgaatataatcagactcttactcctgtacttctagaaatgatgcaaacacttcaaggacccacaaatgtggaagatatgaatgcactgttaatcaaagatgctgtgtataatgctgttggattagctgcttatgagctctttgacagtgttgattttgatcagtggtttaaaaaccagcttcttccagaattacaagtcattcacaataggtataagccattgcgacgcagggtgatttggctcatcggtcagtggatttctgtgaaattcaagtctgacttaagacccatgctttatgaagcaatctgtaacttgcttcaagatcaagatttagtggtccgtattgaaacagctacaactttgaagttaactgttgatgattttgaatttagaacagatcagtttctaccgtatttggaaaccatgttcacactactttttcagttactgcagcaagttacagaatgtgacacaaagatgcatgttttgcatgtcctttcttgtgtgatcgaaagagtcaacatgcagatacgaccatatgtgggatgtttggtacaatatttgcccctcctttggaagcagagtgaagaacacaatatgttgagatgtgctattttgacaacacttattcatcttgttcagggattaggagcagacagcaagaacctgtaccctttcctgctcccagttattcaactgagtacagatgtttcacagcctccacatgtttatcttctggaagatggtttagaattatggttagtaactttggaaaacagtccatgtattacaccagagttgcttcgtatatttcagaatatgtcaccacttcttgaactaagttcagaaaatcttagaacttgctttaagatcatcaatggttatatctttttatcatcaacagaatttttacagacatacgcagtaggtctatgccagtccttttgtgaacttttaaaggaaattactacagaaggtcaagttcaggtgctcaaggttgtggaaaatgcccttaaagtgaacccaatactaggtccacaaatgtttcaaccgattttaccctatgttttcaagggtattatagaaggggagaggtatcctgtagtgatgtccacgtatcttggagttatgggtcgagttctactacaaaacactagttttttttcttcactacttaatgagatggcccataaatttaatcaggagatggaccagcttttgggaaatatgattgaaatgtgggttgatcgaatggacaacattacccagcctgaaagaagaaaactttcagctttggctttgctctctcttctgccatctgataatagtgttatccaagataaattctgtgggattataaacatttcagtagaaggcctgcatgatgtcatgacggaagatcctgaaacaggaacttataaagactgtatgttgatgtctcatcttgaggaaccaaaagtaacagaagatgaagaaccacccacagaacaagataagaggaaaaagatgctggccctgaaggaccctgttcatacagtgtcactgcagcagttcatctacgagaagctcaaggcacagcaggagatgctaggagaacaaggtttccagtccctcatggaaacagtggatacggagattgtcacccagctacaggagtttttgcaaggattctaagagcacatgacatgtggctgcctcccctttcagaaacaagctgagtaacccagcctgccgtttgtatgtgagagcctgctgagatgaagaaatcacttcatgaaaataagcaaagaccacacattttttactacaaaatgtaaaggataaatgtaaatcctgcataactaaaatcacaaacctattcctcaaaagaatttaattttatatttatgagggggcccttcactaaaaagtacatgtaaaagtacatttgatgacaatagctgcttagtttcctgttaagagaagaaactttatcttttaattatgtgctcttaatatttgaagatgagagttaatacctgagatgtttttctgcaaccaaaattcattaaatttggctgccttatcctttttttaagctaatgaaactacaggtttgaaaaatgacaaagctgttcagatgatgctattaaagaaatgtgtgtactaagcaaaaatatataaatagtgacaaatacacattaccaagcttatcttgcaagggagttattttcatctaacatagaaagtgtgttttatcagacaaatgcttttattttcattctaataatttgatacagaaattagtaaaggcatttttttctttttttttccagtaaatacattgggtctataaatgtgcatttgtaagggccacaaaagtgaacgtgtggtactgtagtaccacgtgggagacctctggttatggtttagtcctagttcctttgttactcctgtgagcaccgagaagaactgggcgactcccagtcccacctgtgctgtgacagtcccacgtggctatgacagactgtttagtacttacccttctcaggttcctcagtgcaggggtgcatcagggcctcaataataggggtatacctgggaggatccagcagtaatccccagggtactaggattactagtactctgatggaactagtcttccttccttattcctcgaacatgcagtacataaaaaggggaaaaggagaaaaaaaaagccttactttgttttacttgccatttattgtaaggaaactttaaagcattttttaggaaatactcaaaagcaaggttggaaaatgttttatctttctatagaaagttgggtacagtatgtaactgcgggaaacccactgcccctttgtaagctgtggaacccaaactgtatggggatatttgatgttttcagaaagaggaagaaaatatggtccaaattaaattttccaaagatacctcaccttggaaaaaaaaaaaaaaaaaaaaaaaaaaaaaaaa

SEQ ID NO: 4265 - DNA, 3727 bp, Homo Sapiens
  NM_016339
gcggcggtccagccgggggacagcggtcgttgcagcggcgtcagagcgtgtctcgcctgctgctccccgctttcctccgggagccccccgccgagccggggctggagccgccccctgagaggaaggaggagagccggcgggggtcgcggaggagccgggcagcggggggccctgctggctgcagctggaggaggtgccggggcccgggcctctcgggggaggggggcccctgcgctccccttcctcctactcatctgacgagctgtccccaggcgagcccttgacttcgccgccctgggcccctctgggcgcccccgagcggcccgagcatcttctgaaccgggttctggagcggcttgctggaggggctaccagggacagcgccgcctcagatatcctgctggatgacattgtccttacccattctctcttcctcccgacggagaaatttctgcaggagctacaccagtactttgttcgggcaggaggcatggagggccctgaagggctgggccggaagcaagcctgtctagccatgcttctccatttcttggacacctaccaggggctgcttcaagaggaagagggggccggccacatcatcaaggatctatacctgctaattatgaaggacgagtccctttaccagggcctccgagaggacactctgaggctgcaccagctggtggagacggtggaactaaagattccagaggagaaccagccacccagcaagcaggtgaagccactcttccgccacttccgccggatagactcctgtctgcagacccgggtggccttccggggctctgatgagatcttctgccgtgtatacatgcctgaccactcttatgtgaccatacgcagccgcctttcagcatctgtgcaggacattctgggctctgtgacggagaaacttcaatattcagaggagcccgcggggcgtgaggattccctcatcctggtagctgtgtcctcctctggagagaaggtccttctccagcccactgaggactgtgttttcaccgcactgggcatcaacagccacctgtttgcctgtactcgggacagctatgaggctctggtgcccctccccgaggagatccaggtctcccctggagacacagagatccaccgagtggagcctgaggacgttgccaaccacctaactgccttccactgggagctgttccgatgtgtgcatgagctggagttcgtggactacgtgttccacggggagcgcggccgccgggagacggccaacttggagctgctgctgcagcgctgcagcgaggtcacgcactgggtggccaccgaagtgctgctctgcgaggccccgggcaagcgcgcgcagctgctcaagaagttcatcaagatcgcggccctctgcaagcagaaccaggacctgctgtctttctacgccgtggtcatggggctggacaacgccgctgtcagccgccttcgactcacctgggagaagctgccagggaaattcaagaacttgtttcgcaaatttgagaacctgacggacccctgcaggaaccacaaaagctaccgagaagtgatctccaaaatgaagccccctgtgattcccttcgtgcctctgatcctcaaagacctgactttcctgcacgaagggagtaagacccttgtagatggtttggtgaacatcgagaagctgcattcagtggccgaaaaagtgaggacaatccgcaaataccggagccggcccctttgcctggacatggaggcatcccccaatcacctgcagaccaaggcctatgtgcgccagtttcaggtcatcgacaaccagaacctcctcttcgagctctcctacaagctggaggcaaacagtcagtgagagtggaggctccagtcagacccgccagatccttgggcacctggcactcaagcactttgcacgatgtctcaaccaacatctgacatctttcccgtggagcaacttcctgctccacgggaaagaggtcgatggatttacccctggacccataagtctgttcatcctgctgaagtcccctccccattgctccttcaagccaaaactacactttgctggttcctgtcccctctgagaaaggggatagaaagctccttcctctatgtcctcccatcgagatctgttctggggatggagcttccaacttcctcttgcagcaggaaagaatgctgctcacccttctgtcttgcagagtgggattgtgggagggattggcagccttcttctccaccacctgtccagcttcttcctggtcagggctgggacccccaggaatattatgttgccgtgtgtgtgtgtgtgtgtgtgtgtgtgtgtgtgtgtgtgtgtgtgtgtgtgtgtgtgtcttcttttagggagcaggagtgcatctggtaattgagggtggatgttgtgtgtgctggggaggggtccttctgtttggtgctacccttgtctactctgcccctggatggtgcggggtgctttctccacccccacactccctgctcagctcctcgtgctgccctgcatgcccaggcttgtgagccaagctgctttttggggcagggagtagcagcaggtgggaggggttacccatcagcccttgcaagtcccccactcaggcctctggaaggtccagggatgggctctgatgagagggtaaaagatgctcagggaaacacaggcctcagctgcctagaggaccctccccctgccttgcagtgggctcgggtagagcagtatcaggagctagggttgtctgctgcccacactcctgctttttgggatatctaactgctaaggagggagttgacatcccccttctggctcatgtgtctgacaccaacaacatggtctctgtccctctctctttgactctccctttgtcctccccatagagctggggtggggtggatccctatacctggggcaggcagccccaaagtgggggagggggatggcagagactgtaaaggcgccactggactctggcaaggcctttattacctttactcccctccctctcccatcaccagcctcaaggcctgaggggtgcaggggctcctggcagctactgggtgaggtttcctggcacagactcacccttctttctggcaccacctctttcccttttgaagagacagcaacagccgtagcaaaagcagctgctgctcctgctatgagggtgtatatattttttacccaaagctctggaattgtacatttattttttaaaactcaaagagggaaagagccttgtatcatatgtgaacattgtatcataggtaatgttgtacagacccttttatacagtgatctgtcttgttcctgcagcaaaaatcctctatggacataggaggtgctgtgtcccatgccctcttgccctgacagtgtcccatgggcccccttctgctccctgccccctccctgctactgctgatgcactctcctctccctgcagcccctggcttcccagccttcctcctgaccccttccaacagccttggaactccagctgccaccaccctctgggtcggacactgggacccactggcccagtcttggctgctgcttacccctagccttgatgcctgcccagggacccccagccccctcccgttgccctgcagctttaacagagtgaaccatgtgtattgtacaggcgcggttgtcattgcagaaaccgctgggtggagaagaagccgataaagtctatgaatcaacctg

SEQ ID NO: 4266 - DNA, 8371 bp, Homo Sapiens
  NM_016340
cccgcgcagacttgtctccggccagtcgcgcgtgggtagaggccttaggcgggcgttgcgaagggttgtttgctagagttcggaccttgttacggcgcgaagttccctccttggggcgggggaaaggtaccgcacccgctacctagtgtgaatgaactgtggcgtgggctgctaagggcaggctgcggagtacccgggccgtggccatgaactcacccgtggaccctggcgctaggcaggcgttgaggaagaagccacccgagcggactcccgaggacttaaatactatttattcttatcttcatggaatggaaatattatcaaatctcagggaacatcagcttagattaatgtctgcaagagcacgctatgagagatacagtggcaatcaggttctcttttgttcagaaacgattgccagatgttggtatatcctactttctggatctgtgcttgtgaaaggctccatggtcttgcctccttgcagttttggtaagcagtttggaggaaaaagaggatgtgattgtcttgtattagagccttcagaaatgattgtggtagagaatgccaaagataatgaagatagtattctacaaagagaaattcctgccagacaatcccgaagaagatttcggaaaattaactataaaggagagcgccaaaccattactgatgatgtggaggttaacagctatctttctcttccagctgatcttaccaagatgcatctcacagaaaaccctcatccacaggtgactcatgtgtcttctagtcagtctggttgtagcattgccagtgactctggaagcagcagtttatctgatatctatcaggctacggagagtgaggtaggagatgtagatttgacacgtcttccagaaggacctgttgattctgaggatgacgaagaggaagatgaagagattgatcgaacagatccattgcaggggcgagatcttgttcgagaatgtcttgaaaaagaacctgcagacaaaactgatgatgacattgaacaattgctggagtttatgcaccagctccctgcatttgcaaacatgaccatgtctgtaaggagagaactctgctcagtgatgatttttgaagtggtagagcaggctggagctattattcttgaagatgggcaagagcttgactcatggtatgttattttaaacggcactgtggaaatcagtcatccagatggaaaagttgaaaatttgtttatgggaaatagttttggaattactcccactctggataagcagtacatgcatggaattgtcaggactaaagtagatgattgtcagtttgtctgcatagcccagcaagattattggagaattttaaaccatgtggaaaaaaatacccataaagttgaggaagagggagaaattgttatggtacatgagcatcgggaactagaccggagtggaaccaggaaaggacacattgtgatcaaggcaacacctgagcgtctcataatgcatttaatagaagaacattccatcgtggatccaacttatatagaagattttctattaacttacaggacatttcttgaaagtcctttggatgttgggatcaaactattggaatggtttaagatcgacagcttaagagataaggtgacacggattgtattattatgggtaaataatcattttaatgattttgaaggtgaccctgctatgactcgatttctagaggaatttgaaaaaaatctggaagatacaaagatgaatggtcatctccggttattgaatattgcctgtgctgcaaaggctaagtggagacaggttgtgctgcaaaaggcttcccgcgagtcccctctacaattcagccttaatggagggagtgagaagggatttggtatttttgttgaaggagtagaacctggtagcaaagctgctgattcaggactgaaacgtggtgatcagattatggaagtaaatggacaaaactttgagaatattacatttatgaaagccgttgaaattttgaggaataatactcatcttgcacttactgtgaagaccaacatttttgtgttcaaagagttactttttaggactgaacaagagaaatctggtgttcctcatattcccaaaattgctgaaaaaaaaagtaatcgccattctatccagcatgtgccaggagatattgaacagacatcacaggagaaaggaagtaagaaagttaaagcaaatactgtttcaggtggaagaaacaaaatcaggaagattttggataaaacacgatttagtatcttgcctccaaagctatttagtgatggaggcctaagccaatcacaagatgacagcattgtgggaacaaggcactgtaggcatagtctggctataatgcccatccctggaacactctcatccagcagccctgatctcctgcagcctaccaccagtatgttggatttttccaatccttcagatatccctgatcaagttataagagttttcaaagtggatcagcaaagttgctacattatcatcagtaaagacaccacagctaaagaagtagtttttcatgctgttcatgaatttggtttgaccggtgcatccgacacatattctctctgtgaagtttctgttactcctgagggtgtcataaaacagagaagacttccagatcagttctccaaattagctgatagaattcaactcaatggaaggtattacttaaaaaataacatggaaacagaaaccttatgttcagatgaagatgctcaagaactagttaaggaaagccagctatccatgctgcagctcagtaccattgaggtggccacccagctgtcaatgagggactttgatttgtttcgtaatattgaaccgactgagtacatcgatgacctttttaagttaaattccaaaacaggaaatactcatttgaagaggtttgaggacattgtaaaccaagagacattctgggttgcctcagaaattttaactgaagcaaatcagctcaaacgaatgaagattattaagcattttattaaaattgcacttcattgtcgagaatgtaagaacttcaattccatgtttgcaataataagtggcttgaacctggcatctgtagcaagactcagaggaacttgggaaaagttaccaagcaaatacgagaaacatcttcaagatctacaagacatttttgatccatctagaaacatggcaaagtatagaaatattcttagtagtcaaagtatgcagcctccaattattccactcttccctgttgtcaagaaagatatgacatttctacatgaaggaaatgactccaaagtagatggtttagtaaactttgagaagttaagaatgatttccaaggaaatccgccaagttgttcgaatgacttctgctaacatggacccagctatgatgtttcgacagaggtcactgagtcaaggaagcacaaattcaaacatgctggatgttcagggaggtgctcacaaaaaaagggcacgccgcagctctctgcttaatgccaagaagctatatgaggatgcccaaatggcaaggaaggtgaagcagtatctttccagtctcgatgtagagacagatgaggagaagttccagatgatgtcattacagtgggagcctgcatatggtaccttgaccaagaatttaagtgagaaaagatcagccaaatcatctgaaatgtctccagtgcctatgaggtcagctggccaaacaactaaagcccacttgcatcaaccccacagagtaagccaggtgcttcaggtgccagctgttaatttgcaccccatcaggaagaagggacaaacaaaagaccctgcactgaatacaagtttacctcagaaagttttaggaacaactgaagaaataagtggtaagaagcatacagaagacactatttctgtggcgtcatctttacattctagtcctcctgcatctcctcaaggctcccctcacaaaggttacacacttattccatcagctaaatctgacaacttgtctgactccagccatagtgagatttcttcacggtccagcatcgtgagcaattgttctgttgactccatgtctgcagctctacaggatgaacggtgttcctctcaggccctggcagtccctgaatccactggggcattggaaaagacagagcacgcttcagggataggagatcatagtcaacatggccctgggtggacactcttgaagccatctctaatcaagtgtttagctgtctcatcgtctgtgagcaatgaagagatttctcaagagcatatcattatagaagcagctgacagtggtcgtggaagttggacttcgtgttcaagcagctcccatgacaacttccaaagccttccaaacccaaaaagctgggattttttgaactcttacagacatacccatttggatgaccccattgctgaagttgaacccactgactctgagccctattcctgttctaaaagctgctctagaacttgtgggcagtgtaaaggaagcctagagagaaagagttggacctcctccagttctctgtctgacacgtatgaaccaaactatgggacagttaaacagagagtattggagagcaccccagctgagtcatctgaaggcttggaccccaaggatgccactgacccagtttataaaactgtcacttcaagtacagaaaagggcttgattgtgtactgtgtcacctcacccaagaaggacgataggtatagggagccacctcccactcctccaggatatttggggatttctttagcggacctaaaggaaggaccccacacacacctaaaacctccagattatagtgtggcagtgcagaggtcaaagatgatgcataacagcctctctagactgccaccagcttctctcagtagcaacctcgtggcctgtgttccatcgaagattgtaactcagcctcagaggcataatttgcagccattccatcctaaactaggagatgtgactgatgcagatagcgaagcagatgaaaatgaacaagtttcagcagtctagcctttggatgacctatttgaaaaccactgaaagtcgtggaggaatgggcaagaaccacctcatgattctgcaggccattgctaacgaacagctcattgctacaaccagtccagaggttttattccctctactccgagcaatgaaatagacctgagttatgcttcctttcatttaatttctgcagataaatagtttcctgagcaatggatgctatgcctggataccagtctccactttgcacgccggaactgccttgggaccacagttacagaaaaaatgtaaactcagagtgatccttgtgtatattgctatagatttttctttaacaagctattttaaagataatggcattattatttccaagccatagcttgggctgaaggacaaattgaaattgtctgccaataccaaggatattcttgtatatttgaaaaataacttattatttgaattgttgtggttttgtttgtatttgagagctcttgttagctgatattcatgtttgaggtcataaaattgtctctggtctgaccaaacagaagtcatctttacagaggtgatatgcttgatctacacagagatgtgacttgatctgtagcaccaatgcaatgtaggtctcagtttgagagaaataggaagccctttgcagttgaggtgttaggaacctgctggtcatggtgtggaaggccaaatgaagctgccacagggtttcttgtcagtcctttgggaaatgggagggagtagtttggggaggagggtgggaaccctaatttccacagaatgaaattttgatgttaaatgacatgtatacaaattcttccttaagtgaaagttatgctgcatcgaattgtaactgaaagtatagatccaacaaatagagactgggttctagagagttctggtctatagaaacccaaaactaaaatctctcataactcaagtatggaatactttttttaaagaaattcttatcatgggtgttgtaataatgaagacgaatttgactttatgcagtgttctgcagcatgcctcccccacatctcatagcaccaggttgtgtctgacctgacataccctgcagctctcagctggctgcagtaacattttgtgggagaaagaggagctggagttacagaaatgattgtctcttggttctcagtttttagcccttgagaggacatacttttccagcctcatgggtatggcactcttaattaaaatttcagtgactgtttactggatgaggcagatttttcacatttttgcaaattaaatatattttatatatattaagtttaattttttcagtttttttaatgtaaaagcaagtgaaattttaataaacttctgtaattaccaaaaaaaaaaaaaaaaaaaaagccaaagccattaacgtgcactacccagatcaacttggagccaaaaggggtttacttctgaatggctgtccgtatgtgtccacataggatttagttggtttgtggcctcctttatagaaatgtgttgtctttccctagctgtctctgctgtctgtcttcctgcatatcccccttcattttaaaatcatgaatcagttgtaagtggtaaatggtagtagttcatctttcccatcaacatgattgtctctttattttaggaataatagcatttcaaaaattcctgtggtaaagaaacattaatctgaaacttaagccttagaaattaatcgcaggtatgatagaatgaggcttggtggttccatagctttcttggtcctttgaaatgggaaataacctgaaccaaaaatcctagtttgaaagttacacttcagtgatttggcctataaacagtggtcctatgattatacattttttccttcactgatttgcataattttgttttcatggccacagcaaaacaatgtgaaatatatttttgctatacccactttttttatcaaattcagatgtctactctcaccattttatattcatttccccagaaaaatgtgctgttttcataatgtctttatttagcaggtctttcaaaccaaatggaagccttacctgtctttgtccttaatagtgtaaatatcttgcacagagtgttgaggcctatggttttggacttgcaccttacagctgcctttgttttatctatctagctttaactgtgagtgttcagatcagctgatcacattgatcaggagccaaagccaaatgctttgtagtttgttatgtatgtatcccttaaaaaatcatgaggttttgatttttatattttaactaagggtacattcctgccttctcttagtttgtcatatgactagaacaagagaagtcttaagctgcatttactccaattccagatctccatttgtttttgttttataaatttataatcttaatgaagagactagtgccctctcttcctgccacaactctcaatctgccaagactgttgaagcagttaacgctcagtgcaaacttttgccaaatagtaagtttcaacaaaatatctttatagtgaaagattttgagaattagtaaatccagtacatgattccataaaagcttattaaagttaataattctaatttactccaaatgattactttcaatatgatctttggggagaaaaagcctttagtgaattttcttgagggtgataaatcacatcattgcgatctatatcacctccttgagaatctctcccaggctgaaaatgtgatggtaatcatgggtgtttttaagaacaaatctaatttttatcaagtgttctttcctctacaaaaaaggaaggaggagaaaaagcttccttaaaactgattattttgattcaattttaagtttctaaaaaaggtgatattaaagtatatgtattccttcagcattaccttaaaggctagaaaaacgggataaatcttcagaaaagtgtcaaaagtgtcacagtacatgttcaaatttaaacttgaatcctggttcatctttgacttttgttgtgcatttttaatgcttctttatttttgatacacagaatgcagttgaacttgatcttttaaaattgagacatgtaagctaatcagcaaaagacagaaacaaaactgcacatctgtaataatcagatagcaattctactgcacaattcattgattgtaaggtatcctgtaacaagcaatgtttgtctcctattttttgatacctcttaaacttatgtcttttagaaagacagtgcctctgtatgctttttgtatttttactgagtgtaaatatttgttatatttttggttaagagaatgtaaaaataccatttattattatcatatctactaatacattggtggaatcaataaagaatctacattaaaaaaaaaaaaaaaa

SEQ ID NO: 4267 - DNA, 10316 bp, Homo Sapiens
  NM_016343
gagaccagaagcgggcgaattgggcaccggtggcggctgcgggcagtttgaattagactctgggctccagcccgccgaagccgcgccagaactgtactctccgagaggtcgttttcccgtccccgagagcaagtttatttacaaatgttggagtaataaagaaggcagaacaaaatgagctgggctttggaagaatggaaagaagggctgcctacaagagctcttcagaaaattcaagagcttgaaggacagcttgacaaactgaagaaggaaaagcagcaaaggcagtttcagcttgacagtctcgaggctgcgctgcagaagcaaaaacagaaggttgaaaatgaaaaaaccgagggtacaaacctgaaaagggagaatcaaagattgatggaaatatgtgaaagtctggagaaaactaagcagaagatttctcatgaacttcaagtcaaggagtcacaagtgaatttccaggaaggacaactgaattcaggcaaaaaacaaatagaaaaactggaacaggaacttaaaaggtgtaaatctgagcttgaaagaagccaacaagctgcgcagtctgcagatgtctctctgaatccatgcaatacaccacaaaaaatttttacaactccactaacaccaagtcaatattatagtggttccaagtatgaagatctaaaagaaaaatataataaagaggttgaagaacgaaaaagattagaggcagaggttaaagccttgcaggctaaaaaagcaagccagactcttccacaagccaccatgaatcaccgcgacattgcccggcatcaggcttcatcatctgtgttctcatggcagcaagagaagaccccaagtcatctttcatctaattctcaaagaactccaattaggagagatttctctgcatcttacttttctggggaacaagaggtgactccaagtcgatcaactttgcaaatagggaaaagagatgctaatagcagtttctttgacaattctagcagtcctcatcttttggatcaattaaaagcgcagaatcaagagctaagaaacaagattaatgagttggaactacgcctgcaaggacatgaaaaagaaatgaaaggccaagtgaataagtttcaagaactccaactccaactggagaaagcaaaagtggaattaattgaaaaagagaaagttttgaacaaatgtagggatgaactagtgagaacaacagcacaatacgaccaggcgtcaaccaagtatactgcattggaacaaaaactgaaaaaattgacggaagatttgagttgtcagcgacaaaatgcagaaagtgccagatgttctctggaacagaaaattaaggaaaaagaaaaggagtttcaagaggagctctcccgtcaacagcgttctttccaaacactggaccaggagtgcatccagatgaaggccagactcacccaggagttacagcaagccaagaatatgcacaacgtcctgcaggctgaactggataaactcacatcagtaaagcaacagctagaaaacaatttggaagagtttaagcaaaagttgtgcagagctgaacaggcgttccaggcgagtcagatcaaggagaatgagctgaggagaagcatggaggaaatgaagaaggaaaacaacctccttaagagtcactctgagcaaaaggccagagaagtctgccacctggaggcagaactcaagaacatcaaacagtgtttaaatcagagccagaattttgcagaagaaatgaaagcgaagaatacctctcaggaaaccatgttaagagatcttcaagaaaaaataaatcagcaagaaaactccttgactttagaaaaactgaagcttgctgtggctgatctggaaaagcagcgagattgttctcaagaccttttgaagaaaagagaacatcacattgaacaacttaatgataagttaagcaagacagagaaagagtccaaagccttgctgagtgctttagagttaaaaaagaaagaatatgaagaattgaaagaagagaaaactctgttttcttgttggaaaagtgaaaacgaaaaacttttaactcagatggaatcagaaaaggaaaacttgcagagtaaaattaatcacttggaaacttgtctgaagacacagcaaataaaaagtcatgaatacaacgagagagtaagaacgctggagatggacagagaaaacctaagtgtcgagatcagaaaccttcacaacgtgttagacagtaagtcagtggaggtagagacccagaaactagcttatatggagctacagcagaaagctgagttctcagatcagaaacatcagaaggaaatagaaaatatgtgtttgaagacttctcagcttactgggcaagttgaagatctagaacacaagcttcagttactgtcaaatgaaataatggacaaagaccggtgttaccaagacttgcatgccgaatatgagagcctcagggatctgctaaaatccaaagatgcttctctggtgacaaatgaagatcatcagagaagtcttttggcttttgatcagcagcctgccatgcatcattcctttgcaaatataattggagaacaaggaagcatgccttcagagaggagtgaatgtcgtttagaagcagaccaaagtccgaaaaattctgccatcctacaaaatagagttgattcacttgaattttcattagagtctcaaaaacagatgaactcagacctgcaaaagcagtgtgaagagttggtgcaaatcaaaggagaaatagaagaaaatctcatgaaagcagaacagatgcatcaaagttttgtggctgaaacaagtcagcgcattagtaagttacaggaagacacttctgctcaccagaatgttgttgctgaaaccttaagtgcccttgagaacaaggaaaaagagctgcaacttttaaatgataaggtagaaactgagcaggcagagattcaagaattaaaaaagagcaaccatctacttgaagactctctaaaggagctacaacttttatccgaaaccctaagcttggagaagaaagaaatgagttccatcatttctctaaataaaagggaaattgaagagctgacccaagagaatgggactcttaaggaaattaatgcatccttaaatcaagagaagatgaacttaatccagaaaagtgagagttttgcaaactatatagatgaaagggagaaaagcatttcagagttatctgatcagtacaagcaagaaaaacttattttactacaaagatgtgaagaaaccggaaatgcatatgaggatcttagtcaaaaatacaaagcagcacaggaaaagaattctaaattagaatgcttgctaaatgaatgcactagtctttgtgaaaataggaaaaatgagttggaacagctaaaggaagcatttgcaaaggaacaccaagaattcttaacaaaattagcatttgctgaagaaagaaatcagaatctgatgctagagttggagacagtgcagcaagctctgagatctgagatgacagataaccaaaacaattctaagagcgaggctggtggtttaaagcaagaaatcatgactttaaaggaagaacaaaacaaaatgcaaaaggaagttaatgacttattacaagagaatgaacagctgatgaaggtaatgaagactaaacatgaatgtcaaaatctagaatcagaaccaattaggaactctgtgaaagaaagagagagtgagagaaatcaatgtaattttaaacctcagatggatcttgaagttaaagaaatttctctagatagttataatgcgcagttggtgcaattagaagctatgctaagaaataaggaattaaaacttcaggaaagtgagaaggagaaggagtgcctgcagcatgaattacagacaattagaggagatcttgaaaccagcaatttgcaagacatgcagtcacaagaaattagtggccttaaagactgtgaaatagatgcggaagaaaagtatatttcagggcctcatgagttgtcaacaagtcaaaacgacaatgcacaccttcagtgctctctgcaaacaacaatgaacaagctgaatgagctagagaaaatatgtgaaatactgcaggctgaaaagtatgaactcgtaactgagctgaatgattcaaggtcagaatgtatcacagcaactaggaaaatggcagaagaggtagggaaactactaaatgaagttaaaatattaaatgatgacagtggtcttctccatggtgagttagtggaagacataccaggaggtgaatttggtgaacaaccaaatgaacagcaccctgtgtctttggctccattggacgagagtaattcctacgagcacttgacattgtcagacaaagaagttcaaatgcactttgccgaattgcaagagaaattcttatctttacaaagtgaacacaaaattttacatgatcagcactgtcagatgagctctaaaatgtcagagctgcagacctatgttgactcattaaaggccgaaaatttggtcttgtcaacgaatctgagaaactttcaaggtgacttggtgaaggagatgcagctgggcttggaggaggggctcgttccatccctgtcatcctcttgtgtgcctgacagctctagtcttagcagtttgggagactcctccttttacagagctcttttagaacagacaggagatatgtctcttttgagtaatttagaaggggctgtttcagcaaaccagtgcagtgtagatgaagtattttgcagcagtctgcaggaggagaatctgaccaggaaagaaaccccttcggccccagcgaagggtgttgaagagcttgagtccctctgtgaggtgtaccggcagtccctcgagaagctagaagagaaaatggaaagtcaagggattatgaaaaataaggaaattcaagagctcgagcagttattaagttctgaaaggcaagagcttgactgccttaggaagcagtatttgtcagaaaatgaacagtggcaacagaagctgacaagcgtgactctggagatggagtccaagttggcggcagaaaagaaacagacggaacaactgtcacttgagctggaagtagcacgactccagctacaaggtctggacttaagttctcggtctttgcttggcatcgacacagaagatgctattcaaggccgaaatgagagctgtgacatatcaaaagaacatacttcagaaactacagaaagaacaccaaagcatgatgttcatcagatttgtgataaagatgctcagcaggacctcaatctagacattgagaaaataactgagactggtgcagtgaaacccacaggagagtgctctggggaacagtccccagataccaattatgagcctccaggggaagataaaacccagggctcttcagaatgcatttctgaattgtcattttctggtcctaatgctttggtacctatggatttcctggggaatcaggaagatatccataatcttcaactgcgggtaaaagagacatcaaatgagaatttgagattacttcatgtgatagaggaccgtgacagaaaagttgaaagtttgctaaatgaaatgaaagaattagactcaaaactccatttacaggaggtacaactaatgaccaaaattgaagcatgcatagaattggaaaaaatagttggggaacttaagaaagaaaactcagatttaagtgaaaaattggaatatttttcttgtgatcaccaggagttactccagagagtagaaacttctgaaggcctcaattctgatttagaaatgcatgcagataaatcatcacgtgaagatattggagataatgtggccaaggtgaatgacagctggaaggagagatttcttgatgtggaaaatgagctgagtaggatcagatcggagaaagctagcattgagcatgaagccctctacctggaggctgacttagaggtagttcaaacagagaagctatgtttagaaaaagacaatgaaaataagcagaaggttattgtctgccttgaagaagaactctcagtggtcacaagtgagagaaaccagcttcgtggagaattagatactatgtcaaaaaaaaccacggcactggatcagttgtctgaaaaaatgaaggagaaaacacaagagcttgagtctcatcaaagtgagtgtctccattgcattcaggtggcagaggcagaggtgaaggaaaagacggaactccttcagactttgtcctctgatgtgagtgagctgttaaaagacaaaactcatctccaggaaaagctgcagagtttggaaaaggactcacaggcactgtctttgacaaaatgtgagctggaaaaccaaattgcacaactgaataaagagaaagaattgcttgtcaaggaatctgaaagcctgcaggccagactgagtgaatcagattatgaaaagctgaatgtctccaaggccttggaggccgcactggtggagaaaggtgagttcgcattgaggctgagctcaacacaggaggaagtgcatcagctgagaagaggcatcgagaaactgagagttcgcattgaggccgatgaaaagaagcagctgcacatcgcagagaaactgaaagaacgcgagcgggagaatgattcacttaaggataaagttgagaaccttgaaagggaattgcagatgtcagaagaaaaccaggagctagtgattcttgatgccgagaattccaaagcagaagtagagactctaaaaacacaaatagaagagatggccagaagcctgaaagtttttgaattagaccttgtcacgttaaggtctgaaaaagaaaatctgacaaaacaaatacaagaaaaacaaggtcagttgtcagaactagacaagttactctcttcatttaaaagtctgttagaagaaaaggagcaagcagagatacagatcaaagaagaatctaaaactgcagtggagatgcttcagaatcagttaaaggagctaaatgaggcagtagcagccttgtgtggtgaccaagaaattatgaaggccacagaacagagtctagacccaccaatagaggaagagcatcagctgagaaatagcattgaaaagctgagagcccgcctagaagctgatgaaaagaagcagctctgtgtcttacaacaactgaaggaaagtgagcatcatgcagatttacttaagggtagagtggagaaccttgaaagagagctagagatagccaggacaaaccaagagcatgcagctcttgaggcagagaattccaaaggagaggtagagaccctaaaagcaaaaatagaagggatgacccaaagtctgagaggtctggaattagatgttgttactataaggtcagaaaaagaaaatctgacaaatgaattacaaaaagagcaagagcgaatatctgaattagaaataataaattcatcatttgaaaatattttgcaagaaaaagagcaagagaaagtacagatgaaagaaaaatcaagcactgccatggagatgcttcaaacacaattaaaagagctcaatgagagagtggcagccctgcataatgaccaagaagcctgtaaggccaaagagcagaatcttagtagtcaagtagagtgtcttgaacttgagaaggctcagttgctacaaggccttgatgaggccaaaaataattatattgttttgcaatcttcagtgaatggcctcattcaagaagtagaagatggcaagcagaaactggagaagaaggatgaagaaatcagtagactgaaaaatcaaattcaagaccaagagcagcttgtctctaaactgtcccaggtggaaggagagcaccaactttggaaggagcaaaacttagaactgagaaatctgacagtggaattggagcagaagatccaagtgctacaatccaaaaatgcctctttgcaggacacattagaagtgctgcagagttcttacaagaatctagagaatgagcttgaattgacaaaaatggacaaaatgtcctttgttgaaaaagtaaacaaaatgactgcaaaggaaactgagctgcagagggaaatgcatgagatggcacagaaaacagcagagctgcaagaagaactcagtggagagaaaaataggctagctggagagttgcagttactgttggaagaaataaagagcagcaaagatcaattgaaggagctcacactagaaaatagtgaattgaagaagagcctagattgcatgcacaaagaccaggtggaaaaggaagggaaagtgagagaggaaatagctgaatatcagctacggcttcatgaagctgaaaagaaacaccaggctttgcttttggacacaaacaaacagtatgaagtagaaatccagacataccgagagaaattgacttctaaagaagaatgtctcagttcacagaagctggagatagaccttttaaagtctagtaaagaagagctcaataattcattgaaagctactactcagattttggaagaattgaagaaaaccaagatggacaatctaaaatatgtaaatcagttgaagaaggaaaatgaacgtgcccaggggaaaatgaagttgttgatcaaatcctgtaaacagctggaagaggaaaaggagatactgcagaaagaactctctcaacttcaagctgcacaggagaagcagaaaacaggtactgttatggataccaaggtcgatgaattaacaactgagatcaaagaactgaaagaaactcttgaagaaaaaaccaaggaggcagatgaatacttggataagtactgttccttgcttataagccatgaaaagttagagaaagctaaagagatgttagagacacaagtggcccatctgtgttcacagcaatctaaacaagattcccgagggtctcctttgctaggtccagttgttccaggaccatctccaatcccttctgttactgaaaagaggttatcatctggccaaaataaagcttcaggcaagaggcaaagatccagtggaatatgggagaatggtagaggaccaacacctgctaccccagagagcttttctaaaaaaagcaagaaagcagtcatgagtggtattcaccctgcagaagacacggaaggtactgagtttgagccagagggacttccagaagttgtaaagaaagggtttgctgacatcccgacaggaaagactagcccatatatcctgcgaagaacaaccatggcaactcggaccagcccccgcctggctgcacagaagttagcgctatccccactgagtctcggcaaagaaaatcttgcagagtcctccaaaccaacagctggtggcagcagatcacaaaaggtcaaagttgctcagcggagcccagtagattcaggcaccatcctccgagaacccaccacgaaatccgtcccagtcaataatcttcctgagagaagtccgactgacagccccagagagggcctgagggtcaagcgaggccgacttgtccccagccccaaagctggactggagtccaacggcagtgagaactgtaaggtccagtgaaggcactttgtgtgtcagtacccctgggaggtgccagtcattgaatagataaggctgtgcctacaggacttctctttagtcagggcatgctttattagtgaggagaaaacaattccttagaagtcttaaatatattgtactctttagatctcccatgtgtaggtattgaaaaagtttggaagcactgatcacctgttagcattgccattcctctactgcaatgtaaatagtataaagctatgtatataaagctttttggtaatatgttacaattaaaatgacaagcactatatcacaatctctgtttgtatgtgggttttacactaaaaaaatgcaaaacacattttattcttctaattaacagctcctaggaaaatgtagacttttgctttatgatattctatctgtagtatgaggcatggaatagttttgtatcgggaatttctcagagctgagtaaaatgaaggaaaagcatgttatgtgtttttaaggaaaatgtgcacacatatacatgtaggagtgtttatctttctcttacaatctgttttagacatctttgcttatgaaacctgtacatatgtgtgtgtgggtatgtgtttatttccagtgagggctgcaggcttcctagaggtgtgctataccatgcgtctgtcgttgtgcttttttctgtttttagaccaattttttacagttctttggtaagcattgtcgtatctggtgatggattaacatatagcctttgttttctaataaaatagtcgccttcgttttctgtaaaaaaaaaaaaaaaaaaaaaa

SEQ ID NO: 4268 - DNA, 2796 bp, Homo Sapiens
  NM_016354
ctgcggcgggggcggccccagcggatgaatgaagcggcgcgtggctgccggggaggccagagcgtggagcgctgcgcggcgcggcggccgggccctcgagacggggacggacacaccagcccctcggataccacttggccactcccgctgaggccactcccactgcgtggctgaagcctcgaggtcaccaggcggaggcgcggagatgcccctgcatcagctgggggacaagccgctcaccttccccagccccaactcagccatggaaaacgggcttgaccacaccccacccagcaggagggcatccccgggcacacccctgagccccggctccctccgctccgctgcccatagccccctggacaccagcaagcagcccctctgccagctctgggccgagaagcatggcgcccgggggacccatgaggtgcggtacgtctcggccgggcagagcgtggcgtgcggctggtgggccttcgcaccgccgtgcctgcaggtcctcaacacgcccaagggcatcctgttcttcctgtgtgcggccgcattcctgcaggggatgactgtgaatggcttcatcaacacagtcatcacctccctggagcgccgctatgacctgcacagctaccagagcgggctcatcgccagctcctacgacattgccgcctgcctctgcctcaccttcgtcagctacttcgggggctcagggcacaagccgcgctggctgggctggggcgtgctgcttatgggcacggggtcgctggtgttcgcgctgccccacttcacggctggccgctatgaggtggagttggacgcgggtgtcaggacgtgccctgccaaccccggcgcggtgtgtgcggacagcacctcgggcctgtcccgctaccagctggtcttcatgctgggccagttcctgcatggcgtgggtgccacacccctctacacgctgggcgtcacctacctggatgagaacgtcaagtccagctgctcgcccgtctacattgccatcttctacacagcggccatcctgggcccagctgccggctacctgattggaggtgccctgctgaatatctacacggaaatgggccgacggacggagctgaccaccgagagcccactgtgggtcggcgcctggtgggtcggcttcctgggctctggggccgctgctttcttcaccgccgttcccatccttggttaccctcggcagctgccaggctcccagcgctacgcggtcatgagagcggcggaaatgcaccagttgaaggacagcagccgtggggaggcgagcaacccggactttgggaaaaccatcagagacctgcctctctccatctggctcctgctgaagaaccccacgttcatcctgctctgcctggccggggccaccgaggccactctcatcaccggcatgtccacgttcagccccaagttcttggagtcccagttcagcctgagtgcctcagaagctgccaccttgtttgggtacctggtggtgccagcgggtggtggcggcaccttcctgggcggcttctttgtgaacaagctcaggctccggggctccgcggtcatcaagttctgcctgttctgcaccgttgtcagcctgctgggcatcctcgtcttctcactgcactgccccagtgtgcccatggcgggcgtcacagccagctacggcgggagcctcctgcccgaaggccacctgaacctaacggctccctgcaacgctgcctgcagctgccagccagaacactacagccctgtgtgcggctcggacggcctcatgtacttctcactgtgccacgcagggtgccctgcagccacggagacgaatgtggacggccagaaggtgtaccgagactgtagctgtatccctcagaatctttcctctggttttggccatgccactgcagggaaatgcacttcaacttgtcagagaaagcccctccttctggttttcatattcgttgtaattttctttacattcctcagcagcattcctgcactaacggcaactctacgatgtgtccgtgaccctcagagatcctttgccctgggaatccagtggattgtagttagaatactagggggcatcccggggcccatcgccttcggctgggtgatcgacaaggcctgtctgctgtggcaggaccagtgtggccagcagggctcctgcttggtgtaccagaattcggccatgagccgctacatactcatcatggggctcctgtacaaggtgctgggcgtcctcttctttgccatagcctgcttcttatacaagcccctgtcggagtcttcagatggcctggaaacttgtctgcccagccagtcctcagcccctgacagtgccacagatagccagctccagagcagcgtctgaccaccgcccgcgcccacccggccacggcgggcactcagcatttcctgatgacagaacagtgccgttgggtgatgcaatcacacgggaacttctatttgacctgcaaccttctacttaacctgtggtttaaagtcggctgtgacctcctgtccccagagctgtacggccctgcagtgggtgggaggaacttgcataaatatatatttatggacacacagtttgcatcagaacgtgtttatagaatgtgttttatacccgatcgtgtgtggtgtgcgtgaggacaaactccgcaggggctgtgaatcccactgggagggcggtgggcctgcagcctgaggaaggcttgtgtgtcctcagttaaaactgtgcatatcgaaatatattttgttatttaagcctgcgaaaaaaaaaaaaaaaaaaaa

SEQ ID NO: 4269 - DNA, 1836 bp, Homo Sapiens
  NM_016355
acttccggagacctcacacaagatggcggcacccgaggaacacgattctccgaccgaagcgtcccagccgattgtggaagaggaggaaactaaaacatttaaagacctgggtgtgacagatgtgttgtgtgaagcttgtgaccagttgggatggacaaaacccaccaagatccagattgaagctattcctttggccttacaaggtcgtgatatcattgggcttgcagaaactggctctggaaagacaggcgcctttgctttgcccattctaaacgcactgctggagaccccgcagcgtttgtttgccctagttcttaccccgactcgggagctggcctttcagatctcagagcagtttgaagccctggggtcctctattggagtgcagagtgctgtgattgtaggtggaattgattcaatgtctcaatctttggcccttgcaaaaaaaccacatataataatagcaactcctggtcgactgattgaccacttggaaaatacgaaaggtttcaacttgagagctctcaaatacttggtcatggatgaagccgaccgaatactgaatatggattttgagacagaggttgacaagatcctcaaagtgattcctcgagatcggaaaacattcctcttctctgccaccatgaccaagaaggttcaaaaacttcagcgagcagctctgaagaatcctgtgaaatgtgccgtttcctctaaataccagacagttgaaaaattacagcaatattatatttttattccctctaaattcaaggatacctacctggtttatattctaaatgaattggctggaaactcctttatgatattctgcagcacctgtaataatacccagagaacagctttgctactgcgaaatcttggcttcactgccatccccctccatggacaaatgagtcagagtaagcgcctaggatcccttaataagtttaaggccaaggcccgttccattcttctagcaactgacgttgccagccgaggtttggacatacctcatgtagatgtggttgtcaactttgacattcctacccattccaaggattacatccatcgagtaggtcgaacagctagagctgggcgctccggaaaggctattacttttgtcacacagtatgatgtggaactcttccagcgcatagaacacttaattgggaagaaactaccaggttttccaacacaggatgatgaggttatgatgctgacagaacgcgtcgctgaagcccaaaggtttgcccgaatggagttaagggagcatggagaaaagaagaaacgctcgcgagaggatgctggagataatgatgacacagagggtgctattggtgtcaggaacaaggtggctggaggaaaaatgaagaagcggaaaggccgttaatcacttttatgaaggctcgagttctgctgttctgtaaaagagaattggagaatgaaacctgctccaacagagatcatgagactgaaattggtcagaattgtgtccagaatgtgctcagctaattcagtattcttccccattctgggttggagtttactgcagagtaattcttacagtgctgatgtcaagactgttactgttcttcgactttgattccttgctcatgacatgagtagggtgtgctcttctgtcacttcacacagaccttttgccttttttagctgcaagtcaaggactaggttgatgatgcccatgacctgtaattgtaaagaagcttggacatctgcaaatgatatttaaaccatcttggcttgtgctttattcaaactaatgtgaaacaataaatttaaatattatttttaaaagaaaaaaaaaaaaaaaaaaaa

SEQ ID NO: 4270 - DNA, 3745 bp, Homo Sapiens
  NM_016357
gtgcgcgcccccgcggcggtgggcggggtccggggcggggccgcaggagcagtaggtgttagcagcttggtcgcgacaggtgcgctaggtagagcgccgggacctgtgacagggctggtagcagcgcagaggaaaggcggcttttagccaggtatttcagtgtctgtagacaagatggaatcatctccatttaatagacggcaatggacctcactatcattgagggtaacagccaaagaactttctcttgtcaacaagaacaagtcatcggctattgtggaaatattctccaagtaccagaaagcagctgaagaaacaaacatggagaagaagagaagtaacaccgaaaatctctcccagcactttagaaaggggaccctgactgtgttaaagaagaagtgggagaacccagggctgggagcagagtctcacacagactctctacggaacagcagcactgagattaggcacagagcagaccatcctcctgctgaagtgacaagccacgctgcttctggagccaaagctgaccaagaagaacaaatccaccccagatctagactcaggtcacctcctgaagccctcgttcagggtcgatatccccacatcaaggacggtgaggatcttaaagaccactcaacagaaagtaaaaaaatggaaaattgtctaggagaatccaggcatgaagtagaaaaatcagaaatcagtgaaaacacagatgcttcgggcaaaatagagaaatataatgttccgctgaacaggcttaagatgatgtttgagaaaggtgaaccaactcaaactaagattctccgggcccaaagccgaagtgcaagtggaaggaagatctctgaaaacagctattctctagatgacctggaaataggcccaggtcagttgtcatcttctacatttgactcggagaaaaatgagagtagacgaaatctggaacttccacgcctctcagaaacctctataaaggatcgaatggccaagtaccaggcagctgtgtccaaacaaagcagctcaaccaactatacaaatgagctgaaagccagtggtggcgaaatcaaaattcataaaatggagcaaaaggagaatgtgcccccaggtcctgaggtctgcatcacccatcaggaaggggaaaagatttctgcaaatgagaatagcctggcagtccgttccacccctgccgaagatgactcccgtgactcccaggttaagagtgaggttcaacagcctgtccatcccaagccactaagtccagattccagagcctccagtctttctgaaagttctcctcccaaagcaatgaagaagtttcaggcacctgcaagagagacctgcgtggaatgtcagaagacagtctatccaatggagcgtctcttggccaaccagcaggtgtttcacatcagctgcttccgttgctcctattgcaacaacaaactcagtctaggaacatatgcatctttacatggaagaatctattgtaagcctcacttcaatcaactctttaaatctaagggcaactatgatgaaggctttgggcacagaccacacaaggatctatgggcaagcaaaaatgaaaacgaagagattttggagagaccagcccagcttgcaaatgcaagggagacccctcacagcccaggggtagaagatgcccctattgctaaggtgggtgtcctggctgcaagtatggaagccaaggcctcctctcagcaggagaaggaagacaagccagctgaaaccaagaagctgaggatcgcctggccaccccccactgaacttggaagttcaggaagtgccttggaggaagggatcaaaatgtcaaagcccaaatggcctcctgaagacgaaatcagcaagcccgaagttcctgaggatgtcgatctagatctgaagaagctaagacgatcttcttcactgaaggaaagaagccgcccattcactgtagcagcttcatttcaaagcacctctgtcaagagcccaaaaactgtgtccccacctatcaggaaaggctggagcatgtcagagcagagtgaagagtctgtgggtggaagagttgcagaaaggaaacaagtggaaaatgccaaggcttctaagaagaatgggaatgtgggaaaaacaacctggcaaaacaaagaatctaaaggagagacagggaagagaagtaaggaaggtcatagtttggagatggagaatgagaatcttgtagaaaatggtgcagactccgatgaagatgataacagcttcctcaaacaacaatctccacaagaacccaagtctctgaattggtcgagttttgtagacaacacctttgctgaagaattcactactcagaatcagaaatcccaggatgtggaactctgggagggagaagtggtcaaagagctctctgtggaagaacagataaagagaaatcggtattatgatgaggatgaggatgaagagtgacaaattgcaatgatgctgggccttaaattcatgttagtgttagcgagccactgccctttgtcaaaatgtgatgcacataagcaggtatcccagcatgaaatgtaatttacttggaagtaactttggaaaagaattccttcttaaaatcaaaaacaaaacaaaaaaacacaaaaaacacattctaaatactagagataactttacttaaattcttcattttagcagtgatgatatgcataagtgctgtaaggcttgtaactggggaaatattccacctgataatagcccagattctactgtattcccaaaaggcaatattaaggtagacagatgattagtagtatattgttacacactattttggaattagagaacatacagaaggaatttaggggcttaaacattacgactgaatgcactttagtataaagggcacagtttgtatatttttaaatgaataccaatttaattttttagtatttacctgttaagagattatttagtctttaaattttttaggttaattttcttgctgtgatatatatgaggaatttactactttatgtcctgctctctaaactacatcctgaactcgacgtcctgaggtataatacaacagagcactttttgaggcaattgaaaaaccaacctacactcttcggtgcttagagagatctgctgtctcccaaataagcttttgtatctgccagtgaatttactgtactccaaatgattgctttcttttctggtgatatctgtgcttctcataattactgaaagctgcaatattttagtaataccttcgggatcactgtcccccatcttccgtgttagagcaaagtgaagagtttaaaggaggaagaagaaagaactgtcttacaccacttgagctcagacctctaaaccctgtatttcccttatgatgtcccctttttgagacactaatttttaaatacttactagctctgaaatatattgatttttatcacagtattctcagggtgaaattaaaccaactataggcctttttcttgggatgattttctagtcttaaggtttggggacattataaacttgagtacatttgttgtacacagttgatattccaaattgtatggatgggagggagaggtgtcttaagctgtaggcttttctttgtactgcatttatagagatttagctttaatattttttagagatgtaaaacattctgctttcttagtcttacctagtctgaaacatttttattcaataaagattttaattaaaatttgaacttttcaaaaaaaaa

SEQ ID NO: 4271 - DNA, 1479 bp, Homo Sapiens
  NM_016360
gtgctacgccatcaagggcccccagtcccgggtgccgcggggacagtgtagggtcattagctgttgagccgccccgggcgggcccaagcctttggatctcaggtgaccggcacaggcggccgcggggtccggaactgcttgttccggcagtggaagagacgcgccggcgttggccgctgctgctagcagcttgaaccccagggtcgggaccgatgtcggcttgggctgctgccagcctaagcagggccgctgcccgatgcttgctggcacgaggccccggggtcagggcggctcctccgcgcgacccccggccctcccaccccgagccccggggctgcggtgccgctccgggcaggacgctgcactttaccgcggctgtccccgccgggcacaacaagtggtccaaagtcaggcacatcaagggtccgaaggacgtcgaaaggagtcgcatcttctccaaactctgtttgaacatccgcctggcagtgaaagaaggaggccccaaccctgagcacaacagcaacctggccaatatcttagaggtgtgtcgcagcaaacatatgcccaagtcaacgattgagacagcactgaaaatggagaaatccaaggacacttatttgctgtatgagggtcgaggccctggtggctcttctctgctcatcgaggcattatctaacagtagccacaagtgccaagcagacattagacatatcctgaataagaatggaggagtgatggctgtaggagctcgtcactcttttgacaaaaagggggtgattgtggttgaagtggaggacagagagaagaaggctgtgaacctagagcgtgccctggagatggcaatcgaagcaggagctgaggatgtcaaggaaactgaagatgaagaagaaaggaacgtttttaaatttatttgtgatgcctcttcactgcaccaagtgaggaagaagctggactccctgggcctgtgttctgtgtcctgtgcactagagttcatccccaactcaaaggtgcagctggctgagcccgacctggaacaggccgcacatctcattcaggctctcagcaaccacgaggatgtgattcacgtctatgataacattgaataaccaggctacatgtgcccccgggttccttcctagaaatgtggcagcccattccagcacacaggcttctgcagcaatctctgagggtaaagccggtgggaggctcagcaggccaggaggcccaaggacaggacttgcgaccttgaagccaaaggaatctcacttgtggggcctccttgtcagctctgctgctgtctcagagccatctggatgagtgtcccgacaccctctcggatgcagggcaggaccacccagctggtcagactctgatgttgggtagctggcctctgtggggattgtaagtgccctgaggcgctctgtactagaaactgctcttaataataacggtgattattggttgctgcaaaaaaaaaaa

SEQ ID NO: 4272 - DNA, 1832 bp, Homo Sapiens
  NM_016361
gtccctgagtaggtgaggaggtgggtaggagcttgcttatagaaaagtggaatcgagtagtccttgctggtggagccgctgccgccagggaactcagggccggctcctgttccttcaagagtgctggaggccaaacttgaaatacaagtttaatgttcctcgtcgggcaaaagataaggatccgatctcccccggcccggtgtgcagcaggagcgaccaaccccgacccgggttaaaactcccagggactcttcgctgctgccacctcttgttctctcccccgttcccactcggggtctccctcagggccgggaggcacagcggtccctgcttgctgaagggctggatgtacgcatccgcaggttcccgcggacttgggggcgcccgctgagccccggcgcccgcagaagacttgtgtttgcctcctgcagcctcaacccggagggcagcgagggcctaccaccatgatcactggtgtgttcagcatgcgcttgtggaccccagtgggcgtcctgacctcgctggcgtactgcctgcaccagcggcgggtggccctggccgagctgcaggaggccgatggccagtgtccggtcgaccgcagcctgctgaagttgaaaatggtgcaggtcgtgtttcgacacggggctcggagtcctctcaagccgctcccgctggaggagcaggtagagtggaacccccagctattagaggtcccaccccaaactcagtttgattacacagtcaccaatctagctggtggtccgaaaccatattctccttacgactctcaataccatgagaccaccctgaaggggggcatgtttgctgggcagctgaccaaggtgggcatgcagcaaatgtttgccttgggagagagactgaggaagaactatgtggaagacattccctttctttcaccaaccttcaacccacaggaggtctttattcgttccactaacatttttcggaatctggagtccacccgttgtttgctggctgggcttttccagtgtcagaaagaaggacccatcatcatccacactgatgaagcagattcagaagtcttgtatcccaactaccaaagctgctggagcctgaggcagagaaccagaggccggaggcagactgcctctttacagccaggaatctcagaggatttgaaaaaggtgaaggacaggatgggcattgacagtagtgataaagtggacttcttcatcctcctggacaacgtggctgccgagcaggcacacaacctcccaagctgccccatgctgaagagatttgcaaggatgatcgaacagagagctgtggacacatccttgtacatactgcccaaggaagacagggaaagtcttcagatggcagtaggcccattcctccacatcctagagagcaacctgctgaaagccgtggactctgccactgcccccgacaagatcagaaagctgtatctctatgcggctcatgatgtgaccttcataccgctcttaatgaccctggggatttttgaccacaaatggccaccgtttgctgttgacctgaccatggaactttaccagcacctggaatctaaggagtggtttgtgcagctctattaccacgggaaggagcaggtgccgagaggttgccctgatgggctctgcccgctggacatgttcttgaatgccatgtcagtttataccttaagcccagaaaaataccacgcactctgctctcaaactcaggtgatggaagttggaaatgaagagtaactgatttataaaagcaggatgtgttgattttaaaataaagtgcctttatacaatgccaaaaaaaaaaaaaaaaaaaaaaaa

SEQ ID NO: 4273 - DNA, 552 bp, Homo Sapiens
  NM_016362
acctccgccaggaactgcaggcccacctgtctgcaacccagctgaggccatgccctccccagggaccgtctgcagcctcctgctcctcggcatgctctggctggacttggccatggcaggctccagcttcctgagccctgaacaccagagagtccagcagagaaaggagtcgaagaagccaccagccaagctgcagccccgagctctagcaggctggctccgcccggaagatggaggtcaagcagaaggggcagaggatgaactggaagtccggttcaacgccccctttgatgttggaatcaagctgtcaggggttcagtaccagcagcacagccaggccctggggaagtttcttcaggacatcctctgggaagaggccaaagaggccccagccgacaagtgatcgcccacaagccttactcacctctctctaagtttagaagcgctcatctggcttttcgcttgcttctgcagcaactcccacgactgttgtacaagctcaggaggcgaataaatgttcaaactgtaaaaaaaaaaaaaaaaaaaaaaaaa

SEQ ID NO: 4274 - DNA, 923 bp, Homo Sapiens
  NM_016364
gctcaggcagagtcctgcccctgcacccactcccccattcccggccccaggccatgccccaggatggactcactgcagaagcaggacctccggaggcccaagatccatggggcagtccaggcatctccctaccagccgcccacattggcttcgctgcagcgcttgctgtgggtccgtcaggctgccacactgaaccatatcgatgaggtctggcccagcctcttcctgggagatgcgtacgcagcccgggacaagagcaagctgatccagctgggaatcacccacgttgtgaatgccgctgcaggcaagttccaggtggacacaggtgccaaattctaccgtggaatgtccctggagtactatggcatcgaggcggacgacaaccccttcttcgacctcagtgtctactttctgcctgttgctcgatacatccgagctgccctcagtgttccccaaggccgcgtgctggtacactgtgccatgggggtaagccgctctgccacacttgtcctggccttcctcatgatctgtgagaacatgacgctggtagaggccatccagacggtgcaggcccaccgcaatatctgccctaactcaggcttcctccggcagctccaggttctggacaaccgactggggcgggagacggggcggttctgatctggcaggcagccaggatccctgacccttggcccaaccccaccagcctggccctgggaacagcaggctctgctgtttctagtgaccctgagatgtaaacagcaagtgggggctgaggcagaggcagggatagctgggtggtgacctcttagcgggtggatttccctgacccaattcagagattctttatgcaaaagtgagttcagtccatctctataataaaatattcatcgtcataaagaaaaaaaaaaaaaaaaaaaaaa

SEQ ID NO: 4275 - DNA, 2427 bp, Homo Sapiens
  NM_016368
acttccgccaggcggggacccgatggccacggtggctctgggttgtcgggcctcgaaccgggtctccagacgttgggcccctccctcccagcgcgggagaggcggggaagggggcggggcgggggaggggccgcagcgcttttctccggaggtcgcgcgcccgagagcccgcgctgtccgccgccgctgcctgagtcgactctgcgccgcccgccgcgatggaggccgccgcccagttcttcgtcgagagcccggacgtggtctacggccccgaggccatcgaggcgcaatacgagtaccggacgacgcgcgtcagccgcgagggtggcgttctcaaggtgcaccccacgtccacgcgcttcaccttccggaccgcccggcaggtgccccggctcggggtcatgcttgtcggctggggcgggaacaacggctccacactcaccgccgcggtgctggccaatcgactgcgtttgtcctggcccacgcgcagcggccgcaaggaggccaactactacggctcgctgactcaggcgggcaccgtgagcctgggcctggacgccgagggccaggaggtgttcgtacccttcagcgcggtgctgcccatggtggcgcccaacgacctcgtgttcgatggctgggacatctcgtcgctgaacctggccgaggcgatgcggcgcgcgaaggtgctggactgggggctgcaggagcaactgtggccgcacatggaggccctgcggccccggccttctgtttacatccccgaattcatcgcggccaaccagagcgcgcgcgcggacaacctcatcccaggctcgcgtgcgcagcagctggagcagatccgcagggacatccgagacttccggtctagcgcggggctggacaaagtcatagtgctgtggacggcgaacacggagcgcttctgtgaggtgattccaggcctcaacgacacagccgagaacctgctgcgcaccattgagctcggtctggaggtgtcgccctccacgctcttcgccgtggccagcatcctggagggctgtgccttcctcaatgggtctccgcagaacaccctggtgcccggagctcttgagctcgcgtggcagcaccgggtttttgtgggcggagatgacttcaagtcaggccagaccaaagtcaagtccgtgcttgtggacttcctcattggctccggcctcaagaccatgtccatcgtgagttacaaccacctgggcaacaacgatggggagaacctatcggcgccattgcagttccgctctaaggaggtgtccaagagcaacgtggtggacgacatggtgcagagcaacccagtgctctatacgcccggcgaagagcctgaccactgcgtggtcatcaagtatgtgccgtacgtgggtgacagcaagcgcgcgctggatgagtatacctcggagctgatgctgggcggaaccaacacactggtgctgcacaacacgtgtgaggactcgctgctggccgcacccatcatgctggacctagcgctgctgaccgagctgtgccagcgcgtgagcttctgcactgacatggaccccgagccgcagaccttccaccccgtgctgtccctgctcagcttcctcttcaaggcgccactagtgccgcccggcagcccggtggtcaatgcgcttttccgccagcgcagctgcatcgagaacatcctcagggcctgcgtggggctcccgccacagaaccacatgctcctggaacacaaaatggagcgcccagggcccagcctcaagcgagttggacccgtggctgccacctaccctatgttgaacaagaaaggaccggtacccgctgccaccaatggctgcaccggtgatgccaatgggcatctgcaagaggagcccccaatgcccaccacctgaggccccggtcacacagtttctcggctcttcctccccgctgccccccacgaccctaccttgaaggcccccacaaataaaggcgctgccactcagccctccttccacctggggttcttggggcctgtgacctgactctgcctccctctacttccccgactcttgagcgcccagcttcagtcccatcccctctgcccatggtcatcaccccaactcccagggagagcccagaacctggagcctcgctctgcccccagttctcaaaggtggggctagatgggggcggggacggaacaagaccacagggtggagagtgtggtggcagaaggccaaagagggaatctgagacaagctaccaaaaaccaaaaccagcttccatttatttatgggccccaccccctgacgtcctggggagaggggccccccaaagagcctttctctctgggacaaaatacaaatggcaggaagggtccatacagaaaagaacgtctctgaggtccttgcgtttttaataaaatggtaagagtcaaaaaaa

SEQ ID NO: 4276 - DNA, 1873 bp, Homo Sapiens
  NM_016372
gccttgcacatggagatgcttagctgagggggtggctttgttagactatttgcaggtcgtgagatagagcctgagatgggggactgggcccctgcctgggggattgggtcgtgacctgtgtggagccccacactgagctgcagtgggtggggagggtggtttacaggggtgctctgtgcagcccctctgattttcccctgggagtcccaggtccaggggaaggaggacagtggcccaggccacacagctcactgggcggctctcactcccccagggctggctgctggcgggatggacaccctggaggaggtgacttgggccaatgggagcacagcgctacccccacccctggcaccaaacatcagtgtgcctcatcgctgcctgctgctgctctacgaagacattggcacctccagggtccggtactgggacctcttgctgctcatccccaatgtgctcttcctcatcttcctgctctggaagcttccatctgctcgggcgaagatccgcatcacctccagccccatttttatcaccttctacatcctggtgtttgtggtggcgctggtgggcattgcccgggccgtggtatccatgacggtgagcacctcgaacgctgcaactgttgctgataagatcctgtgggagatcacccgcttcttcctgctggccatcgagctgagtgtgatcatcctgggcctggcctttggccacctggagagtaagtccagcatcaagcgggtgctggccatcaccacagtgctgtccctggcctactctgtcacccaggggaccctggagatcctgtaccctgatgcccatctctcagctgaggactttaatatctatggccatgggggccgccagttctggctggtcagctcctgcttcttcttcctggtctactctctggtggtcatccttcccaagaccccgctgaaggagcgcatctccctgccttctcggaggagcttctacgtgtatgcgggcatcctggcactgctcaacctactgcaggggctggggagtgtgctgctgtgcttcgacatcatcgaggggctctgctgtgtagatgccacaaccttcctgtacttcagcttcttcgctccgctcatctacgtggctttcctccggggcttcttcggctcggagcccaagatcctcttctcctacaaatgccaagtggacgagacagaggagccagatgtacacctaccccagccctacgctgtggcccggcgggagggcctggaggctgcaggggctgctggggcctcagctgccagctactcgagcacgcagttcgactctgccggcggggtggcctacctggatgacatcgcttccatgccctgccacactggcagcatcaacagcacagacagcgagcgctggaaggccatcaatgcctgagggcagctgccagggcctgtggaggacaggccagagaggaggccagcaggcccagagtccccaggggaggaggaccaggtcaagggacgttctgtgggcagtagccctgtgtggccctgttcccaccatgagtctggaggccccacctccctggggctcccaatcccctttgccatctctgctctcactggggaccctcctccccttcccacctgctctcatactgctcagtgacatggcccaggctttccttccagggccatgcttggcaaggttggctgagggcaccctccttctctgcacccttggcacgagggcagggctggctctcccaatgcctccatcccatccccatggtgctttggcctcctcaaagcatccaccatggtggatggactgaagtgtgtatattttcttgatctattttttaataaaaaggaaaaggagcagaaggtgaaaa

SEQ ID NO: 4277 - DNA, 7959 bp, Homo Sapiens
  NM_016376
gcacttctcgcgaggttgcaggcagtgccgggccagacatggcggaagaggaggtggccaagttggagaagcacttgatgcttctgcggcaggagtatgtcaagctgcagaagaagctggcggagacagagaagcgctgcgctctcttggctgcgcaggcaaacaaggagagcagcagcgagtccttcatcagccgtctgctggccatcgtggcagacctctacgagcaggagcagtacagcgatctgaagataaaggttggggacaggcacatcagtgctcacaagtttgtcctggcagcccgcagtgacagctggagtctggctaacttgtcttccactaaagagttggacctgtcagatgctaatcctgaggtgacgatgacaatgcttcgctggatctatacagatgagctggagttcagagaggatgatgtgttcctgactgaactgatgaaactagcaaatcggtttcagctacagctcctcagggagagatgtgagaagggtgttatgtctctagtgaatgtcaggaactgtattcgcttctaccagacggcagaggagctgaatgccagcacactgatgaactactgtgcagaaattattgcaagtcattgggacgacctgaggaaggaggatttcagcagcatgagcgctcagttgttatacaaaatgatcaaatccaagacagagtacccgctacataaagccatcaaagtggagagagaagacgtggtcttcctgtatctgattgaaatggattcccagctccctgggaagctgaatgaagcggatcataacggagatctggcattagatctagccctctcacgacgactggagagtattgccaccacgctggttagtcacaaagctgatgtggacatggtggacaagagtggctggagcttgttacacaaaggaatccaaagaggagatctctttgctgccactttcctcattaagaatggggcctttgtcaacgctgctacactgggtgcccaggagacaccactgcaccttgtggccttgtacagttcaaagaaacactcagcagatgtgatgtctgagatggcgcagattgcagaggcccttctgcaggctggtgccaaccccaacatgcaggacagcaaggggaggactcctttacatgtgtccatcatggccgggaatgaatatgtgttcagtcagctgctgcagtgcaaacaactagatttagaactcaaagaccacgagggcagcacggctctgtggctggcagtgcagcatatcacagtgtcttctgaccagtctgtgaaccccttcgaagatgtccccgtggtaaatgggacttcatttgatgagaacagctttgcagccagactcatccagcgcggcagccacacagacgcacctgacacggcgacaggaaactgtttactacagcgggcagctggagcaggaaacgaggcagcagctcttttcctggcaaccaacggtgcccatgtcaaccacagaaacaagtggggagaaaccccgttgcacacagcgtgtcggcatggcctggccaacctcacggcagagctcctgcagcaaggcgccaacccaaacctgcagacggaggaagctctgcctctgccaaaggaggccgcatccctgaccagcttggcggacagcgtccatctgcagacgccactgcacatggcgatcgcctataaccatccggatgtggtgtctgtcatcctggagcagaaagccaatgctcttcatgccaccaacaacttgcagatcattccggacttcagcctcaaagattcccgagaccagactgtgctgggcctggcattatggactggcatgcacacgatcgcagcccagctgctgggctctggagccgccatcaatgacaccatgtcggatgggcagacgctactgcacatggccatacagcggcaggacagcaagagcgcactcttcctgctggagcaccaggcagatataaatgtcagcaggactcaggacggggagacagccctccagctggccatcagaaaccagcttccactcgtagttgatgccatatgcacccgaggagctgacatgtctgtgccagatgagaaggggaaccccccgctgtggcttgcattggcaaacaatctggaggacatcgcatccactctggtcagacatggctgtgatgccacatgctggggtccgggacctggtgggtgccttcagacgctcctgcacagagccattgatgaaaacaacgagcccaccgcctgctttcttattcgcagtggctgtgacgtgaacagtcccagacaaccaggcgccaatggagaaggagaggaagaggctagagatgggcagacccctttgcatttggcagcctcttgggggctggaagagacagtacagtgtcttctggagtttggtgccaacgtgaacgcacaggatgcagaaggaagaacccccatccacgtggccatcagcagccaacacggtgtcatcattcagctgttggtttctcaccccgatatccatttgaatgtacgagacagacaagggctgaccccgtttgcctgtgccatgactttcaagaacaacaagtcagccgaggccattctcaaacgagagtccggggctgctgagcaggtggataacaagggccggaatttccttcatgtggcagttcagaactctgatattgaaagtgtgctgttcctgatcagtgtccacgctaatgtgaattcaagagtccaggatgcctccaagttgacccccctgcacctcgctgtccaagcaggctcagaaattattgtccgcaatttgcttcttgcgggagccaaagtgaacgaattaaccaagcatcgccagactgccctccatcttgctgcccagcaggacctgcccaccatctgctcagtcctcctagagaatggcgtggactttgctgccgtggatgagaatggaaacaatgctcttcatcttgctgtcatgcacggccggctcaacaacatccgggttctcctgacagagtgcacagtggacgccgaagcctttaatctcagaggccagtcaccactgcacattttgggacaatatggcaaggagaatgcagcggccatctttgatctcttcctagaatgcatgccggggtatcctctggacaagccggatgcagacggcagcacggtgctgctcctggcatacatgaaagggaacgccaacttgtgccgcgccatcgtccggtcgggggctcgcctcggggtgaataacaaccagggagtcaacatcttcaactaccaggtcgccaccaagcagctcctgttccgactgctggatatgctgtccaaggagcctccgtggtgtgacggctcctactgctatgagtgcactgccaggttcggagtcaccactcgcaaacaccactgtcgtcactgcggacgtcttctttgccataaatgctcgaccaaggagattcctattataaagtttgatctgaacaagcctgtgcgggtttgcaacatttgttttgatgtactgactctgggtggggtttcttagtgagccccccggagggtccaggccacgtccttggtcacctccccagcagctgctctgctcaccagcctgaccccacccagagcaggagctggcgggtgtcttcctgcggcaatagactggaacgattaaggaccatggtgtgatagatcccatttcaaatgattccatatgattgtcagtgtgtgtgtcagactgtgatcgatttcactagatgtctcactcatcagaccaggccattgggcctaagtggtaaatgtgattaggaattagacctctccccattctgctagcaacatacagggacacttggaaaaccatttccccttccagtagcttggtgtccatcccagagcattcatgaagtcttcccgcctgggctgactgatgaggcagagcctctcagcgtaggaagctggctgcttaatgagctggctttactctagggtaagtggctgtggacttttctgcacagtgttttcataaagataataggatcctcttgccctgaagtctttttttctttttacgctaagctgtatttttagtgagctaccccttttaaaaaggtgaaatctttcttaacagggttcaaagatgagagctgaaaaatcgtggccttaacaactgaaagctttacagtgttcatgctactgaggtgtcaggagtgcagctgggccgcttgacacctcgtagcagccgtctcattctctcgtcttgctgcgtcctgtctgtggagtcctcagtcactctgctgttggagagtgctggaggaaatgcacttttactgtgctgcactttttatagagctgcattgtcggtgattccaatttaaaaatccatattcaaaaataccctcacacatccctgcatcagtgattctaatgatcagctttgactggacctcagctcacacgaatctccaaggaaaaactctacagagcatcttttagagcaagagattcatacaggccaagtgatgagagggggagtcaccaaggcttcagccccaagggcatctccagcctcaggccggcaggtcctatgtccttgacacaaatgcttcttgctgaaatcctccctagtgatgctgcgagtgctgttggtcccagttctgtgtagcttgccctgccccatgaagggccaccagccaagggccctggccacgtgtgcgccaccttactttggaagtctctggcttgtgtgctggatgaggctgccagaacttgttgggcgttcatcgctgttagtacatatattaaccgtgaggtgttaaacttttcttttgaaggtttggccagtttctaaaaaatgcacatttaaagagaagcatctaccacggctttaaaacaaaacaactctgagatgaacaatatgtgttatactcagagattaacaatctcaatcatacatactgattctttcagacatttaataaccactacatttttttgcattaatgaagtttgactatatgtgtaaagggactaaatatttttgcaacagcctgttctttgttcattcttttctggatagtgtgtcctctgtattgcggtagatttatacattctgttgcctaaatatgtgtgtaaaatgagctgataaactggagtactacttaaaaaaaagtctgtgatttataagatgtatatgctttctatgtgaatataagcttgtgcacaatgtttaaaagaaaaacaatgaattagaagagatcccccgtcccccagtctgacatatttcatacagaatgtttaaaagaaaaactctgctagtcttggcaaacatttggccatgtgaggcatgtggtcagtttccattttctattacctggaaagggccataaggaagcaggcagggcttaggtagcttggttacctaagttagaaagtaagagaatcatgattcggatatgaattgaagtggttggtacatggatacctgttctttaaaaggaatgtgggagatgagtcaagggtgaggccgattgttctgcccatgccctaccataccaatttcaataacaatcttgcctgtcattgcactcagaatcttaagatcatgtttcaaatatgttgattcaaacttgcttctaagcctgagtccagggatagcaatggtactgaccagctatggactgggagaacattgagtcctgttttccattggcttcagggcgcatccatgtggatataggaaaagcctctttccacagacttaggaagccccccgaccacgcggacgctcgctgggctgcactcagcaggctgcttgagtgggagctgactccaacatgccctgccctggctgggactaggcatgcttccagcccttcccgtgctctccctgctgtcaacacttgcgtacaaacctgcctagctgttgtaagttttcatcagtagcttaagtactagtagcaaaaacttaaattcattcagaaagttgccacttctgaatgagtagagcaggaaaagtaaactttactgaaacataatttgctgcaacagtcaacattgttatgctgaatgtgctctcaactgccctttgctcatcgccagatttattatccagtgtattcctaacagtcttttgttgtcgttgtttttaaaacaaaggtacggaccatgtgctatatataaatcgaatggcttaaactaatttgctatgatcctctaacaccgaaatttcccataaacttaagtgcctacacttaggacttttgaactttcagtcatctttttcgtggtgtctcactgaacgatgtgttagaacatgtgttccatttggagttttgggcctgtgcacggtcaaccccaattaccaatttagttgaggctggattcgattgctcagttcacctgccacgttctctccaaggagtggggtctacgtgacctttagtcctctacctcagagccccgagtcatttctgaccaccccgttctgtgtcctcactcttgtccctgaatgggtccctgtgtggatctcagtgtgtgtgtggtttctccactcctccccgctcatgtcccacacctgccatattgaaccgtttctgcactaatcttctccacgggcacggagtggagggaacgtcttgggaaaggggagagcttgacctccatctaggtttcttttatctggagaaaaagaacacttttgaactatgtaatgcttcaccctgaaaggcaagctaacgctaacttcccaggtgacagtagcaggaacaaggaagggtaatgtttccatgacagacacttgcttcccttgggacaagtcccagaagaactacctgaagcaccaaagctccccaccccagcctggtggcagaggaagcaggtggcaccaactcaccaaagggacttgggagccaccttctcactctgtggaagtactttagtgagagctgactggcaagataaaaaccctgaaattcccagaagttacagatgccttaaagactttctttggaagatcattgcctgtactattccttttttgtgtggcataaataatatattaacctgttacaactgacaacattggttttctgcagctagggagtcttgagtcgagactgctcgccttgatgacttgctcttttttggcagatgtgtggagttggctgttacgacatccctgtgtgatcccagaggaggggcagtagctgggcagaaactgcaggcacacatttgggtggatcacctggcttccagccccttcggggtggtgctcagtgtggggtgatggtatcatagaggaccacggcgcttatcagcattgtttctttggagtctgtgtaatggaatgtatttttcaaatactgatatttgcattttctgtaacaattccttataataaaatgaagtaaaattgtgcatttaaagtggaaactttaataagacatttgtagttacttctaatgcagaagtaccaataagcattaaaaacaaattttagaaaactcctgacgtgaataagtttcttgaccagctgccctccagaaagtttgaattccaacatttttcaggaacatgctgttgacagcagtaaaagtagctattttatgtatgtatttttaatttttaaaagtttcagtaggtttttggggttcaggtggtgtttggttacgtgaggttctttagcggtgatttccaggattttggggcacccatcacccaagcagtgtacactggacccttttatccctcaccccaaccctttcccctgagcccccaaagtccactgtatcattcttaatgcctttacgtcctcatggcttagctcccgaaaagtagttattttaaacatactagctgcctgaacttactgtgcccttggcccagatttcagctcatagcaccgagcgtgatcactgaggcagtctcagtcaccgtcacctgacccctctgaa

SEQ ID NO: 4278 - DNA, 1004 bp, Homo Sapiens
  NM_016379
atgtggatgctgggagaagtatgtgagatggaaaagttgtttcatggcatccaagaagtgaatgatcctcaaggtgtagcagaggaatctgtaggagagagggatgattgacgtcttcgtatagccctccatccatcccagttagcatggagggattttagggctaccattggctgggtagtggagtgttgaccaatcacagctcaggggcgtgattgtctcgtcctgggatcgcgagaggggtatatacagggaggccaggcagcctggagttagtcgaccgttgcgagacgttgagctgcggaagatgagtccaaagccgagagcctcgggacctccggccaaggccacggaggcaggaaagaggaagtcctcctctcagccgagccccagtgacccgaagaagaagactaccaaggtggccaagaagggaaaagcagttcgtagagggagacgcgggaagaaaggggctgcgacaaagatggcggccgtgacggcacctgaggcggagagcgggccagcggcacccggccccagcgaccagcccagccaggagctccctcagcacgagctgccgccggaggagccagtgagcgaggggacccagcacgaccccctgagtcaggagagcgagctggaggaaccactgagtcaggagagcgaggtggaagaaccactgagtcaggagagccaggtggaggaaccactgagtcaggagagcgaggtggaagaaccactgagtcaggagagccaggtggaggaaccactgagtcaggagagcgaggtggaggaaccactgagtcaggagagccaggtggaggaaccactgagtcaggagagcgagatggaagaactaccgagtgtgtagacggccagctactcccctatctccgagagcagcgactaagttcaggcccagccgccagacctcagagatctcaccagcggggtgcttgccattctgaagataataaaatgaatgtgttgcaaattgaaaaaaaaaa

SEQ ID NO: 4279 - DNA, 2528 bp, Homo Sapiens
  NM_016382
cttgtgggaactgtcagaccagctccaggcgctggggctttctcagtggccttgtcagctcacagcaggcgttaacagcctctaattgaggaaactgtggctggacaggttgcaaggcagttctgctccccatcgtcctcttgctgactggggactgctgagcccgtgcacggcagagagtctggtggggtggaggggctggcctggcccctctgtcctgtggaaatgctggggcaagtggtcaccctcatactcctcctgctcctcaaggtgtatcagggcaaaggatgccagggatcagctgaccatgtggttagcatctcgggagtgcctcttcagttacaaccaaacagcatacagacgaaggttgacagcattgcatggaagaagttgctgccctcacaaaatggatttcatcacatattgaagtgggagaatggctctttgccttccaatacttccaatgatagattcagttttatagtcaagaacttgagtcttctcatcaaggcagctcagcagcaggacagtggcctctactgcctggaggtcaccagtatatctggaaaagttcagacagccacgttccaggtttttgtatttgataaagttgagaaaccccgcctacaggggcaggggaagatcctggacagagggagatgccaagtggctctgtcttgcttggtctccagggatggcaatgtgtcctatgcttggtacagagggagcaagctgatccagacagcagggaacctcacctacctggacgaggaggttgacattaatggcactcacacatatacctgcaatgtcagcaatcctgttagctgggaaagccacaccctgaatctcactcaggactgtcagaatgcccatcaggaattcagattttggccgtttttggtgatcatcgtgattctaagcgcactgttccttggcacccttgcctgcttctgtgtgtggaggagaaagaggaaggagaagcagtcagagaccagtcccaaggaatttttgacaatttacgaagatgtcaaggatctgaaaaccaggagaaatcacgagcaggagcagacttttcctggaggggggagcaccatctactctatgatccagtcccagtcttctgctcccacgtcacaagaacctgcatatacattatattcattaattcagccttccaggaagtctggatccaggaagaggaaccacagcccttccttcaatagcactatctatgaagtgattggaaagagtcaacctaaagcccagaaccctgctcgattgagccgcaaagagctggagaactttgatgtttattcctagttgctgcagcaattctcacctttcttgcacatcagcatctgctttgggaattggcacagtggatgacggcacaggagtctctatagaacagttcctagtctggagaggatatggaaatttgttcttgttctatattttgttttgaaaatgatgtctaacaaccatgataagagcaaggctgttaaataatatcttccaatttacagatcagacatgaatgggtggaggggttaggttgttcacaaaaggccacattccaagtatttgtaatctagaaagtgttatgtaagtgatgttattagcatcgagattccctccacctgattttcaagctgtcacttgtttccttttctcccctctctgggttgactgcatttctagactctcgccggcccaggcccatcttccaaagcaagaggaaggaatgataatggtgactcaggggaagaagaaacagccctcctctgaaagcctggactgtccggctgtgaactggctggcaggttctgcacgtgggtgggggccagggcctgggctttactcaattgcagagaaaaaactttctccctgcatctcatacctttacctctggccagttggccaccagggggagtgggctgaagggagagtagatggtgcaaagcaagcccatctctaagtagaaaaatcacccagagcacatgctgacctgataactggggtgttgagaccagctttgtccatggtatgatgtttgatttatgaagacgcattgttagaaatccatttggcttcttcatagaagtggcttcccagaggaagaggcctctcagaaaccatgttctatttaagttctgagtcctgatgagtgttccccaggatgcacattgaagggagggctcaggcagctgagggctgagaatgaggcagttggaatctagacactatgctgggttccctgagtcgtcaggccagacatttcaacaaggctgtggggagcagggctgtgactctggctgagcccaggaaagcgacaagggtgaactgggagaggacttactcagagaccccaacaggtgatactgcacaaagcctggttcttcaattttcctaccctgtatctaacataggagtttcatataaaacggtgatatcatgcagatgcagtctgaattccttgcctgaattaaatttatgtatcctctccaaaaaaaaaaaaaaaaaaa

SEQ ID NO: 4280 - DNA, 1695 bp, Homo Sapiens
  NM_016388
gaggcacagataaagataagttttactgtcatgctgcttttaacataacagagcaacatcacctaggaaaaaagtttgtaggaggatttttaatccatatatttgtcttatggctagataaagatttctctgaaaaaaagaagcatgtcaggaatctctgggtgcccctttttcctctggggacttctagcattgttgggcttggctttggttatatcactgatcttcaatatttcccactatgtggaaaagcaacgacaagataaaatgtacagctactccagtgaccacaccagggttgatgagtattatattgaagacacaccaatttatggtaacttagatgatatgatttcagaaccaatggatgaaaattgctatgaacaaatgaaagcccgaccagagaaatctgtaaataagatgcaggaagccaccccatctgcacaggcaaccaatgaaacacagatgtgctacgcctcacttgatcacagcgttaaggggaagcgtagaaagcccaggaaacagaatactcatttctcagacaaggatggagatgagcaactacatgcaatagatgccagcgtttctaagaccaccttagtagacagtttctccccagaaagccaggcagtagaggaaaacattcatgatgatcccatcagactgtttggattgatccgtgctaagagagaacctataaactagctggaccatgatctagttcaatgatttggctcctattgaagatggcttctaagaaaacaagatgcacagaggacacagaaggacttggcagcagggtgatgacctgatcatttgttgatgggatggtggcttacctcttattcacagcttacacttatgcatgccaaatgtaaggccatgaaaatcagtatttcaaataacttaaaaaatgctttactactaaaatgtaaaaaattaatgtgctcacctcggcagcacatatactaaaaattaataagacccagcttgaaaattgagcctgataacaagattacaaattcacaatacctaatacttagggaaatataaaaatttaagcatgaatgcgttctggaacacgttagaagaaaaataaaagccaatgagtttttttttaattctcctttctcaccaatgggcaatagcccataattgaaataaatttctgattgaaaggtataggaaacattaaaatgcattactaagagaagtaatataattttcttacaaagtatttttcccaaagatagctttactatttcaaaaattgtcaaattaatgcatgctccttacaacaaacaaatatcaaaaagagtttaggaattctactagccagagatagtcacttggagaaactttctatatatccttctaaatatttttctgggcatgcttatgtatgtacatcagttgtttctttttattttgaaccaaaaatgtggtttcttttgtacacattacttaaactttctttccagtcaacaatatattgtggatttattttcactgttatatttaactatatataaatacgcatatattgtaattttaatgtctgcttagcaccccactgataaccaaatcacagtttatttaaataattttaatgacttttcaaaaacaatttattgatgcaaaaagcaaggttgagatgacaatgtttctttcaataattaaaaaatactgcttcac

SEQ ID NO: 4281 - DNA, 4346 bp, Homo Sapiens
  NM_016389
gaagcgggctgggaggcgtcggcggcggcagcgcacgtggtgacgtgcgagggggtgcggcgcgagcggtcggcggcggcggaggcagtgtctcccggtcgcgcgtggaggtcggtcgctcagagctgctgggcgcagtttctccgcctgctgcttcggcgcggctgtatcggcgagcgagcgagttcccgcgagttctcggtggcgctcccccttcctttcagtctccacggactggcccctcgtccttctacttgaccgctcccgtcttccgccgccttctggcgctttccgttgggccgattcccgcccgcttcctcctgcttcccatcgaagctctagaaatgaatgtttccatctcttcagagatgaaccagattatgatgcatcattatcacagaagaaattcgtgtctatagcttttaaggacttgattacatcattttcaagcctgatagttttggaatcaccattagagcttaagacacacctgccttcatttcaaccacctgtcttcataccctgacgaagtgcaccttttaacactcctttgtccttggattacttaagagttcccagaaatacatttgccaccaacagagtagccaaatttataaggaaaaatgattcccaatggatatttgatgtttgaggatgaaaattttattgagtcttctgttgccaaattaaatgccctgaggaaaagtggccagttctgtgatgttcgacttcaggtctgtggccatgaaatgttagcacacagagcagtgctagcttgctgcagtccctatttatttgaaatctttaatagtgatagtgatcctcatggaatttctcacgttaaatttgatgatctcaatccagaagctgttgaagtcttgttgaattatgcctacactgctcagttgaaagcagataaggaattggtaaaagatgtttattctgcagcaaaaaagctgaagatggatcgagtaaagcaggtttgtggtgattatttactgtctagaatggatgttaccagctgcatctcttaccgaaattttgcaagttgtatgggagactcccgtttgttgaataaggttgatgcttatattcaggagcatttgttacaaatttctgaagaggaggagtttcttaagcttccaaggctaaagttggaggtaatgcttgaagataatgtttgcttgcccagcaatggcaaattatatacaaaggtaatcaactgggtgcagcgtagcatctgggagaatggagacagtctggaagagctgatggaagaggtttattaacaaaactaggatacccaagactgaagaaacaagaagaaacctcaagtgtattgacacgtaaagaagcagcagtcctgccccagttctcctaagaaaaatccgctgtgggcagagaacgatgatgatttaatggttcaaaccttgtactactcagctgatcacaagctgcttgatgggaacctactagatggacaggctgaggtgtttggcagtgatgatgaccacattcagtttgtgcagaaaaagccaccacgtgagaatggccataagcagataagtagcagttcaactggatgtctctcttctccaaatgctacagtacaaagccctaagcatgagtggaaaatcgttgcttcagaaaagacttcaaataacacttacttgtgcctggctgtgctggatggtatattctgtgtcatttttcttcatgggagaaacagcccacagagctcaccaacaagtactccaaaactaagtaagagtttaagctttgagatgcaacaagatgagctaatcgaaaagcccatgtctcctatgcagtacgcacgatctggtctgggaacagcagagatgaatggcaaactcatagctgcaggtggctataacagagaggaatgtcttcgaacagtcgaatgctataatccacatacagatcactggtcctttcttgctcccatgagaacaccaagagcccgatttcaaatggctgtactcatgggccagctctatgtggtaggtggatcaaatggccactcagatgacctgagttgtggagagatgtatgattcaaacatagatgactggattcctgttccagaattgagaactaaccgttgtaatgcaggagtgtgtgctctgaatggaaagttatacatcgttggtggctctgatccatatggtcaaaaaggactgaaaaattgtgatgtatttgatcctgtaacaaagttgtggacaagctgtgcccctcttaacattcggagacaccagtctgcagtctgtgagcttggtggttatttgtacataatcggaggtgcagaatcttggaattgtctgaacacagtagaacgatacaatcctgaaaataatacctggactttaattgcacccatgaatgtggctaggcgaggagctggagtggctgttcttaatggaaaactgtttgtatgtggtggctttgatggttctcatgccatcagttgtgtggaaatgtatgatccaactagaaatgaatggaagatgatgggaaatatgacttcaccaaggagcaatgctgggattgcaactgtagggaacaccatttatgcagtgggaggattcgatggcaatgaatttctgaatacggtggaagtctataaccttgagtcaaatgaatggagcccctatacaaagattttccagttttaacaaatttaagaccctctcaaactaacaggcttagtgatgtaattatggttagtagaggtacacttgtgaataaagagggtgggtgggtatagatgttgctaacagcaacacaaagcttttgcatattgcatactattaaacatgctgtacatactttttgggtttatttggaaaggaatgcaaagatgaaggtctgttttgtgtacttttaagactttggttattttactttttggaaaagaataaaccaagaattgattgggcacatcatttcaagaagtcccctctcctccacatttgttttgccaatttgcacattaaatgactcttccctcaaatgtgtactatggggtaaaaggggtagggtttaaagatgtagacagttgggttttttaagggccctttttcaataactggaacactctataacaaaggatacttatttaaatagatgacattgactatttttgtttttattaaaaggaagcttacatgcctaccaatatttaatcttttatgattgcctttttataactttttatattctcagcagagtgctttaccaattgaagtaaaatgtggcaggctggagttattgaagcagagtggcagtcttcagtttgcagagtaggggtctgtcttttaaactctgagtgcaaacttcagagttcttgccttggctgcagtttttttccttcaagaatgcagtactaacatttatttgagtggagttactgaacagtaacatagctgtgatttttggtatttgaaacactggttttaaatattttgacttgttgagggtatgttttatatagcaagacattatatagcagtaaaaaatggtgttttatcttctatataattcctgtttttattattaacaaaacagtcctaaatagcagccctcaattgtgaaaaaatttactttaaactacattaggttgtgaatgcaggttttatcagaactatgtttttgttcagtttatctgttcatatggataaatattggttgggatgacttggtgtctaatgtgtagtgctacacacctaacttatggggccaaaatagcatgtcctaatgcttgctgctgatttaaacacattaaaggtactttgcaggaaatccttgcaccatgggattaatatccaattgctgcttgtacactcattcattactaaaagttttgagaaatttttttttccagtaatgagcttaagaaatttgtggaaaataactcacctggcatcttacatctgaaataaggaatgatataaggtttttttttctcacagaagatgaagcacacaggaacctaatgggccaactgggatgaggtgactattctgagatgactattcagtggctaacttgggttaggaagaaaataattaggtattttctccaaatgttcactggtactctgccactttatttctctcatctgttacacaaagaaccaccaggaaagcaaatcagtttggttggtaactctgtaattcctaactatcactggtttggttctggactaaaactacattgacagattgaatttgcctaatatgatgactgtttttaatatggatctgtatgtgttctattcagcacaaggaaataaaattttagttgaggattcagcactaaaaaaaaaa

SEQ ID NO: 4282 - DNA, 1891 bp, Homo Sapiens
  NM_016390
ggcgggaccgacggtgtgtgcggaacatggcggagcgcggcaggaagcggccgtgcggcccgggtgaacacggccaaaggattgagtggcgaaaatggaagcaacagaagaaagaggagaaaaaaaaatggaaggatctcaagctgatgaaaaaactggagcggcagcgggcacaggaggaacaggcaaagcgcctggaagaggaggaggcagcggcagagaaggaggaccgcgggcggccctacacactgagcgtagccctgccgggctccatcctggacaatgctcagtcgccggagcttcgcacctacttggccggtcagattgccagagcctgtgccatcttctgtgtggatgagatcgtggtgtttgatgaggagggccaggatgccaagactgtggagggggaattcacaggagttgggaagaaggggcaggcgtgcgtacagctggcccggatcctgcagtacctggagtgtccacagtacctgaggaaggcgttcttccccaagcaccaggatctacagtttgcagggctcctgaaccccctggacagcccccaccacatgcgtcaggatgaggaatccgagttccgagagggcatcgtggtggatcggcccacccggccaggccacggctcctttgtcaactgtggcatgaaaaaggaggtgaagattgacaagaacctggagcccgggcttcgggtgactgtgcgactgaaccagcagcagcacccagactgcaagacctaccatggcaaagtggtatcatcgcaggaccctcgcaccaaagctggtctctactggggctacaccgtccgactggcttcctgcctcagtgctgtgtttgctgaggcccccttccaagatgggtatgacctgaccatcgggacgtcagagcgcggctcagatgtggcctctgcccagcttcccaacttcaggcatgctcttgtggtgttcgggggcctccagggtctggaagctggagcggatgctgaccccaacctggaggtggctgaacccagtgtcctctttgacctgtacgtcaatacctgtcctggccagggtagccgtaccatccgcacggaggaagccatcctcatctccctggccgccctgcagcctggcctcatccaggcgggtgcccggcacacctgaaagttctaaggggccgaggacatcagtgaagcagcagtgaaaccaggggctctgcaggtcacttgggacggacgccaccagacttgtctccaaaaatcaccacctttaatactccccggcctgcacacacccacagtctcactgggctccaccctcacttactgcccgccgtgatggccttgaggctgcctgcccgcgccaggatgtttggcacaaagagcagccccgaagcccgctcaatgctctcgatgggcaccaggaagcgctccagtgggatggcctcatccacaggtgcgttgggcatcacgtaggtgcggagctcaatttgcccacctgctgcctccaggatcagcaccttgaagaagtgtgtgggcactgccacgtggttcttgccgatgacctggtactttacgtaggatttcccatcagcctctgtcctgtgggcagacccaggcacacgtgggcagggggcctggatgaacccaaagccacctcttccaggcagccttccctgatctgtcctctaacttctgtcaacctgcaggaccacgccctcactgtgagacttctgtagcctgcctggctcctccttgaggctggaactctctccagggtggttaactctttccctctgttttccttatgcccaacactgggtcaggcagagtgggcgacaataaacgctgctaggagaatcgaaaaaaaaaaaaaaaaaaaaaaaaaaaaaaaaaaaa

SEQ ID NO: 4283 - DNA, 537 bp, Homo Sapiens
  NM_016391
atgcccaaggccaagggcaaaacccggaggcagaagtttggttacagtgtcaaccgaaagcgtctgaaccggaatgctcgacggaaggcagcgccgcggatcgaatgctcccacatccgacatgcctgggaccacgctaaatcggtacggcagaacctggccgagatggggttggctgtggaccccaacagggcggtgcccctccgtaagagaaaggtgaaggccatggaggtggacatagaggagaggcctaaagagcttgtacggaagccctatgtgctgaatgacctggaggcagaagccagccttccagaaaagaaaggaaatactctgtctcgggacctcattgactatgtacgctacatggtagagaaccacggggaggactataaggccatggcccgtgatgagaagaattactatcaagataccccaaaacagattcggagtaagatcaacgtctataaacgcttttacccagcagagtggcaagacttcctcgattctttgcagaagaggaagatggaggtggagtga

SEQ ID NO: 4284 - DNA, 3213 bp, Homo Sapiens
  NM_016395
ggcaacgtggggtatctcgaggtgccgggttgcaggcgctcaggagcgctagggtttgaggcctgctttctgctcgcgccagcagagcactacctgaggcagcgaggcgcagcgagcctagcctccccgcgccctgggcagtgtggccatggagaatcaggtgttgacgccgcatgtctactgggctcagcgacaccgcgagctatatctgcgcgtggagctgagtgacgtacagaaccctgccatcagcatcactgaaaacgtgctgcatttcaaagctcaaggacatggtgccaaaggagacaatgtctatgaatttcacctggagttcttagaccttgtgaaaccagagcctgtttacaaactgacccagaggcaggtaaacattacagtacagaagaaagtgagtcagtggtgggagagactcacaaagcaggaaaagcgaccactgtttttggctcctgactttgatcgttggctggatgaatctgatgcggaaatggagctcagagctaaggaagaagagcgcctaaataaactccgactggaaagcgaaggctctcctgaaactcttacaaacttaaggaaaggatacctgtttatgtataatcttgtgcaattcttgggattctcctggatctttgtcaacctgactgtgcgattctgtatcttgggaaaagagtccttttatgacacattccatactgtggctgacatgatgtatttctgccagatgctggcagttgtggaaactatcaatgcagcaattggagtcactacgtcaccggtgctgccttctctgatccagcttcttggaagaaattttattttgtttatcatctttggcaccatggaagaaatgcagaacaaagctgtggttttctttgtgttttatttgtggagtgcaattgaaattttcaggtactctttctacatgctgacgtgcattgacatggattggaaggtgctcacatggcttcgttacactctgtggattcccttatatccactgggatgtttggcggaagctgtctcagtgattcagtccattccaatattcaatgagaccggacgattcagtttcacattgccatatccagtgaaaatcaaagttagattttccttttttcttcagatttatcttataatgatatttttaggtttatacataaattttcgtcacctttataaacagcgcagacggcgctatggacaaaaaaagaaaaagatccactaaaaagaaagatttagatggcttcttgccagtttgagcctaatctgattcttacagttttaccttcttgaaccaatgtaaaagtttttttaatgttaaatgattaaattctcagtgaggctatcttccttttccccagtaacattcctgaatttactgttatcttattgtagtacttgcatgacatggattcctgatatctgatgagaggttcattcttgtgtattcagttaatgacaccaaaaggctcagcccaccccaaccctatctcatgttcagtctgtctaatacatgccagagatttttttttcaaaaagtgctttatccctacaatgtactgacagttcttacagttgagatttgttcttttcagctattgcttgtgaaaaaaagcaagactatgtcactctatagaaggctgttaaagtgactcaggcaggaattaattattctgtacctaaggggttacttgtttaatgggatggcattgactttttgaaaatcaagtggactgagtcattgataaaacatttctaagagtggggctagagaacatactttacatctgacatcctttggcctaacaacatctattattatagtgctcagcagtgtgggcattgaagaggcgcagaatgctttgaaagaaactaatcagaatcttggaacatcatgatcatgccattcttaagtaaatcaactattttcaacactgaagaaaaatgaaacattatttagaaaacaatgagattacaagttccaaactcagccaggaatgtggctcacacctgtaatcccagcactttgggacacctaggtgggagcatcgcttgaagccaggagttcaagaccagcttgggcaacgtagtgagacccctatctctacaaaaaataaaaaaattagctgggtgtgatggcacacacctgttgtcccagctactcaagaagctgagatgggaggatcctgagctcaggaggtcaaggctgcagtgagccgagattgtgccactgcactgcagctggggtgacagtgcaagaccctgtctcaaaccaaaccaaaccacacacacacaaacacacatacacacacacacacacgaggtccaaatggtagcagggatccaaagggaacacagtatgtaggtcaaactggcagtaacagtgtacagcctttgacaaactagaaatattagagtaggccaaacacacctccaaactgtaaggctgtgcacaaacataaaaaatggcagccttccatctcctgcactggctgagtccatttacttgtgtacttgttctagtgagtggtgggactgtacatttttgaatagacctcaaaaatacttcattctgctgctgttcagttggctttttaaacctgtctgcagtaggacactgaaaacagcaagaacttcggggtgaacacccgctgatcctttaacaaggatttctggcaggaaactcacaaaaaggagaactgaaaatttagacatacagttggccattgtaaaaaacatcagtttcctctcatacattccaagtaaaccaagtaaaataagtgttggagtaacacttgcataaaagaatttaaggagtgatagctctttctgttctgccattcccaacattcctgggggaaaggagactcaatgagttaatactatttcactgagcccaagatggaaacttggtttgacctaaaacatctgattaatataggctagctgatttcttaaaaattcgttgcattgaaggatattttgcatgtctgtaacacctgtcaatacttgtttgtattgatttctgatattcttgcagctgactacgtgtaattgggcagatcagctttgcagtagattatgctgcatcctcgtggcaaaattctgtattcttagtgattgttacaaacccctttattgctgtctgagaaagtgaaagattgtgtatttctattaaaacatttacaatcaaaattctaa

SEQ ID NO: 4285 - DNA, 4875 bp, Homo Sapiens
  NM_016396
cttaatcgacccagtactaaggccttgtgttcagtttttctccaggattcagactagagagtttcttccggcgtaaggaacttcaacgctcttcacggaagtaaaagtgtttttttggttgttgttgccgttgtggctgcccgcattccttccctcccacctcgcggaattgtggcgggagggggaggaggaagtcagggcgcctgcgcggagaggccgctttccatccgggtccctgtccgtgcggtgcagcaggtcggtaggcgggaaatggcgactggctgaaggagctggttctgttgctgctgcggggtaagcgggaaagacaccacacattgcgcagtcgggaccatcgccggagcctgaggacacttctctgtcgtcacagttagttttacatgtggcacccataaaagatgaggctgagaacacggaaagcttctcagcagtcaaatcaaatccaaacacaacgcactgccagagcaaagaggaaatattcagaggttgatgatagcctgccttcaggaggagaaaaaccatcgaagaatgaaaccggcttgttgtcttcaattaaaaaatttattaaaggaagcacacctaaggaagagagagaaaatccttcaaaacggagtagaattgaacgtgatatagataacaatttgatcacgtcaacaccaagagcaggagaaaaacctaacaaacagatatctcgagtaagacggaaaagtcaagtaaatggagaagctggtagttatgaaatgacaaatcaacatgtaaaacaaaatggaaaattagaagataatccttcctctggcagtcctccaaggactactttgttggggaccatattttcacctgtcttcaactttttttcaccagcaaataaaaatggaacgtcaggatcagattctccaggacaggctgtggaagctgaagaaatagtaaaacaacttgatatggaacaggtggatgagatcactaccagtactactacatcaactaatggagcagcttactcaaatcaagcagttcaagtgagaccatcactaaacaatggtttagaagaagcagaagaaacagttaatcgtgatatcccaccccttacagcaccagtaactccagatagtggttattcatcagcccacgcggaggccacctatgaagaagactgggaagtatttgacccctattatttcatcaaacatgtcccgccactgacagaagaacaactaaataggaaacctgctcttccgttgaaaacaagaagcacaccggaattctccctagttttagacttggatgaaacactagtgcattgtagtctaaatgagctagaagatgcagcacttacttttccagtccttttccaagatgtcatttatcaggtttatgtgagattaagaccatttttcagggaattcctggaacgaatgtctcagatgtatgagatcattctttttactgcttctaagaaggtgtatgcagacaagttactgaacatactagaccctaaaaagcaactggtcaggcaccggcttttccgtgaacattgtgtttgtgtacaaggaaactatataaaggacttaaatattcttggaagagatctttcaaaaactataataattgacaactcaccacaagcctttgcatatcagctttctaatggaatccctatagaaagttggtttatggataaaaatgacaatgaactcctaaaattgattccattcctggagaagcttgtagaactgaatgaagatgttcgaccacacatcagagacagatttcgcttgcatgatttgctgcccccagattaagtacaaagacttgtcaaatcactgaagggggagagaatgcaggacccttttggactaagacaaaaacattgccattactgttgaaattttgcatttttgtaccccgtcttgcttttcttatctttggtgcccaataataattaagggttacagaaagagactttatctatctcagatcgaatacatatagtaggtaggctaaaacagaagagtctttagaactagtgcaactccagtgaaattttttatgtacaggacatctgcagtttataaagaattctgtttctgccaccagcagtttgacctgtagtcacacaggattttatgataataacagagatgaaaatggacttttattttctctctgtttggtgctctaagtgggtttgtagccacttttctgttactttatgattctcatttcaacaggaatggccagtaaaagttgttttatttttcctgttaaggtttataacctttttacatttttgacctgtattagattagaatttcattatgcattccttttagttgaggcgcttcatagttttctggagatagtcaatttttagttttttattatacatttgaatggccgttttcctgctttgtctgcctgcacattgtatatttgtttaaaaatattctctacttttagtctatgtaagtttcatttagaaagacatgcatttatattttgtttctgtaatattctactgtaggtgaaatcttttcaaaaatcaagagactgggtagataagaatatatgaatgactaatatacaaaagatttaaaccattgtgatggcgtatattctcaaatggtaatatcttgcaatggcacacagatttaatggataaaggtatacctcagacttcactgtgctcacaaatctttgaggagaaagtttggtcacctgtttggcttgatttagttactgctgcctttggttttctccaggaatgaagtattcagcacagtgactcagtatttttagttattttgcatgggctggtagtacctctgttatgctctcagttacaatcaatttaaaactgtataacagtcttggtacctaacagtagctatgcataatcctgtggcacagtacactcccaagccaccaatgcagttaatatgctctcatagtggtttttctatgctatatgaaaatagtcttcaagccttggttctctaatgcagctaccacaagaggttgatatttttatagtggcgtgtaatctccttttcgggaggctttttatggaaggtagaatttgtaaaagttcgtatgctttgcctctcaactgcattaacatgccacaggctcagactgtttttgtgtaaaggatgtcaaagaacggcactttttctaaagagaagtttgatattttgtatgcttgttaagaaagtacagtattggaaattaaaggtggacaactgataattgaggagtatgtcaattaattttttatgtatattacctgtttacttgtacaacttactgtacaaattacatgcagcttcattttcaaatgaatccttaaaataaggaaatctttttaggaaaacatttaatttttgtatttttgattttaaaggcatgagttatgtcaattttcagtgtattaatgaagattttaacttttcatcaggttgagtgttttcttactatattatctgttgtgtatgtagttagcatattgtgtcactgaactgtttaaaaatctagcatgtagagcaagcctgttttgtggaaaatccttattcattaaaaaaataatcatggcagattttctgcaaaaaaaaaacaaaagcatttgcaattcagaatactgatttttttaattttatttaaagaaaggtattttgcttgcaggaaaaaaatactacagattcattttaatgagaatctttgaaatgtatttatctttagggcatctgggcatctttatgctgtttgtcttctgtctttcttgaaataaaatgtacatacgttacctttacatatgctcttgctcaaaattgtgaacctagttacatttctccctgctcccttcctttttatgctcaaacagcgaaacccaaaacttaaaagatctgaactttcagcatgcattctgattgctgaaagatttcctgatttagtgcattctcaaaagggctttcccataatctaaagggaaatgtaagcacctatactcttgtgcctgtgggcacttcaataataaaaaccaactttttaaactaatcatcttttatcaatgataaagttgttttcagtcccacactaggagagttcctttaagtcagctgatcaagcataagatacttccgtaaagaaataaactaagaaaattttttatggcttgagaaaattccttgaggccaaattaatatatttttctttgttattttatttgagtcattttaaatttgttaatacaaaatttaagataatttacagagacaatttatccagcttccttctaccttaatacaatgttttgtcttcccattatcctctcttttctttatctgttggtagatgtaaaaaacttccatttagttaatcggaggtgtgtattttttaaattgaaatgtgcccagccccttcagctcacacaggaaacatgaactcttaaaaaactgactagtaaatgcaggagaggtggatacctgatgagacacagcgaaagtgacctgtatacacattacaactctggagtacatattaaagtcgtgctatttccagtggtaaatgtctgacttttaagacattcttttaaatatttgtatcattgttaggatgttttaatcagttgttttttaattccatgtaatatatgtagccctcatcagatttatatcaccatatttctccttgtgtcctaagagaattgatgacaattcgtaaccataaattgttttatattagctagtatgtatatttatttttacccaatggctttatctgtttcccaaaatttgtttgggatttgttgaaagcattgtgtaacttctataaacggctattttcttgtaactgtcagtgaaa

SEQ ID NO: 4286 - DNA, 2162 bp, Homo Sapiens
  NM_016397
atgcgccgcgctcgctcgcgggagggcatggcgggggccgtgccgggcgccatcatggacgaggactactacgggagcgcggccgagtggggcgacgaggctgacggcggccagcaggaggatgattctggagaaggagaggatgatgcggaggttcagcaagaatgcctgcataaattttccacccgggattatatcatggaaccctccatcttcaacactctgaagaggtattttcaggcaggagggtctccagagaatgttatccagctcttatctgaaaactacaccgctgtggcccagactgtgaacctgctggccgagtggctcattcagacaggtgttgagccagtgcaggttcaggaaactgtggaaaatcacttgaagagtttgctgatcaaacattttgacccccgcaaagcagattctatttttactgaagaaggagagaccccagcgtggctggaacagatgattgcacataccacgtggcgggaccttttttataaactggctgaagcccatccagactgtttgatgctgaacttcaccgttaagcttatttctgacgcagggtaccagggggagatcaccagtgtgtccacagcatgccagcagctagaagtgttctcgagagtgctccggacctctctagctacaattttagatggaggagaagaaaaccttgaaaaaaatctccctgagtttgccaagatggtgtgccacggggagcacacgtacctgtttgcccaggccatgatgtccgtgctggcccaggaggagcaggggggctccgctgtgcgcaggatcgcccaggaagtgcagcgctttgcccaggagaaaggtcatgacgccagtcagatcacactagccttgggcacagctgcctcctaccccagggcctgccaggctctcggggccatgctgtccaaaggagccctgaaccctgctgacatcaccgtcctgttcaagatgttcacaagcatggaccctcctccggttgaacttatccgcgttccagccttcctggacctgttcatgcagtcactctttaaaccaggggctcggatcaaccaggaccacaagcacaaatacatccacatcttggcgtacgcagcaagcgtggttgagacctggaagaagaacaagcgagtgagcatcaataaagatgagctgaagtcaacgtcaaaagctgtcgaaaccgttcacaatttgtgttgcaacgagaacaaaggggcctctgaactagtggcagaattgagcacactttatcagtgtattaggtttccagtggtagcaatgggtgtgctgaagtgggtggattggactgtatcagaaccaaggtactttcagctgcagactgaccatacccctgtccacctggcgttgctggatgagatcagcacctgccaccagctcctgcacccccaggtcctgcagctgcttgttaagctttttgagactgagcactcccagctggacgtgatggagcagcttgagttgaagaagacactgctggacaggatggttcacctgctgagtcgaggttatgtacttcctgttgtcagttacatccgaaagtgtctggagaagctggacactgacatttcactcattcgctattttgtcactgaggtgctggacgtcattgctcctccttatacctctgacttcgtgcaacttttcctccccatcctggagaatgacagcatcgcaggtaccatcaaaacggaaggcgagcatgaccctgtgacggagtttatagctcactgcaaatctaacttcatcatggtgaactaatttagagcatcctccagagctgaagcagaacattccagaacccgttgtggaaaaaccctttcaagaagctgttttaagaggctcgggcagcgtcttgaaaatgggcaccgctgggaggaggtggatgacttctttacaaaggaaaatggcaggcgctgggctcccacgacccctcaggacagatctggccgtcagccgcgggccgctgggaactccactcggggaactcctttccaagctgacctcagttttctcacaagaacccagttagctgatgttttattgtaattgtcttaatttgctaagaacaagtaataagtaaatttttaaaaagcctttctgctgggttggattaaaaaaaa

SEQ ID NO: 4287 - DNA, 1351 bp, Homo Sapiens
  NM_016400
agagaaggcctcgcacaaaacactgtacaaacccgaaaggaagtctgagagacgaaccgccttcctccctgaagcttctagaactggagcagaaagaaggtgtggcccagggccagccccgcctcctccccgggcggaagctgtgtcagttgccggaagtcggcgtgaggtggggcttatgcggcggcgtggtgaaatagatatggcgaccgagggggatgtggagctggagttggagactgagaccagtggaccagagcggcctccggagaagccacggaaacatgacagcggtgcggcggacttggagcgggtcaccgactatgcagaggagaaggagatccagagttccaatctggagacggccatgtctgtgattggagacagaaggtcccgggagcagaaagccaaacaggagcgggagaaagaactggcaaaagtcactatcaagaaggaagatctggagctaataatgactgagatggagatatctcgagcagcagcagaacgcagtttgcgggaacacatgggcaacgtggtagaggcgcttattgccctaaccaactgatgcgtgctttctcaaatatacctactggattaatttatggcaataaaatttttttttgtctttttcagttttatcatcttgggtcaagtagagtgtatactatatcctatgttgtggagaatttatatgttggagactaactgaatttaagtgacccattaaaatctagcacacctgtatgaaaaatcagtgtagaagaatacctcatgtgcagatgctaggtggcaggccagtctcattcatctgactagctctcaacagtattcaaggtacatctggagtctcagcagagttactgtactcaaatggcatgtgtctccaagacagcttatgaatatctaaaaggccagctacctgcctaggagccactatatatatagatagatgtaggttatgaacccagttcataggccaccttgagttagaattttggtacctacaacatgcttgattttgagtgattaaaaaaaaataatttggctgggtgctgtggctcacacctctaatcccagcactttgggaggtcgaggcaggtagatcacgaggtcaggaattcaagaccagcctggccaacatgtgaaaccccgtctccactgaaaatagaaaaattagctgggcatggtggtgggcgcctataatcccagctattctggaggctgaggcaggaatcgcttgaaattggaaagcagaggttgcagtgagctgagatcacactactgtactactgtactccagcctgggggaaagagtgaaactccatctcaaaaaaaaaaaaaaaaaaaa

SEQ ID NO: 4288 - DNA, 1654 bp, Homo Sapiens
  NM_016407
agcgtgctgcgtcacggcggtgcgccggaagtggctgcggatttcgccggaaatcccggaagtgacagctttgggggtttgctgctggctctgactcccgtcctgcgatgggttgcgacgggggaacaatccccaagaggcatgaactggtgaaggggccgaagaaggttgagaaggtcgacaaagatgctgaattagtggcccaatggaactattgtactctaagtcaggaaatattaagacgaccaatagttgcctgtgaacttggcagactttataacaaagatgccgtcattgaatttctcttggacaaatctgcagaaaaggctcttgggaaggcagcatctcacattaaaagcattaagaatgtgacagagctgaagctttctgataatcctgcctgggaaggggataaaggaaacactaaaggtgacaagcacgatgacctccagcgggcgcgtttcatctgccccgttgtgggcctggagatgaacggccgacacaggttctgcttccttcggtgctgcggctgtgtgttttctgagcgagccttgaaagagataaaagcggaagtttgccacacgtgtggggctgccttccaggaggatgatgtcatcatgctcaatggcaccaaggaggatgtggacgtgctgaagacaaggatggaggagagaaggctgagagcgaagctggaaaagaaaacaaagaaacccaaggcagcagagtctgtttcaaaaccagatgtcagtgaagaagccccagggccatcaaaagttaagacagggaagcctgaagaagccagccttgattctagagagaagaaaaccaacttggctcccaaaagcacagcaatgaatgagagctcttctggaaaagctgggaagcctccgtgtggagccacaaagaggtccatcgctgacagtgaagaatcggaggcctacaagtccctctttaccactcacagctccgccaagcgctccaaggaggagtctgcccactgggtcacccacacgtcctactgcttctgaagcccgcactgccaccgctcctgccccagaaggttgtttagtttccacgtaggcaggtcgctttgtgcctctgagtgcgctgctgtgtgttctctctatagttctgtgtcataaagctgtcctggccagccttcaagctggtgtggccactcttgatgtgaggcgtgtcggttccaggggggacatgggaggggctgcacagtggcccgaggtcatgcttgcttccacctgcaggtgcatttggtcctttccatggccaggaagccctgtgggctgcactttttatgcttgcagtaacaagagactccagagtcctcaccggtgcagagttggcacatattaattaactaaaattctaatgatcttgctaccagcaataaatcaagtaggccaagtgaaactgggctttaaaaaggatggatttcaaatacactgtgcccactagaagcttcgaagggcctcgtccctctgctacagccctgggaggagccaggatccttgttggtctagctaaatactgttaggggagtgtgccccatctcatcatttcgaagatagcagagtcatagttgggcacccagtgattgggttcaaaaataaagctggtctgcctcttctctcaaaaa

SEQ ID NO: 4289 - DNA, 2104 bp, Homo Sapiens
  NM_016408
cggaagtcgcttgtgtatgaacgcagcggcggacctgtgaggggatccgacttgccggcagaacttacgctgcgggaccccgggcactgttgctgctgcgggagactgtgggctgtttagtgccatgcaccctttacagtgtgtcctccaagtgcagaggtctctggggtggggaccattggcctctgtgtcttggctgtcgctgaggatgtgcagggcacacagcagtctctctagtaccatgtgtcccagtccagagaggcaggaggatggagctcggaaggatttcagctccaggctggctgctggaccgacttttcaacattttttaaaaagtgcctcagctcctcaggagaagctgtcttcagaagtggaagacccacctccctatctcatgatggatgaacttcttggaaggcagagaaaagtctacctcgagacctatggctgccagatgaatgtgaatgacacagagatagcctggtccatcttacagaagagtggctacctgcggaccagtaacctccaagaggcagatgtgattctccttgtcacatgctctatcagggagaaggctgagcagaccatctggaaccgtttacatcagcttaaagccttgaagacaaggcggccccgctcccgggttcctctgaggattggaattctaggctgcatggctgagaggttgaaggaggagattctcaacagagagaaaatggtagatattttggctggtcctgatgcctaccgggaccttccccggctgctggctgttgctgagtcgggccagcaagctgccaacgtgctgctctctctggacgagacctatgctgatgtcatgccagtccagacaagcgccagtgccacgtctgcctttgtgtcaatcatgcgaggctgtgacaacatgtgtagctactgcattgttcctttcacccggggcagggagaggagtcggcctattgcctccattctagaggaagtgaagaagctttctgagcaggggctgaaagaagtgacacttcttggtcagaatgttaatagttttcgggacaattcggaggtccagttcaacagtgcagtgcctaccaatctcagtcgtggctttaccaccaactataaaaccaagcaaggaggacttcgttttgctcatcttctggatcaggtctccagagtagatcctgaaatgaggatccgttttacctctccccaccccaaggattttcctgatgaggttctgcagctgattcatgagagagataacatctgtaaacagatccacctgccagcccagagtggaagcagccgtgtgttggaggccatgcggaggggatattcaagagaagcttatgtggagttagttcaccatattagagaatctattccaggtgtgagcctcagcagcgatttcattgctggcttttgtggtgagacggaggaagatcacgtccagacagtctctttgctccgggaagttcagtacaacatgggcttcctctttgcctacagcatgagacagaagacacgggcatatcataggctgaaggatgatgtcccggaagaggtaaaattaaggcgtttggaggaactcatcactatcttccgagaagaagcaacaaaagccaatcagacctctgtgggctgtacccagttggtgctagtggaagggctcagtaaacgctctgccactgacctgtgtggcaggaatgatggaaaccttaaggtgatcttccctgatgcagagatggaggatgtcaataaccctgggctcagggtcagagcccagcctggggactatgtgctggtgaagatcacctcagccagttctcagacacttaggggacatgttctctgcaggaccactctgagggactcttctgcatattgctgacctgagaggatggcctcagagctgacttgggcaatcctccccaacaggaaggggagacattgcctgccactgaggaaacaggtcatgaaggtggagataagctgcaaggggcgaagcaactttatgtcagtggaaaacgtgtctctttaaagctgctatgtgaacagcttttacagtcattaaatttacctaaactaaggttaaaaaaaaaaaaaa

SEQ ID NO: 4290 - DNA, 2070 bp, Homo Sapiens
  NM_016410
ctgcaggctctctccgagagcaccaagtccttttgctctccatccccggaagacccggctgaaaatccggaaaaagaatcgggaaacgccaggaggcatattgcgcttgcgcacggaggggccggaagtcgaggcgggagtgactctgcttccgtttctggttttgctctagtgtttgggtttcttcgcggctgctcaagatgaaccgactcttcgggaaagcgaaacccaaggctccgccgcccagcctgactgactgcattggcacggtggacagtagagcagaatccattgacaagaagatttctcgattggatgctgagctagtgaagtataaggatcagatcaagaagatgagagagggtcctgcaaagaatatggtcaagcagaaagccttgcgagttttaaagcaaaagaggatgtatgagcagcagcgggacaatcttgcccaacagtcattcaacatggaacaagccaattataccatccagtctttgaaggacaccaagaccacggttgatgctatgaaactgggagtaaaggaaatgaagaaggcatacaagcaagtgaagatcgaccagattgaggatttacaagaccagctagaggatatgatggaagatgcaaatgaaatccaagaagcactgagtcgcagttatggcaccccagaactggatgaagatgatttagaagcagagttggatgcactaggtgatgagcttctggctgatgaagacagttcttatttggatgaggcagcatctgcacctgcaattccagaaggtgttcccactgatacaaaaaacaaggatggagttctggtggatgaatttggattgccacagatccctgcttcatagatttgcatcattcaagcatatcttgtaaaacaaacacatattatgggactaggaaatatttatctttccaaatttgccataacagatttaggtttctttcctttctttgaaggaaagtttaattacattgctcttttattttttccattaagagactcattgcttgggaaatgctttcttcgtactaaaatttgattcctttttttcttatgaaaaacgaactcagtttaaaagtatttttagctcgtatgacttgttttcattcattaataataatttgaaataaaactaaggaaatggaatcttaaaagtctatgacagtgtaactctacagtctcaaaatgacctgataaattgataagacaaagatgagattattggggctgttcatattatgattcagaatcattttctattgtggtattataggttggttaaagtgatggcctttttgatgggttttgttgtgtcttgtgaacaagtcgttactgtgtccattattggaatggaattatcactactgtatcatgagtgggtattttgattctatggttccctcagtattacatcttgacttgtaatcaattatgaatatttcttgatatttaatgtataggacatttatttatactcaataaatatttttcaaaaggatataattttaataatatcacttcagcttaaaacctctactgcggaaaccaaatttaatagaattttaatgtcatttcagcctataactccactacagaaaccaaattaaccagtagcattgtgaggaaagagcaaggaacaatctgggcttgggccctgggtctaccatttactaactactgagtagtctattcaacctctctaaccttctgtttccttattagtaaaatcatgcttaactcacagagcttttgtgaggaataattgaggtaatggtcataagtaccttgttaactgcaaggggctattcttatatgagggattgttaacaataaaaaagaaactgcttcattcttttcttggaaggtgcctggagtactacagcaagttcaaactcctgcccaatttcagggtctttaatgatcctgtcctcccttcctcattcaacttgttgccaacagcatggcccctccagcctagctgggtgcctcacagtgctatgtgcacctgactctcatgtgtctgcagatcaaaccaataaacatttaggaacacc

SEQ ID NO: 4291 - DNA, 1182 bp, Homo Sapiens
  NM_016417
aatgagggcctccagggggcgggtcggactgccgcgggccggggagcgctctgggtggccagctgtgggcccgggccgtcgtgggctccggcttgcgtgcggagatgagcgggtccctcggccgagctgcggcggctctgctccgctgggggcgcggcgcgggcggcggtggcctttggggtccgggcgtgcgggcggcgggctcgggcgcgggcggcggcggctcggcggagcagttggacgcgctggtgaagaaggacaaggtggtggtcttcctcaaggggacgccggagcagccccagtgcggcttcagcaacgccgtggtgcagatcctgcggctgcacggcgtccgcgattacgcggcctacaacgtgctggacgacccggagctccgacaaggcattaaagactattccaactggcccaccatcccgcaagtgtacctcaatggcgagtttgtagggggctgtgacattcttctgcagatgcaccagaatggggacttggtggaagaactgaaaaagctggggatccactccgcccttttagatgaaaagaaagaccaagactccaagtgagggcggccaagtcctcgctgagcagagagggagccgttcatgtcagagactcactgccagaaaagccttacccattttggttttcactattgagaccgcaactgcttgcactgatcattttggttcgtgagcagttggtgattttagttggtctggtgttcgggctaagaatattttattgtggacttaattacaaccactgcactgtaatgattcaatgctgtattatgatattgctgtaaacaaaattcattcttatattgtcacttattctttgcctgattcagaagttaaataggagctttggaatcattattcatgacccctctgcaaatgtgtcagtctccaaagagagtatctccccccaaattttgtgtagcttcttttgttatggaaaatggtgaacaaaaaaagaaactgtgataactggggcgttgttttttaaaataaactccagcacagggatgctgtgcatgcctgagttgattccgaagtgcatatgtctgtaaggatttggagtgcctgcagtgttttatgtgtgggaagtaagggtgagtctcatattcttctattaaatttgccacaagaattgcaaaaaaaaaaa

SEQ ID NO: 4292 - DNA, 3525 bp, Homo Sapiens
  NM_016424
acggcatgctgggaaggcgtccgcgcggcggccattttgtcttgtcggctcctgtgtgtaggagggatttcggcctgagagcgggccgaggagattggcgacggtgtcgcccgtgttttcgttggcgggtgcctgggctggtgggaacagccgcccgaaggaagcaccatgatttcggccgcgcagttgttggatgagttaatgggccgggaccgaaacctagccccggacgagaagcgcagcaacgtgcggtgggaccacgagagcgtttgtaaatattatctctgtggtttttgtcctgcggaattgttcacaaatacacgttctgatcttggtccgtgtgaaaaaattcatgatgaaaatctacgaaaacagtatgagaagagctctcgtttcatgaaagttggctatgagagagattttttgcgatacttacagagcttacttgcagaagtagaacgtaggatcagacgaggccatgctcgtttggcattatctcaaaaccagcagtcttctggggccgctggcccaacaggcaaaaatgaagaaaaaattcaggttctaacagacaaaattgatgtacttctgcaacagattgaagaattagggtctgaaggaaaagtagaagaagcccaggggatgatgaaattagttgagcaattaaaagaagagagagaactgctaaggtccacaacgtcgacaattgaaagctttgctgcacaagaaaaacaaatggaagtttgtgaagtatgtggagcctttttaatagtaggagatgcccagtcccgggtagatgaccatttgatgggaaaacaacacatgggctatgccaaaattaaagctactgtagaagaattaaaagaaaagttaaggaaaagaaccgaagaacctgatcgtgatgagcgtctaaaaaaggagaagcaagaaagagaagaaagagaaaaagaacgggagagagaaagggaagaaagagaaaggaaaagacgaagggaagaggaagaaagagaaaaagaaagggctcgtgacagagaaagaagaaagagaagtcgttcacgaagtagacactcaagccgaacatcagacagaagatgcagcaggtctcgggaccacaaaaggtcacgaagtagagaaagaaggcggagcagaagtagagatcgacgaagaagcagaagccatgatcgatcagaaagaaaacacagatctcgaagtcgggatcgaagaagatcaaaaagccgggatcgaaagtcatataagcacaggagcaaaagtcgggacagagaacaagatagaaaatccaaggagaaagaaaagaggggatctgatgataaaaaaagtagtgtgaagtccggtagtcgagaaaagcagagtgaagacacaaacactgaatcgaaggaaagtgatactaagaatgaggtcaatgggaccagtgaagacattaaatctgaaggtgacactcagtccaattaaaactgatctgataagacctcagatcagacagaggtaagtgtattgtttctcactttgattagggctttttgttactgtttgacagtgcagcgtaagtatgcacagatgaagatggaactaagccgagtaagaagacatacaaaagcctcttctgaaggaaaagacagtgtagtcctgcaaaacattttgaggtacattgttttgtctcagctattttgtagcagactcgtgcccccattagtgtgcctctttggaaattatcgcccacatttgtaatatagtcgccattgaaaagttaattatcctttttttagggattttgatgtcatttcttttttttttttaataaaaaggttgaactgtttttttttttctttttggtattaagtccatcttgtgttggtacattggcagagacatatgctttaaaaacttaaatatttcggaggcacatgttggactactttgttttaattaaactgctagtatttctttgtcaaggatgtttctagttttttgctttattgccttgcattctaatgcagtttgttctgtaactcgagagccagtagcattggattgatggaagtgtagggtttatgaattattgcagctgactaccatacctcacacagcgttggtgttgtgagcggcccatgaaaagccaaattaaaaatcaaggattcagtcaaactaagcaggtactcatgccaggtactcctttctctacccacatccatgtttgaatgctattgcctgtgatctttacgcttaactgttgtgtatcttttttgttctttacaagaagtgcagaggggttttttgtgtattgcgtgaaaacttataaaacaaatgttaacagaatggaattttttttcaactgtatgtagggctgcagtggtggccagaattagatatctttaaagaattttaaatacaataaacacttcatattattcgccttgttacactcaatgcaattctcaagtctataagaggtatgtgcttaatatttcctactgtgtaggagaatttgcagtcagccataggtatgtaggaatagtcactcactggctgatacatttaaagcagcagtgtgaatagcaaggacagacaccttcaatttgtgaaatcaaagaactgatgcactatatagaacgaatttgggtttttaaagaaatattaaaagttaggtactgtaagtgttcttaaaacctgtaaacttcattctgtgggctagtggtgtgggacaaaatattcctaatgaaaggaagtaccaattagttgatttgttggtggcattccccttttgggaaagcaatgtaaggttatgtctgtgtatgtcattcacacttaggcaagcatacacaggcacatggctttaagaaccacactgatgccttgataattaaaaagaatacaagcattccatgtacacatgttaattagcagttagtgactgggccaacactttctcataaaaattggccttttacatgttgtctaattatcatttttccccaaattttgcgttgtaggactactgttcgaagatttttggaagaatactgagaacggcataaagtgaagatcgacatttaaaaaatgaggtgaaagaaagctatagtggcatagaaaaagtataaagctcagttagtttttttattattattattattaaaagttaattcaggactgatgtgacctaccagatttcagaacatgtgttaatagtatatatgccactgaaaacttaggtcctgtatcatacttttttctttaagactttttaagaaatattacttaaacatgtggcttgctcagtgtttaattgcaagttttcaatcttggactttgaaaacaggattaaacgttagtattcgtgtgaatcagactaagtgggatttcatttttacaactctgctctacttagcctttggatttagaagtaaaaataaagtatctctgactttctgttacaaagttgattgtctctgtcattgaaaagttttagtattaatctttttctaataaagttattgactctgaaaaaaaaaa

SEQ ID NO: 4293 - DNA, 3128 bp, Homo Sapiens
  NM_016426
attcgctgcgctgaagcagtgcgcatgcgcactggacgcttcttaccagcgtcctgactacaatacccaggacgcacccagcccgccgcctctcggagcccttttcaaaccgaccaatcggcaacccgcgtctcccggcgccgcgtttaaatccgtgccggaggcgcgtcctgcatcgtctgccgctttggtgacttctgacagctctctccatggaaggaggcggcggccgcgatgagccttcagcctgccgggcaggggacgtgaacatggatgaccctaagaaggaagacattcttcttttggccgatgaaaaatttgacttcgatctttcattgtcttcttcgagtgcaaatgaagatgatgaagtcttcttcggaccctttggacataaagaaagatgtattgctgccagcttggaattaaataatccggttcccgaacagcctccgttgcccacatctgagagtccctttgcctggagccctctggccggggagaagttcgtggaggtgtacaaagaagctcacttactggctttacacattgagagcagcagccggaaccaggcagcccaagctgccaagcctgaagaccctcggagccagggcgtggaaagattcatacaggagtcaaaattaaaaataaacctctttgagaaagaaaaggaaatgaagaaaagccccacgtctcttaaaagggagacatactacctgtcagacagccccttgctggggccccctgtgggtgagcctcggctcttggcctcctccccggccctgcccagctctggtgcccaggcccgcctcacccgggcgccggggcctccgcactctgctcatgctttgcccagggaatcatgcactgctcatgctgcaagtcaggcagcgactcagaggaagcccgggaccaaattgctgctgcctcgagcggcctctgttagaggaagaagcatccctggggctgcggagaagcccaagaaagagattccagctagtccttccaggacaaaaatcccagctgagaaggaatcccaccgggatgttctccctgacaaacctgccccgggtgctgtcaatgtgccggccgccggaagccacttgggccagggcaagcgggcgatccctgttccaaacaagttggggctgaagaagaccctgttaaaagcacccggctctaccagcaatctcgcaaggaagtcctcctcggggcctgtttggagcggggcatccagtgcgtgcacatccccagcagtgggcaaagctaaatcaagtgaatttgcaagtattcctgcaaatagctcccggcctctgtcaaacatcagcaagtcaggcagaatgggacccgccatgctgcggccagctctgcctgcaggccctgtgggggcatcctcctggcaggccaagcgggtcgatgtttctgagctggcagcggagcagctcacggcacccccctcagcatcccccacccaaccccagactccggaaggtggcggccagtggctgaactccagttgcgcttggtcagaatcttctcaattgaataagactagaagtatcagacggcgagattcctgtctaaattccaagacaaaggttatgcctactcctacaaatcaatttaaaattcctaagttttctattggtgactccccggacagctcaacaccaaagctttcgcgggcacagcggccgcagtcgtgcacgtcagttggcagggtcactgtccacagcaccccggttagacgctcatctgggccagcaccacaaagcctgctgagcgcacggcgtgtgtcagccttgcccacacccgccagccggcgctgctctggccttccaccgatgacccccaaaacgatgcccagggccgtgggctctcccctgtgtgtgccagctcggagacgttcctctgagccccgcaagaactctgcaatgagaactgaaccaacaagggagagcaacagaaagacagattccaggctggtggatgtgtcccctgacaggggttctcctccttcccgtgtgcctcaggcacttaacttttctccagaggaaagcgattctactttctccaaaagtactgccacagaagtagctcgggaggaagccaagccgggtggagatgcagcccctagtgaggctcttcttgtagatatcaaactggaaccactcgcggtcactccagatgctgcaagccagcccctcattgaccttcctctcatcgacttctgcgataccccagaagcacacgtggctgtaggatctgaaagcaggcctctgatcgacctcatgacaaacactccagacatgaataaaaatgtggccaaaccttcaccggtggtgggacagctcatagacctgagctcccctctgatccagctgagccctgaggctgacaaggagaacgtggattccccactcctcaagttctaagccgaaccaaatcctttgccttgaaagaacagccctaaagtggttttcaaccctcagaaacaagctttaggctggtcgcagtggcttacacttgtaaccctagaacttgggaggctgaggtgggcggattacttgagcccaggagttcgggaccagcctgggaaatatagtgaaactcctgtccctacaaaaaatacaaaaattagccgggtgtggtagtgcatgcctgtagtcccagctacttgggaggctgaagtgggaggatggcctgagctcaaggagatgcaggctgcagtgggctgtgattgtgccactgcactccagcctgggcaccaatgtgagaacctgtcttggaaaaaaaaaaaaagaaacatgttttagtagaagttttatttgaaaaagaaaaataagcataaatatattcccagtgctggagagggtgggctgagggactggggccagcacggaccacccaaggcctctgcttcccgccgccaccctcctcgctgccattctctgggctggaatgtgaagcctcagtcactctaaatgaagaattttcttttgaatgttttgtatgtaaaatagcaagtggctatttttaaagttaagtttgtataaatagttagatattctagatttacattaaattgtaaaataaatggacttattgaagcataaaaaaaaaaaaaaaaa

SEQ ID NO: 4294 - DNA, 2129 bp, Homo Sapiens
  NM_016428
tcctatccaccctccactcccctgtcccttggtgactcatccctgagcttcccaaggaagcccccaccctctgccctttcctcccgccttccatgagtggaaaatccacctccgccccctatagcaggccagcccccttcctccccagtctccgaccccatcccccagccgaccagtttcctctccaggaccagggagcaatcacagctgccccgaccttggcttcctctgctgggtgggattgggggctgggcccccaaatgggcccctggcttcccccttcctctgggcaggggacagagagacacaggctcggggagcaggactgacttcctcttgtcccggaatgagcatgcctgccctttgcaagcaggtttgggtctcacgcagaggaaaccaaaagcaataagagggagggaaggcagagcaaccaatcaagggcagggtgagactcaaaacgagcgggctccctggggagccagacagaggctgggggtgatggcggagctacagcagctgcaggagtttgagatccccactggccgggaggctctgaggggcaaccacagtgccctgctgcgggtcgctgactactgcgaggacaactatgtgcaggccacagacaagcggaaggcgctggaggagaccatggccttcactacccaggcactggccagcgtggcctaccaggtgggcaacctggccgggcacactctgcgcatgttggacctgcagggggccgccctgcggcaggtggaagcccgtgtaagcacgctgggccagatggtgaacatgcatatggagaaggtggcccgaagggagatcggcaccttagccactgtccagcggctgccccccggccagaaggtcatcgccccagagaacctaccccctctcacgccctactgcaggagacccctcaactttggctgcctggacgacattggccatgggatcaaggacctcagcacgcagctgtcaagaacaggcaccctgtctcgaaagagcatcaaggcccctgccacacccgcctccgccaccttggggagaccaccccggattcccgagccagtgcacctgccggtggtgcccgacggcagactctccgccgcctcctctgcgtcttccctggcctcggccggcagcgccgaaggtgtcggtggggcccccacgcccaaggggcaggcagcacctccagccccacctctccccagctccttggacccacctcctccaccagcagccgtcgaggtgttccagcggcctcccacgctggaggagttgtccccacccccaccggacgaagagctgcccctgccactggacctgcctcctcctccacccctggatggagatgaattggggctgcctccacccccaccaggatttgggcctgatgagcccagctgggtgcctgcctcatacttggagaaagtggtgacactgtacccatacaccagccagaaggacaatgagctctccttctctgagggcactgtcatctgtgtcactcgccgctactccgatggctggtgcgagggcgtcagctcagaggggactggattcttccctgggaactatgtggagcccagctgctgacagcccagggctctctgggcagctgatgtctgcactgagtgggtttcatgagccccaagccaaaaccagctccagtcacagctggactgggtctgcccacctcttgggctgtgagctgtgttctgtccttcctcccatcggagggagaaggggtcctggggagagagaatttatccagaggcctgctgcagatggggaagagctggaaaccaagaagtttgtcaacagaggacccctactccatgcaggacagggtctcctgctgcaagtcccaactttgaataaaacagatgatgtcctgtgactgccccacagagataaggggccaggagggattgaaaggcatcccagttctaaggctgctgctaattacagcccccaacctccaacccaccagctgacctagaagcagcatcttcccatttcctcagtacccacaaagtgcagcccacattggaccccagacacccctctgcagccattgactgcaacttgttcttttgcccattgaaaaaaaaaaaaaaaaaaaa

SEQ ID NO: 4295 - DNA, 2371 bp, Homo Sapiens
  NM_016433
ccggagcctgcggcgggcggctgtgacggccccggcgctgacggcggcggccgggggggcggtgtcgacgcccgcggcgccggctggggcatcaccgcgggcctcgaccccgaaatggcgctgctggccgaacacttgctgaagccgctgcccgcggacaagcagatcgagaccgggcccttcctcgaggcggtgtcccacctgccgcccttcttcgattgccttgggtccccagtgtttactcccatcaaggcagacataagcggcaacatcacgaaaatcaaagctgtgtacgacaccaacccagccaagttccggaccctgcagaacatcctggaggtggagaaagaaatgtatggagcagagtggcccaaagtaggggccacactggcgctgatgtggctgaaaagaggcctccgcttcatccaggtcttcctccagagcatctgcgacggggagcgggacgagaaccaccccaacctcatccgtgtcaacgccaccaaggcctacgagatggccctcaagaagtaccatggctggatcgtgcagaagatcttccaggcagcactgtacgcagcaccctataagtctgacttcctgaaagcgctctccaaggggcagaatgttacggaggaggagtgcctggagaagatccgcctcttcctagtcaactacacggcgaccatcgatgtcatctacgagatgtacacccagatgaacgctgagcttaactacaaggtgtaggcatgcccactgctggacacgtccccgactcgtggccacatggagaaacaggcaaaccagaatcactgtgaatcaagtcggtgaactgcccctggcctgtgtcccccagagcagcccagggtcctgccagagtctgcaggggacagccctcgttttttaagtcttttttttttttttttttggtctattctaaaggaccagtaaataatgatcttacttccaaatctccttggaatttcacgacagcacagactgactttataccttcatttcagcgtggtaaaaaccgattaacacttctaatgagtcaagtcctagggttttttggttttgttttgttgccaacgaggaacacagctctgggggaatggtgtcatccacctcgctttaaaaataagcacatgatggctgggcaccgtggctcacgcctgtaatcccagcactttgggaggctgaggcgggtggatcacctgaggtcgggagtttgagaccagcctggccaacatggtgaaaccccatcgctactaaaaatataaaaaattagctgggcatggtggcgcacgcctgtagttccagctactcaggaggctgaggcaggagaatcgcttgaacccgggaggtggaggttgcagtgagctgagatcgcaccattgcactccagcctgggcaacaagagcgaaactctgtctcaaaaaaaaaaaaaagaggtgggtggattacttgaggtcagggtttgagatcagcctgaccaacatggtgaaaccctatctctactaaaaatatagaattagccaggcatggtagcgcacgcctgtaatcccatcttcttgggaggctgaggcaggagaatcgctagaaactgggaggtggaggttacagtagccgagatcgcgccactgcattccagcctgggcaacaaaagcgaaactctgtctcaaaaaagaaaaaaaagaaaaaaaagcacgtgaccttatgaggctctcgctgtattgttattttaaggactataaagagtttgatttaaaattatgcagggcccctatgtgggattttttaaaaagcaaactggtgtgtattctcatgtggtttgcacagcccagcctcacagcactattgtaaaccctgctctttctgtctcgctagacagatttttttgtttgttttcttttttctggttgttttttgttgttgttgttgttgttttacagctgaaaccaaccagcaagcccttgatgaccaagaggcgtttctttcaaagctatagggcacaaacaattgaccatagatgactccgtttgcattcttctgcagaattatttccttcagggacagattttccaacctaagaaactacctaccgtgtgtattctcttgacggggagagatgaacccttcagctgctaagatccaagaaaacgcctcactgccttaaccttaactgttcttcctggcgctaaaaagagctgtattttttaaagtgctggggcaaacaaagcaaccccaaaagagttgatgtgtgttttaaaagaaaaaacccaatgaggaacaattggagatttttatgcagaaactaaataatccttaataaataaatctctattttggaatcacaaaaaaaaaaaaaaaa

SEQ ID NO: 4296 - DNA, 5899 bp, Homo Sapiens
  NM_016436
gggggtcacgtggtgcagagcacgcagagtccttctgtcggttggtcctggagcggcgcagccggagtggggccgtgaggagaataaaggcagccccgttgatgactgaaaatgacaaagcatccacctaacagacgaggaatcagctttgaagtgggagcccagttggaagcccgggaccgtttaaaaaactggtatccagctcacatagaagacattgactacgaggaaggaaaagtactcatccatttcaagcgttggaaccatcgttatgatgagtggttctgctgggacagtccttatttacgccctttagagaaaatacagctgaggaaagagggcttgcatgaagaggatggatcttctgaatttcaaataaatgagcaggtccttgcttgctggtctgattgtcgtttttacccggccaaagtcactgctgttaacaaggatggtacttacactgtgaaattttatgatggagtagttcagactgtcaaacatattcatgtcaaagctttttccaaagatcagaatattgtgggtaatgctaggcctaaagaaacagatcacaaaagtctttcatcatctcctgataaacgagagaagtttaaagaacagagaaaagcaacagtgaatgtgaagaaagacaaagaagataaacccttaaagacagaaaagcgacccaagcagcctgataaagaaggaaagttaatctgttctgaaaaggggaaagtgtcagagaaaagtcttcccaagaacgagaaggaagacaaggaaaacatttccgaaaatgacagagagtattctggagatgcccaagtggataagaaacctgaaaatgacattgtgaagagtccacaagaaaacttgagggaacccaaaagaaaacgaggcagacccccttccatagctcctactgctgtggattcaaactctcaaactttgcaaccaataacattggaactgagaagaaggaaaatatcaaaaggatgtgaagtcccattaaaacgtcctcggcttgacaaaaattcatcccaggaaaagtcaaaaaactactcggaaaacactgacaaagacttatcgaggagacgttcctccaggctgtccactaatgggacccatgagatcctagatcctgacttggttgtatcagatttggttgatacggatcctttgcaagacacgttgtctagtaccaaggaatctgaagaaggtcagttgaagtctgctttggaagctggccaggtctcatctgcactgacttgccactcctttggggatggatccggggctgcaggcttggagttgaactgcccatcaatgggagaaaacacgatgaaaacagaaccgacttctccccttgtggaattacaagagatttcgactgtggaagtaacaaatacttttaagaaaacagatgattttgggtcatctaatgcaccagctgtcgacctagaccataagtttagatgcaaagttgtggactgtttaaaatttttccgcaaagccaaactgttgcactatcacatgaagtatttccatggaatggagaagtcactggagccagaagagagcccgggaaagaggcatgtccaaaccaggggcccttcagcttcagacaagcccagccaggagaccctgaccaggaagcgggtctctgccagttccccaactacaaaagacaaggaaaagaataaagagaagaaattcaaggagtttgtgagagtgaagccaaagaagaaaaagaaaaagaaaaagaaaaccaaacctgaatgcccctgcagtgaggagatcagtgacacctcccaggaaccttctccacccaaggcatttgctgttaccaggtgtgggtcctcacacaagccaggggtccatatgagcccgcagcttcatggcccagaatctggacaccacaaagggaaagtgaaagcattggaggaggataatttgagtgagtcctcttctgagagctttctctggagtgatgatgagtatggccaagatgtggatgtgaccaccaacccagatgaggaacttgatggggatgaccgctatgacttcgaggtggtccgctgcatctgtgaggtccaggaggaaaatgacttcatgattcagtgtgaagagtgccagtgctggcagcatggggtctgcatgggattactggaagaaaatgtgcccgagaaatacacctgttatgtttgccaagaccctccaggtcagaggcctggcttcaagtactggtatgacaaggagtggctgagcaggggacatatgcatggcctggcatttctagaagagaactactcccatcagaatgccaagaagatcgtggccacccaccagcttcttggtgatgtgcagagagtgattgaggttctgcatggcctgcagctcaagatgagcatcttgcaaagccgggagcatcctgatctgccgctgtggtgccagccttggaaacagcactcaggggaggggagatctcatttcagaaacatccctgtcactgacaccaggagcaaggaggaagctccaagctatagaactttgaacggggcagtggagaagcccaggcccctggccctgcccctgccgcgttctgtggaggaatcctatatcaccagtgagcattgctaccagaagccccgcgcctattaccctgccgtggagcagaagctggtggtggagacgaggggctctgccctcgacgatgcggtcaaccccctccatgagaacggcgatgattccctttccccgcgcctgggctggcctctagaccaagacaggagcaagggggacagtgaccccaaacccggctccccaaaggtgaaggaatatgtctccaaaaaggccctaccagaagaagcccctgctcggaagctgctggacagaggtggagaggggctgctgagctcccagcaccagtggcagtttaacctgctgacccatgtggaatctcttcaggatgaagttacgcacaggatggactccattgagaaggagttggatgtgttggagagctggctggactacactggggaactggagccccctgagccgctggccaggcttccgcagctcaagcattgtatcaagcagctgctgatggacctgggcaaggtgcagcagatcgccctctgctgctcaacatgaaactgggcacccaaaactcatgggggcacaatcctggggcacctgcaggaggagcttcgcatatttaaataaataaacctagcatgctgaatgcacgtgacaccgactgacttcagggatctgggccaggagtgtggtggacattggacaaagaggccattttggctgcgggaggacactctgatctcgaagcctgccataaaggtagcaaatagactcttgggattcccctcttctgtgcacatcgttgaatgaagagagtctttttgcacaaacttcacttgaaattgtgccactgatgataaacggaatgagagccaaaaaagtttagttggagacagttgtaaattcaatttggagtttatttaattgacttttctatcacgttggggcacatgccaactccctggtttcttcctggcatggtgtttgggcagcaggcatcattttccttttctagcttcataggaatattgtgagctcaccatgctgtggaggttgggaaagagcagagtcttggctgccctgctttctccttaggactcttcacttttctcaccacatctcttgcatgacttcatggtactggggacaagtttgtatgccttcaccccagagctggctgggttatggcttttgtagcagagcccatacagcctatggaagaactagaatctcactcacagtaataagaatctaggaggaattccaaaccgaagcaggcagggtctggaacccaaaggacagcattttctacccacttcttaatattgacagcttccccgttctatttaatgtccaaaaatgtttcccaaaatttcaaactctttcactgtaaagatttgttacaaagaatgtggtttggggaattaccttattttatattgttgtaaacaaacttcaaattctacatgtgcgacttttctccttcctgaagggtgtttagtagtcagcgttttcagaattgttttgttactatactttaacattttacatttcctgtttgtattattttgtgagagcaaggtgatcatgctgcttaaggtccaggtacaacctatttgtaccttttgagacaatatttgtgttacttttgcaggttacggttccacatgtaattgctatattttgttttgtttttccttactaggcaaagttaaaatgttccatgctttgaggagtgacccatttcactactttgttttcttatcactaaaggcaaaaatcaaagcacagttgtccattaacacttataagttaattatgggtttatgagtctgtaatgttatatgctgcaaacatttactatgtaaacgtgaagtagccaataatatctcaatagtagtaacagtatctttagcgacctttggaatagttaagcacaggtcattgtggacatgaattcaggcctctgtactaaaatctatttcagggaatgttctgtctagtgatttgctcaccatttgatatataatgaattataggacaagtataagctgatctgctatagctgtccatcagagagaatacacgtggctataacatctataacaaaacgacgattcctctacaagaggctgtttctcactgctaacgttggtgtttctggcgtgggaagaaatgcacaggcgtgcatggcatgcacgttcagacagctgcattgtaagagttctgtcatgcagtctgaaaagggaagaaacaggatggctttctgtagccacacctgtgaggcgtgatgattgttgtattattagattactgatttttcttttctgaaaatacatttgagttttaatcacatctgtggaagctgtaacttttaaggtagtcaatttcatgtcttgttcaacgatgtaagcagaaactgaattgccctaattttgccaactggccattattgggattattgtttaaatttttggtaaaggaagtaatctcctttcattcattgtgacttttgttcttagggaagcagagaagactccccaagttcttataacctcattgtgcttccctaatttaaagccatgttgaggggctccattcccaattcctgggtcaaggtgaattaaccctatgttggagcactggaaaccgttatttgcaaacattgctgttaccatttagaaatatgtgcactatcagctgggtgcagtggctcacgtctgtaatcccagcactttgggaggccgaggcaggtggatcacctgaggtcaggagttcgagaccagcctggccaacagggtgaaaccccgtctctactaaaagtacaaaaattagctgggcgtggtggcggacgcctgtaatctcagctacttgggaggctgaagcaggagaggtgctggaacctgggaggcggaggttgaagtgagccgagattgcgctattgcactccagctcgggcgacaactgcaagactccatctcaaaaaaataaaaataaaagaaaagaaagaaatatgtgcactacctaagttttgtctttagaaaaactatccacctataaaaaattaccttgacaaaaatagttccggtttgactaatcattttgtttctttaagtggtaagtgtatgcaaggtggatccttgatgagccaacattgcactgtggatacatatctatgtttacgcgctattagaacagaaggcgctgtatatagaaatgttgctttgaagcaatatttgcaaaacacgcagacttctgtatctgtatttggaaaaaataaaacaggttcttgttaaaaaaaaaa

SEQ ID NO: 4297 - DNA, 2173 bp, Homo Sapiens
  NM_016446
gtcacgccgacgtcaagtcgaggccgccgccgcggggcctggttatcgccggttcagcgcagcccggagtcgcccaggcctgaactcctacccaggtccccggcccccgccccgggcccgcgaggacaccggaggccaccccccgggggtggggagcggagccgcggcctagactcaagtctgggtttcagctgccgccagccctattgctgctgttgctgttctctgtccttggcccaggggctggaggccttttcctgactgattactccacctgctcaccccgcaagctgagtcctttccgctcctttgccagcaccgagctcttccacttccatgttcctgaggacacattcctggctgtttggaacctcatcatcttcaaggagcaagggggaacttttggggaccactgcccagaccaaagtgtgactgtgtatttccggtccggggcaccccctgtcatcaatcccctgcatacacacttcccaggggacacagctgtgcctggggttttctcactgaccctcagctggacactgcccaaccgcacctcaggcatctttaacgtcagcagccccttacctggggactggttcttggctgcccaccttccccaggcccacggccacatctctgtcaagggtctccaggatgagtgtcagtacctccttcagccgcagctgattgtccggcgtttgctggacgtcgctgtgctggttcctggccggccctcagagcaaaccctctccccacacaatcgctcagccctgtacaaggtctttgtgcccagcttcacttacagggtttcagcacagctggtgtgtgtggggggccgtggggtatctgcctgccccctgtcactgcgtctgcgtcccaaagccccacccctgcacaactcaagctctgtggcctgtggaggtgcctcaggatgccagctggagctggcactgcccccctgggggcactgggtctacgtgcgtgtggaaacatcatcccggggccctggtaggaccatccgcttccagctgtgtgtgcggttgcaagagtgcccacagcccggcctgctccgagccctggtccctggagctgccatgaacatgccccagtccctgggcaaccagccactgcccccagaaccgccatcccttggaacccctgcggaggggcctgggaccacgtccccacccgagcactgctggccagtgcgcccgactctgcgcaacgagctggacaccttctctgtccacttctacatcttctttggcccaagtgtggcccttccccctgagcgcccagccgtgttcgccatgaggctgttgccagtgctggacagtggaggcgtcctcagcctggagctccagctcaatgcgagctccgtgcgccaggaaaacgtgacggtgtttggatgcttgactcacgaggtgcccttgagcctgggggatgcagcagtgacctgttccaaagagtccctggccggcttcctcctctctgtcagtgccaccaccagggttgccaggctgcgaatcccattcccgcagacggggacctggttcctggccctccgctccctgtgcggggtggggcctcggttcgtgcggtgccgcaacgcgacggccgaggtgcggatgcgcaccttcctgtccccatgcgtggacgactgcgggccctacggccagtgcaagctgctgcgcacacacaattatctgtacgcagcctgcgagtgcaaggccgggtggagaggctggggctgcaccgacagtgcagatgcgctcacctatggattccagctgctgtccacactcctgctctgcctgagcaacctcatgtttctgccacctgtggtcctggccattcggagtcgatatgtgctggaagctgcagtctacaccttcaccatgttcttctccacggtatgcggtggtgtctgcatcttatcactgggtgcttgtgcatggtggtgggtcacagtctgtatttccaccacgttctccgagggtttgggaatgtctgtgccttcactgtgtcttctacagacagagacagcagtgcttcccaaactgtcatgcatagataatggtcatttttgtaagacacattggagtaaatgaacaaaactgtttgcaacttaataaagtaagtttgggcctccaaaaaaaaaaaaaaaaaaaaa

SEQ ID NO: 4298 - DNA, 3490 bp, Homo Sapiens
  NM_016451
cacgtcagccaaggactctggagccgccgccgccgctgctgcggttcatagccggagtagacggagccgcagtagacggatccgcggctgcaccaaaccactgcccctcggagcctggtagtgggccacaagcccccagtcccagaggcgtggtgggtcgggcagagtcggaagaactggctttctagctggaagatgcggaaggggagcgactaggccgcttgcgtctgggcctggcagaagggaccggattttctggcatccttaaatcttgtgtcaaggattggttataatataaccagaaaccatgacggcggctgagaacgtatgctacacgttaattaacgtgccaatggattcagaaccaccatctgaaattagcttaaaaaatgatctagaaaaaggagatgtaaagtcaaagactgaagctttgaagaaagtaatcattatgattctgaatggtgaaaaacttcctggacttctgatgaccatcattcgttttgtgctacctcttcaggatcacactatcaagaaattacttctggtattttgggaaattgttcctaaaacaactccagatgggagacttttacatgagatgatccttgtatgtgatgcatacagaaaggatcttcaacatcctaatgaatttattcgaggatctactcttcgttttctttgcaaattgaaagaagcagaattgctagaacctttaatgccagctattcgtgcatgtttggagcatcgacacagctatgttagaagaaatgctgttttggccatctataccatctatagaaattttgaacatcttatacctgatgctcctgaactgatacatgattttctggtgaatgagaaggatgcaagttgcaaaaggaatgcatttatgatgctaattcatgcagatcaggatcgagctttggattacttaagtacttgcattgatcaagttcaaacatttggagacattctgcagctggttattgttgaactgatttataaggtctgtcatgctaatccatcagaaagagctcgttttattcgctgcatctataacttattacagtcatccagccctgctgtaaaatatgaagctgctgggacattagtgacactctctagtgcaccaactgcaatcaaggctgctgctcagtgttacattgatttaattattaaggagagcgacaacaatgtaaaactcatagttttggatcgcttgatagaattaaaagagcatcctgctcatgaacgagtactacaggatctggttatggatatcctaagagtattgagcacaccagacttagaagtacgaaagaaaactctgcagttagcactggatcttgtctcttctagaaatgttgaagagctggttattgtcctgaagaaggaagtgataaaaacaaataatgtgtctgagcatgaagatactgacaaatacagacaactcctagtgcgaacattgcattcctgttctgtccgatttccagatatggctgcaaatgttattcctgtgttaatggaatttctcagtgacaacaacgaagcagcagctgctgatgtcttggagtttgttcgtgaagccattcagcgctttgataacctgagaatgcttattgttgagaagatgcttgaagtctttcatgctattaaatctgtcaagatttaccgaggagcattatggatcctgggagaatactgtagtaccaaggaagacattcagagtgtgatgactgagatccgcaggtcccttggagagatcccaattgtagagtcagaaataaagaaagaagctggtgaattaaaacctgaagaagaaataactgtagggccagttcagaaattggttactgaaatgggtacctatgcaactcagagtgcccttagcagttctagacccaccaagaaagaggaagacagacctcccttgagaggattccttctggatggagatttctttgttgctgcctcccttgccacaactctgaccaagattgcattgcgctatgtagctttggttcaggagaagaaaaagcaaaattcttttgttgctgaggctatgttgctcatggctactatcctgcatttgggaaaatcctctcttcctaagaagccaattactgatgatgatgtggatcgaatttccctgtgcctcaaggtcttgtctgaatgttcacctttaatgaatgacattttcaataaggaatgcagacagtccctttctcacatgttatctgctaaactagaagaagagaaattatcccaaaagaaagaatctgaaaagaggaatgtgacagtacagcctgatgaccccatttccttcatgcaactaactgctaagaatgaaatgaactgcaaggaagatcagtttcagctgagtttactggcagcaatgggtaacacacagaggaaagaggcagcagatcccctagcatctaaacttaacaaggtcacccaattgacaggtttctcagatcctgtatatgcagaagcttacgttcatgtcaaccaatatgatattgtcctggatgtacttgttgtgaaccaaaccagtgatactttgcagaattgcacattagaactagctacactaggggatctgaaacttgtggaaaagccgtctcctttgactcttgctcctcatgacttcgcaaatattaaagctaacgtcaaagtagcatcaacagaaaatggaataatttttggtaatatagtttatgatgtctctggagcagcaagtgacagaaattgtgtggttctcagtgatattcacatcgacatcatggactatatccagcctgcaacttgcactgatgcagaattccgtcagatgtgggccgaatttgaatgggaaaacaaagtgacagttaacaccaacatggttgatttaaatgactacttacagcacatattaaagtcaaccaatatgaaatgcctgactccagaaaaggccctttctggttactgtggctttatggcagccaacctttatgctcgttccatatttggtgaagatgcacttgcaaatgtcagcattgagaagccaattcaccagggaccagatgctgctgttaccggccatataagaattcgtgcaaagagccagggaatggccttaagtcttggagataaaatcaacttgtcacagaagaaaactagtatataaaaataaacaaaaagtccttgaagctttacagttaatttaggtatgggcttactggactccaacatcttttgtactctttcatgcttatatagaatctgagttcatgctgaatacttttcagccaataatttatagcctttcccttaaatcaagattgagtttaaaattatagtttgtcttttgtcttaacagttctgaatgctgtcctcaaagtatataatgtttcatgtaccaagacccttttcacagtacaataaacagatctattcataaatttttgttattttataaataaatgattacataattttagttatatgg

SEQ ID NO: 4299 - DNA, 1557 bp, Homo Sapiens
  NM_016456
aatagaagctaggagagggcggggacaactgggtcttttgcggctgcagcgggcttgtaggtgtccggctttgctggcccagcaagcctgataagcatgaagctcttatctttggtggctgtggtcgggtgtttgctggtgcccccagctgaagccaacaagagttctgaagatatccggtgcaaatgcatctgtccaccttatagaaacatcagtgggcacatttacaaccagaatgtatcccagaaggactgcaactgcctgcacgtggtggagcccatgccagtgcctggccatgacgtggaggcctactgcctgctgtgcgagtgcaggtacgaggagcgcagcaccaccaccatcaaggtcatcattgtcatctacctgtccgtggtgggtgccctgttgctctacatggccttcctgatgctggtggaccctctgatccgaaagccggatgcatatactgagcaactgcacaatgaggaggagaatgaggatgctcgctctatggcagcagctgctgcatccctcgggggaccccgagcaaacacagtcctggagcgtgtggaaggtgcccagcagcggtggaagctgcaggtgcaggagcagcggaagacagtcttcgatcggcacaagatgctcagctagatgggctggtgtggttgggtcaaggccccaacaccatggctgccagcttccaggctggacaaagcagggggctacttctcccttccctcggttccagtcttccctttaaaagcctgtggcatttttcctccttctccctaactttagaaatgttgtacttggctattttgattagggaagagggatgtggtctctgatctctgttgtcttcttgggtctttggggttgaagggagggggaaggcaggccagaagggaatggagacattcgaggcggcctcaggagtggatgcgatctgtctctcctggctccactcttgccgccttccagctctgagtcttgggaatgttgttacccttggaagataaagctgggtcttcaggaactcagtgtctgggaggaaagcatggcccagcattcagcatgtgttcctttctgcagtggttcttatcaccacctccctcccagccccagcgcctcagccccagccccagctccagccctgaggacagctctgatgggagagctgggccccctgagcccactgggtcttcagggtgcactggaagctggtgttcgctgtcccctgtgcacttctcgcactggggcatggagtgcccatgcatactctgctgccggtcccctcacctgcacttgaggggtctgggcagtccctcctctccccagtgtccacagtcactgagccagacggtcggttggaacatgagactcgaggctgagcgtggatctgaacaccacagcccctgtacttgggttgcctcttgtccctgaacttcgttgtaccagtgcatggagagaaaattttgtcctcttgtcttagagttgtgtgtaaatcaaggaagccatcattaaattgttttatttctctcaaaaaaaaaaaaaaaaaaa

SEQ ID NO: 4300 - DNA, 1187 bp, Homo Sapiens
  NM_016462
gccctgcaggcgctgcggacaggggaagcacagagattccccgccgcgttccctggactcaggagctcgccgcgatgccccgccccactctccacccgctgaatgcagggcgcatgctgctacttggcggctcaagccccgcccgcaccgtccccattctctgaccgcccctctcccggtacactgcgcaggcacaacagagccgctcccctctcctcgccccgccaccgggacggagagcgcccgccgctgcatttccggcgacacctcgcagtcattcctgcggcttgcgcgcccttgtagacagccggggccttcgtgagaccggtgcaggcctggggtagtctcctgtctggacagagaagagaaaaatgcaggacactggctcagtagtgcctttgcattggtttggctttggctacgcagcactggttgcttctggtgggatcattggctatgtaaaagcaggcagcgtgccgtccctggctgcagggctgctctttggcagtctagccggcctgggtgcttaccagctgtctcaggatccaaggaacgtttgggttttcctagctacatctggtaccttggctggcattatgggaatgaggttctaccactctggaaaattcatgcctgcaggtttaattgcaggtgccagtttgctgatggtcgccaaagttggagttagtatgttcaacagaccccattagcagaagtcatgttccagcttagactgatgaagaattaaaaatctgcatcttccactattttcaatatattaagagaaataagtgcagcatttttgcatctgacattttacctaaaaaaaaagacaccaaacttggcagagaggtggaaaatcagtcatgattacaaacctacagaggtggcgagtatgtaacacaagagcttaataagaccctcatagagcttgattcttgtatattgatgttgtcttttctttctgtatctgtaggtaaatctcaagggtaaaatgttaggtgtcagctttcagggctctgaaaccccattccctgctctgaggaacagtgtgaaaaaaagtcttttaggagatttacaatatctgttcttttgctcatcttagaccacagactgactttgaaattatgttaagtgaaatatcaatgaaaataaagtttactataaataataaaaaaaaaaaaaaa

SEQ ID NO: 4301 - DNA, 1447 bp, Homo Sapiens
  NM_016463
actgctggcggctggagcggagcgcaccgcggcggtggtgcccagagcggagcgcagctccctgccccgcccctccccctcggcctcgcggcgacggcggcggtggcggcttggacgactcggagagccgagtgaagacatttccacctggacacctgaccatgtgcctgccctgagcagcgaggcccaccaggcatctctgttgtgggcagcagggccaggtcctggtctgtggaccctcggcagttggcaggctccctctgcagtggggtctgggcctcggccccaccatgtcgagcctcggcggtggctcccaggatgccggcggcagtagcagcagcagcaccaatggcagcggtggcagtggcagcagtggcccaaaggcaggagcagcagacaagagtgcagtggtggctgccgccgcaccagcctcagtggcagatgacacaccaccccccgagcgtcggaacaagagcggtatcatcagtgagcccctcaacaagagcctgcgccgctcccgcccgctctcccactactcttcttttggcagcagtggtggtagtggcggtggcagcatgatgggcggagagtctgctgacaaggccactgcggctgcagccgctgcctccctgttggccaatgggcatgacctggcggcggccatggcggtggacaaaagcaaccctacctcaaagcacaaaagtggtgctgtggccagcctgctgagcaaggcagagcgggccacggagctggcagccgagggacagctgacgctgcagcagtttgcgcagtccacagagatgctgaagcgcgtggtgcaggagcatctcccgctgatgagcgaggcgggtgctggcctgcctgacatggaggctgtggcaggtgccgaagccctcaatggccagtccgacttcccctacctgggcgctttccccatcaacccaggcctcttcattatgaccccggcaggtgtgttcctggccgagagcgcgctgcacatggcgggcctggctgagtaccccatgcagggagagctggcctctgccatcagctccggcaagaagaagcggaaacgctgcggcatgtgcgcgccctgccggcggcgcatcaactgcgagcagtgcagcagttgtaggaatcgaaagactggccatcagatttgcaaattcagaaaatgtgaggaactcaaaaagaagccttccgctgctctggagaaggtgatgcttccgacgggagccgccttccggtggtttcagtgacggcggcggaacccaaagctgccctctccgtgcaatgtcactgctcgtgtggtctccagcaagggattcgggcgaagacaaacggatgcacccgtctttagaaccaaaaatattctctcacagatttcattcctgtttttatatatatattttttgttgtcgttttaacatctccacgtccctagcat

SEQ ID NO: 4302 - DNA, 1868 bp, Homo Sapiens
  NM_016464
gctaaccccctaactcccgttcctcctcggcgtttcttctccaagtccgaagtcagggtccaggactgctgcgatgcatcagccccgcctctcatcccccatccagaggaggcggaaatgttcaggtgaacgcgaagcctcccactacgagccggccctcagcaaggccgtgcgcagtgtgggcgggagccctaagtcagctagcggcgacgctgggagggcccggagcaggccgggccccgaacagcgaaagctccaacatggcggccagactggccatagagcgggaagagaaagccggggactagcaggccgcacggcgcagacggggcccgcctcctccatttacttccggaatttaaagccggcttccggaagccgggacgatgtccgcatgacaaccgacgttggagtttggaggtgcttgccttagagcaagggaaacagctctcattcaaaggaactagaagcctctccctcagtggtagggagacagccaggagcggttttctgggaactgtgggatgtgcccttgggggcccgagaaaacagaaggaagatgctccagaccagtaactacagcctggtgctctctctgcagttcctgctgctgtcctatgacctctttgtcaattccttctcagaactgctccaaaagactcctgtcatccagcttgtgctcttcatcatccaggatattgcagtcctcttcaacatcatcatcattttcctcatgttcttcaacaccttcgtcttccaggctggcctggtcaacctcctattccataagttcaaagggaccatcatcctgacagctgtgtactttgccctcagcatctcccttcatgtctgggtcatgaacttacgctggaaaaactccaacagcttcatatggacagatggacttcaaatgctgtttgtattccagagactagcagcagtgttgtactgctacttctataaacggacagccgtaagactaggcgatcctcacttctaccaggactctttgtggctgcgcaaggagttcatgcaagttcgaaggtgacctcttgtcacactgatggatacttttccttcctgatagaagccacatttgctgctttgcagggagagttggccctatgcatgggcaaacagctggactttccaaggaaggttcagactagctgtgttcagcattcaagaaggaagatcctccctcttgcacaattagagtgtccccatcggtctccagtgcggcatcccttccttgccttctacctctgttccaccccctttccttcctttcctctctgtaccattcattctccctgaccggcctttcttgccgagggttctgtggctcttacccttgtgaagcttttcctttagcctgggacagaaggacctcccagcccccaaaggatctcccagtgaccaaaggatgcgaagagtgatagttacgtgctcctgactgatcacaccgcagacatttagatttttatacccaaggcactttaaaaaaatgttttataaatagagaataaattgaattcttgttccataaatgggggagtctgtctgtctagctagatctcttcatgttaagaggcgtgccaaggtccagcttaacatctacttgacccagagggaagatggagccacagatgaaatacagatctttgttgagatccattatgagtacaaagtattttagcagaaattcaagatggaatctgatgctgcatcccccactcctggagctccagatgtgtgtgctctgttcagactctctttccttatcagaagccttaactgccctcagaagaataaaaatattcccttagccagctttggcaaaaaaaaaaaaaaaaaaaaaaaaaaaa

SEQ ID NO: 4303 - DNA, 2185 bp, Homo Sapiens
  NM_016467
agcttccgcaagctgcgcagcgccgggcctgagggcgtgtatccgcggccgtagcagccgggctggtcctgctgcgagccggcggcccggagtggggcggcggcatgtaccttccacattgagtattcagaaagaagtgatctgaactctgaccattctttatggatacattaagtcaaatataagagtctgactacttgacacactggctcgagcaaacatgaacgttggagttgcccacagtgaagtgaatccaaatacccgtgtcatgaacagccggggtatgtggctgacatatgcattgggagttggcttgcttcatattgtcttactcagcattcccttcttcagtgttcctgttgcttggactttaacaaatattatacataatctggggatgtacgtatttttgcatgcagtgaaaggaacacctttcgaaactcctgaccagggtaaagcaaggctcctaactcattgggaacaactggactatggagtacagtttacatcttcacggaagtttttcacaatttctccaataattctatattttctggcaagtttctatacgaagtatgatccaactcacttcatcctaaacacagcttctctcctgagtgtactaattcccaaaatgccacaactacatggtgttcggatctttggaattaataagtattgaaatgttttgaaactgaaaaaaaattttacagctactgaatttcttataaggaaggagtggttagtaaactgcactgtttctgtgataatgtgaaatgagaagtatttacattggagggccaatggctggtccttcaagtgctgttttgaagtgcagatttccattaaatgatgcctctgtttaatacacctggtacatttctgaagaggggctttataagcaggctgggcaggcccagcttataagttaaagggcatcacagtgagggtgtagtagataaattcaaggaaataagagatttgtaagaaactaggaccagcttaacttataatgaatgggcattgtgttaagaaaagaacatttccagtcattcagctgtggttatttaaagcagacttacatgtaaaccggaatcctctctatacaagtttattaaagattatttttattaccgtacatatttctcgttttatgtaagcggatgtatatcctcttgttttatacaagccagttcccacttatgagggtacttttttggttttgctggcttaatattgtgtattggtcaatgaggccatttttacatttattacgttacagagttcatggaggttcacctttgtgactgattggtgataaaagatagccaagtgtcttacaagcagcttctgagtcaagtgttctaattttggaacaaagcaggttttactgcttttccagacacaaggctgctaaaccaattaagaaaataattaatttctttcaagcaactaaaaaatatatggtaatttaaaggtgtctgcttatttggttgaacaatttaattgggaaagtttgtcatcatttgaaaaaggaaatataaaaggaacaaccatatagccaacctgtggtctggcagaaacaacgtctctagcaatagtaccaaagtaagtaatggagtcttttttttggcaggtctgcagtaaaagataacattttcttttcttagtcctcctgctctcaacccccatattttgcctttgaatacgtgggttttagtatatatagcccaaaatggtaactgtctccagaacagcaaccacattgaattcttgtgacttaggaaagcttcttatagttgctgacattaattgcaagaaataactatatactactttgagaagtaaacatgtcaaaaaaaacaaagttcagatatgggacaaaatttaaaaattcagtaacatttataaacagaattgaatgaaaagagttacagaccaacttaaacatcaattcgtgtcagtaaactgacttttgggggtaatgatcattgttttgtatctcaaaagtattgagtttagaaatcagttgtatgatactacctttgtatgtctgtcttttcccgtgtatttttaaataactggtgatctataatttaataaaatttttcgttggtgtaatattatttcaaaagccctccaaatttagtcatcaaaattaaaatgacatttttcaagtttaaaa

SEQ ID NO: 4304 - DNA, 1572 bp, Homo Sapiens
  NM_016470
ggctggtttggatccgggtcagtcgggtgccgagatttgggagagacgctctgaactgactgccccgcatcaccggagcgtcccagctgcgaggagtgtaaacaggaacatcgataagtagtgtaaaaacttgcacaatgaaatccgaagccaaggatggagaggaggagagtctacagactgctttcaaaaaattaagagtggatgcatcagggtctgtagcatctctgtctgttggagaaggcacaggtgtcagagcaccagtcagaacagcaacagatgataccaaacctaaaaccacatgtgcatctaaagacagttggcacgggtctacaaggaagtcttcacgaggagcagtgagaactcagcgtcgtcgacgttctaagtctcctgtccttcatcctccaaagtttatacattgcagtacaatagcgtcttcttccagcagtcaactcaagcacaaaagccagactgactcacctgatggcagcagtgggctgggaatttcatcccctaaagagttcagtgcaggagaaagctctacttctctcgatgctaatcacacaggggcagtcgttgagcctttgagaacttctgttccaaggctcccatcagagagtaagaaggaagactcctctgacgctacccaagtcccccaagcaagtctcaaagccagtgatctctctgactttcaatcagtttccaagctaaaccagggcaagccatgcacatgcataggcaaggaatgccagtgtaagagatggcatgatatggaagtgtattccttttcaggcctgcagagtgtccctcccttggctccagaacgaagatccacacttgaggactactctcagtcgctgcacgccagaactctgtctggctctccccgatcctgttctgagcaagctcgagtcttcgtggatgatgtgaccattgaggacctgtcaggctacatggagtattacttgtatattcccaagaaaatgtcccacatggcagaaatgatgtacacctgatagcaagaagctaattcatatgctttaaaccaatgaaggcttgtcaaagagatttagttaatggcagaccttgtggccactttgtgtgagaagacatctctttctgctcactgtgcttgcaataaaaacttttcttggcatctcagttaatcttcattctttcaacttactctcttgagttcttacatacacttcaaggcgagcagatcaaagaaaaatcccccttatttagaaatgttcctgggggatgaagaaaccataattacttgagactggcagcagtgggtatatggtaaaagcctttgtaaaacagtgcatttttcagatttgtttaaggtttgctagccaaggaaagtaaaatgtgattttgtaactgcactaaacatttgtcatgctgtagttgccagcccagaatattagaagttacaagactgatttaaaccgtctctgatttaatgcaagatatattgtgtctataaaggtttctcttgttattgttaagccagagatctaaggtttagattcaatttgaataaactagctggcctgccctcta

SEQ ID NO: 4305 - DNA, 2110 bp, Homo Sapiens
  NM_016472
cagctcggtgctgattatcacaactgtttggtgacctacttcactgacctgtgaggattccttcccttcaagtactggattcttgatctttctgcatcatcaagaatggaaacagactgtaatcccatggagctaagcagtatgtcaggatttgaagaaggttcagagctgaacggttttgaaggaactgacatgaaagacatgaggctcgaagctgaagcagttgtaaatgatgttctctttgctgttaacaacatgtttgtctcgaaaagcctgcggtgtgcggatgatgtggcctatatcaatgtggaaacaaaggaaagaaacagatattgcctagaactcactgaagcagggctcaaggtggtaggctatgcttttgaccaggtagatgatcatttacagactccctaccatgaaacagtctactccttgttggatacactcagccccgcctaccgagaagcatttggaaacgcactgcttcaaagactggaagctttgaaaagagatggacagtcatgactacactttttcctttcagaggggctggtgctcgtacagaatgttgatataaagcttaaaattcttgcatatggtcatagaaaatgcatctttggttttgtgtttttatcacttgcttccaacttaggcttttggctcagaagattattgaataatgatttgtcttagtttctgtttcagtaagggaattctgaggccgttgctatgataccatcattaagacattcacatgtcttcatataatatctcttcatttcaaatcctaatcactatttcatactattacagggctttgatgctgccagcactgtcttttacataggaaattctagatttgcacagtaatagaggaattagaagtacctaactatacactttgattcagcctgctaaatcaggggttcaatactagcttggacaaactttgtagtaattaattgctaccagccttattggaaacaaattatcaactagtttcccctgcacaaattttgaaattcactgcttcacttaatctatttatattactaataatggattaataaagatgaattaattatatattacttaactagtattaaatgaaaaacagggactgaaatagttctgtattccgtgtttgcaacagccagccaactaagcagaggataaaccgttagcaaatgaatgtaataattactcatttccaagatatctaagcacataagcaaatacaggaacagacttcattctttttcttaacaaaaaagcatcttcagtgtgtgatttaaaagaaagaagattctggtttcctagaaaacaatattttggcctgtgttgattcttattctgaatgtgtgtttacataatgtacagtatatattcagaaagtatttttgcttcaacgtttactttctatgatgtagtgctttggtattcctacagcaccccaccttccccaacagatgtacagtgttctgtctccattcgaaatctacaatgtaatatgagtgcattgtatgggtttgaaaccaaaggatgaatgaagcattcagagacttaatatttgaaaaaggaatagtcagtattttatattttattacaggtactgatatttataaatttaataaactgtaccatgctgctgcatgttttcaagtacatgttgaacagtaaggattggggagttgttttttaatggtcacctaaagcagctgctatagaaatgttgaactaaaattttgcatctggtcataccttcatgcatttatcatttgcagatatttttccatcattattaaaaaacaggaacttttaggctctgaagatcatgtggaccagagcaaattaaagttcagtttgtgtcacaattcattgccagacttcattggaatgctttgtttgatgatgtatgttcattctcagctttattttcagatgcttaactgggcaatgaagtctaacttcaggttgaactttctcatgtttaatctcaggctaaatgtaaatgatatttgtaaagtttgaataaaattctgtttactcattttgagttagtatgaaaaaaaaaaaaaaaaaaaaaaaaaaaaaaaaaaaaaaaaaaaaa

SEQ ID NO: 4306 - DNA, 2975 bp, Homo Sapiens
  NM_016474
gaagacacttccggttgcgacggaggtaggcttacgaggcctgtgtcgggtagaaagggtccttcctggaccgggaccctctgccacgaccatggaccgtaggaaaaagcctttggacgtcacggcctcctcgttggtagatcttaaggctgaactcttccgaaagcaagaagaattcaaacaagaaaaacttctaaaagattctggagtttttggaaaaccaaaaacaactaacaagaaaccaagtatctggagcaaacagaatgtaggcgtttcaaatcgagctgagaaggatgctgaacagaagattgaagaacagaagactttagacaaagcaagggaaaaattggaagaaaaagccaaattatatgaaaaaatgactaaaggagactttatagatgaagaagtagaggatatgtaccttgtggatttcacacagaagatcatagacaagcgcaaagaaatggaggcatctggtgcccatagagattctcaaaaggcaggagaaagggacgacgatgaggaaaaccttcctgagggagagatccctcctccccaagaccccagtgaagaatgggtggattacgtggactctttggggcgttcccggcgctgtatgagaaaggatttgccagatctgctggagatggataaaaatcttcaggggagactttttattagtcctgctaatgaaaaaaccctattatctgaagatatgagaaaagaacttcagcgccagcaatgggaggaagaagaaagagaggccctgaagaggcccatggggcccgtacattatgaagacattcgggaaaatgaggcccggcaacttggtgttgggtattttgcctttgcccgagacaaagagttgagaaacaagcagatgaaaaccttagagatgctgcgtgaacagacaacagatcagagaacaaaacgagaaaacataaaggaaaagcgaaaggctatcttagaggcaagacttgccaaacttcgacaaaaaaagatgaaaaaatcaaaagaaggtggaacagaagaagaaaatagagatggagatgttattgggcctttgccaccggagccagaggctgtgccaaccccacgtcctgctgcccagagtagcaaagtagaagtcattgtccaggagaggaaggacaccaagcctggagtgccacacatccgggagtgggaccgcggaaaagaattttcctttggatactggtcgaagaggcagtcagatctccgggctgagagagatcctgagtttgccccgccgtcagattactttgtgggtcagaagagaactggtttttccagcagccaggcatggagcagacctgggccagcacagagtgacccagggcagtgccctgaccagagccacggacctagccctgaacatacgtcacccactcctgcccccgacaacccaccacaagcccccacagttactttcaaaactctggatgacatgatttcctattacaaacaagtgacatgatctttcaaagcacgctgacttgggtttgtactttgacagtgcctttctctcccagagggagaaataactttaggaactgaattgtacctttgtcctgtcctttccctaggaggcacagacttcgggttggatttgtcagcaaggaggaaagttatggaaactttggccacttggctgttcattttattctaagtgggatagggacatacctacctggatttacatgtgagctgcgatagaatagaagtatttattctgtaaaattagacactgagatgtgcttataaccctgtttcatatctactcccacgacttactcatatttaagggttcttttccattccttttgcaaatccgagcatgcaggtgtctttattccaagggttcagcttccagatcagccgatggaccataggtcacgaggaatttctccctgtcaagcagtggaaaactgcatgggaggcaaaatgctctgttctccaagaggacccggaagtaatcacataggaaatgataaggaagaccaggaggagctcttcgtagtccagaaaggtagaagtgggagttgtttacttaattttactgtcataccatgctattacctacactcctgtgtgcagtgggcattcagtaaatgtgtgttgaaggactgggacgtacgtggaggctgctggacctggtcagagactgatgtgccttagcggcaatggttagagcttttcagtgcatcccacctccctgtcgcccccatgctcggcttcctcacattcaggagcctgacttggatcagacttggggctgcacagtggagcaggtgggttcccgtgtcattagtaataaggagagggttgggggtgggcagggctccagaaagtcagcagtgtgcctgggcacccaccccatcctctacctgccacacctcagagggttcctacagctgcacacaagcagttgagagttgatgaccaggcccatagggctcccacagctggttcccaggccagtgagtgctgtgagaatacagtagcacaagtccttgttctctgaagagtgggaaggagaggagtgagtgaagtagcctgtcccctgcaggtcctctgcgatggcattgtctcggttcccgcagtgctgcagtgtggaagggagtgccccatcctcattacagatgacacactggagtgtggaggggtcgatgacttgtgcagggtcatatggtacctaaggggcagatctcagacttaaacacaattgatgtctaacccctagacagtctttttagtgccctctgctctcagtcttgttgccctagtatcaagcaatcttagacaaacatcctgaattcttacaaacttacctctaaactctgaggataaagttgccagtccttttaatggtcagcctaatcattctgtcagcctaatcgggtaattgctttttttaataaatacacataaaaaccaactaaaaaaaaaaaaaaaaa

SEQ ID NO: 4307 - DNA, 1945 bp, Homo Sapiens
  NM_016478
ggggaagcaactcggcagcggaccaagatggcggcgccctgtgagggacaagcgtttgccgtaggggttgaaaagaattggggtgcagtagttcgctccccagaagggaccccccagaaaatccggcagctgatagatgaggggattgccccggaagagggaggcgtggacgcgaaggacacgtctgccacatcccagtcagttaatggatcaccccaagcggaacaaccttcattggaatctacaagcaaagaagccttctttagcagagtggaaacattttcttctttgaaatgggcaggtaagccctttgagctgtctccactcgtctgtgcaaaatatggctgggtcacagtggaatgtgatatgctcaagtgctctagctgtcaagcttttctctgtgccagtttacaaccagcttttgactttgacagatataagcaacgatgtgctgagctgaagaaagccttgtgtactgcccatgagaagttctgtttctggccagacagcccatccccagaccgatttgggatgttgcccctggatgagcctgctattcttgttagtgaattcctagatcgttttcaaagcctttgtcacttggacctccagcttccttccctaaggccggaggacttgaaaactatgtgcttgacagaagacaagatcagtcttctcctacacttgcttgaagatgaacttgatcaccgaactgatgagagaaaaactacaatcaaattaggctcagacatccaagtccacgtcactgcctgtattctctctgtgtgtggctgggcgtgtagttcctctttggaatccatgcagctctccctgataacatgttcgcaatgtatgaggaaggtggggctctggggcttccagcagattgaatcgtccatgactgacctggatgcatcctttggcctgaccagctccccaatcccaggccttgaggggcgaccagagcgcttacctctggtgcctgaatctcctcggaggatgatgacccggagccaggatgccactttctccccaggctcagagcaggctgaaaagagccctggtcccattgtctctcgaactcggagctgggactcttccagtcctgttgaccgtcctgagccagaggctgctagccccaccaccagaactcgcccagtgacccgaagcatgggaacaggagacacccctggcctggaggtaccatctagccctctgcggaaagccaagcgagctcgcctctgctcctccagcagttcggacacatcttcccgaagcttctttgatcccacctctcagcatagagactggtgcccttgggtgaatatcacacttggcaaagaaagcagggagaatggtggaactgaaccagatgccagcgccccagcagagccaggctggaaagcagtgctgaccatcctcttggcgcacaaacagtctagccagccagctgaaacggactccatgagtctctctgagaaatcaaggaaagtattccgaatatttcggcagtgggaatctctgtgctcatgctgaagatactccagcgccttcctggagatagctggaatgagagtgactttttgaaaaattaaggctgagttcctttcggtcagctgacactaagtttttcctgttctgggttaatcataaggagccccctgccatagcaaaggcagtgagtgtcaactatctgcatctggctgagagagacccgtttcctttcagggatgtggacagggtaagggcagcaagcatggttctgttaaaggagtgtgggattaacagactagaaggaagactaaggacctgaccacccatttcagcatcttcaatgtggagcagtgttctgaggactcttctatcctaggactatgacagtgtgtattaataaaatatttgctaagattctcaaaaaaaaaaaaaaaaaaaaaaaaaaaaaaaa

SEQ ID NO: 4308 - DNA, 1487 bp, Homo Sapiens
  NM_016486
gaatccacttgccggaagtgcctttccagtggacctgggctgttgttgcggttgttttccttctctccgtgcaacgctggcaagtctcaaagtcgccacagaaacatgcccctgattcagtgcctctgcttagctgtaacatgttaatcagaactacctggcatcttcctgaacaagactttcaataggggccagtatgcttcgcttcatccagaagttttctcaagcatcttcaaagatactgaagtactctttcccagtgggactaagaaccagcagaacagatatactttctctcaagatgtctctccagcaaaacttttccccatgtccaaggccttggctttcctcatcatttccagcgtatatgagcaagacacagtgctatcatacatccccctgcagctttaaaaagcagcagaagcaagcacttctagccagaccctcaagcaccatcacttacctaactgacagcccaaagccagcattatgtgtaactctggcaggactaatccccttcgttgctccaccactggtcatgctgatgacaaaaacttatattcccatattagcttttactcagatggcttatggagccagtttcctatctttcttgggtgggatcagatggggttttgctctaccagaaggtagtccagccaaaccagactaccttaatttagctagcagtgcagctcctcttttcttttcatggtttgccttccttatttctgaaagacttagtgaagccatagtcacagtaataatgggtatgggagtagcattccaccttgaactttttctcttaccacattatcccaactggtttaaagccctgaggatagtagtcactttattggccactttttcatttataatcactttagtagttaaaagtagttttccagaaaaaggacataagagacctggtcaagtataaaaaatataaaagtctgggaagtgaggagcacctctgcccagctgctgccccgtctgggaagtgaggagcgcctctgcctggccgcctgaccatctgggaagtgtgacaagcgcctctgcccggccgctgtgcaaccttccacgtgtgaagtgacagccttgtgtgtgatcttttctgtcttccccaagtttgcattttcgacattaaagtttactttttagttaaaagttttaaaaatatatatatataaatacactgtagataacatttgtatgccagctacacctttttctacttctgtttggctttttttccccacaccaatggtaatttatcttcacagattgttcttcatttctagaaattgttacttcatggtaattacttgagcaaaagcttgaaaatccctgacaagtacttttcatctcatagtatattagttttcactcagtcattttatgaataatatagttatccacttaaacatttcaatattttaaccatcttgaaaattaaagattaaaaatccccaaaaaaaaaaaaaaaa

SEQ ID NO: 4309 - DNA, 3484 bp, Homo Sapiens
  NM_016488
attgcgcgcgccggaagtacctacctgggataacggcggcgagcggacggctgcatttacggggtctcccggagggccagagtcgtggcttacagaagagacgaaatgtggtctgagggacgatatgaatatgaaagaattccgagagaacgagcacctcctcgaagtcatcccagtgatggctacaatagactagttaatattgtgccaaagaaaccaccactgctagacagacctggtgaaggaagctacaatagatattacagtcatgttgattaccgagactatgacgagggccgcagtttttctcatgatcgaagaagtggtccacctcacagaggagatgaatctggttatagatggacaagagacgatcattctgcaagcaggcaacctgaatacagggacatgagagatggctttagaagaaaaagtttctactcttcccattatgcgagagagcggtctccttataaaagggacaatacttttttcagagaatcacctgttggccgaaaggattctccacacagcagatctggttccagtgtcagtagcagaagctactctccagaaaggagcaaatcatactctttccatcagtctcaacatagaaagtccgtgcgtcctggtgcctcctacaaacggcagaatgaaggaaatcctgaaagagataaagagaggcctgtccagtctttgaaaacatcaagagatacttcaccctcaagtggttcagcagtttcttcatcaaaggtgttagacaaacccagtaggctaactgaaaaggaacttgctgaggctgcaagcaagtgggctgctgaaaagctagagaaatcagatgaaagtaacttgcctgaaatttctgagtatgaggcgggatccacagcaccattgtttactgaccagccagaggaacctgagtcaaacacaacacatgggatagaattatttgaagatagtcagctaaccactcgctctaaagcaatagcatcaaaaaccaaagagattgaacaggtttaccgacaagactgtgaaactttcgggatggtggtgaaaatgctgattgaaaaagatccttcattagaaaagtctatacagtttgcattgaggcagaatttacatgaaatagagtctgcaggacagacttggcagcaggtaccccctgtgaggaacactgaaatggatcacgacggaacccccgaaaacgaaggcgaagagactgcgcagtcagccccgcagcccccgcaggccccgcagcccctgcagccccggaagaaacgggttcgtcggacgacacagcttcgtcggacgacaggagccccagacattacctgggggatgctgaagaagacaactcaggaggctgagaggatcctgctccgaacacagacaccattcactccagaaaatttgttccttgctatgctctctgttgtacattgcaactcacgcaaggatgtaaagccagaaaacaagcagtaactgctatgcctgacaaaactgttgctgcacacatctgtactcgtcaatcaacaaaacctgatgcaaaaaacagaaaaggggtgatgtaggagatggtcaggttggtaggagaagctataaggaaagacgcaattggaaggtcgggaggttttccaaagcttcaggagagaataaagctgaaggcagctttattaattaattctcttaccctgaggctgagggcgaacagtaggtagcaagggagtgtaaaggaatttatctagataagtttgtttacttatgccctccggaaatcatgcaagactgctccctgcaaaggggggcgacaatgttcattactcacaaattgtgttggcttcaggcctttggtattctgtctctactgaataaatacaaatggttccagcctatcaggactgcactctcttctcggctgcactaaagctggcactcccccagccgttctcatgcaaaatacctgtgtcagaatactcctttcatccatcactcagccagagtcttcaggacagactccgcatgggacttgtccaaaaaaactctaatcaaaagaggaaaattttggaatatgccaggaatagtggaattttattttttaaatttttttataggcccatatgctctatctcaagaaacaagatgattgtaacatgtccatgattaaactattggcagattattgctgtgttaatctctgtagtctaatgagttctttgttctgttctgctgccttttacgttttcttgtcctttcaaaagtgttcttgaaagaaacaaagcgaataggcagttagcacagcacagctaccccttaccaagcagtctatggaaacaacccctcatccaaatcatgggttagttaagaatctaactggggcaattaagatgaattccactcacttcctggtcacttcagcagcccagcggcattgagccaaaatatacaattctgtgttattagtgaggaaactttaaaactcatgtttgttattacttactacccaatttcattatcctcccttcctctttccatttctattctctctcacttgaattctggcattatttttagtggcctctactgataatacctaccctagagtacataaaaattatattaaaagaggaagtagcagtatgcataattttaacagattctataatgggtgcctcaaaatatgtattgtgccattccgcaaatttaaaagctaattgaggacaatttttttttaatttcctaaatgagaccaccttggatttttatttttgccatttagatgtttatacttatttagcttttataaaacataagccaagctaaatcccacataacaactctggtattcttccctcatatgagcagtgattttatttgttacccaccttagatagactaagaaagttctagtcttgtttctccttctccccgcttccctggggtttttccttaccataagtattctggtccgagggttcagttcctttagtcaagatgtcacaagtttaaaaacaaaacttgagaaactaccaaaggctcaggagttgtccactttgttgaaatccattaaattagagaagtctcactaacagatgtatttaaatataggtacaacaaataatttctttttctccccttccccaaattacagtcagcatttaaagctgtttatggcttgccatcagcattattctggtaggcttgttagtgttaaaatctatttgattttttttttttttttttgcctcttaaagtctaattttaggatggatgaattcagatgtttaccagagtgtgtattttacataatgttcttgattaaaaagacttgtttgtaaattatccgttgtttttgcatatgcccagttgatgtgataaaattttcattgtcttgccatataaagccttggttatcaacaggtggaatgtagatattgtaaagctttttgtgaattaaaagtgcaaaataaagcaaccacatttaagt

SEQ ID NO: 4310 - DNA, 1322 bp, Homo Sapiens
  NM_016495
gacctggagttgatgtcacgtccggcggcggcggcagcggcagcggcagcggcgctgagttttgtctcccgggccgtctgggcgcgcgcgggtgtcccaggtaccccgccgcctccctccttcccgcaggactcgtccctcctggccctgggccccaacggtgcccgcctgcccggcggtcggtcagcgcacagggcacggcttcctctgcttctcccggaccacttagtctcaacccgggtgtgtttgcactactagagaatgaaatatgactgaggactctcagagaaactttcgttcagtatattatgagaaagtggggtttcgtggagttgaagaaaagaaatcattagaaattctcctaaaagatgaccgtctggatactgagaaactttgtacttttagtcagaggttccctctcccgtccatgtaccgtgcattggtatggaaggtgcttctaggaatcttgcctccacaccacgagtcccatgccaaggtgatgatgtatcgtaaggagcagtacttggatgtccttcatgccctgaaagtcgttcgctttgttagtgatgccacacctcaggctgaagtctatctccgcatgtatcagctggagtctgggaagttacctcgaagtccctcttttccactggagccagatgatgaagtgtttcttgccatagctaaagccatggaggaaatggtggaagatagtgtcgactgttactggatcacccgacgctttgtgaaccaattaaataccaagtaccgggattccttgccccagttgccaaaagcgtttgaacaatacttgaatctggaagatggcagactgctgactcatctgaggatgtgttccgcggcgcccaaacttccttatgatctctggttcaagaggtgctttgcgggatgtttgcctgaatccagtttacagagggtttgggataaagttgtgagtggatcctgtaagatcctagtttttgtagctgtcgaaattttattaacctttaaaataaaagttatggcactgaacagtgcagagaagataacaaagtttctggaaaatattccccaggacagctcagacgcgatcgtgagcaaggccattgacttgtggcacaaacactgtgggaccccggtccattcaagctgaacgcacccgctggttgtggaccgtctgccaggcaccacagtgagcattgtgttcttggcatgtgatctgggaaactgattgaataatacacttttcttgctttggtgctcaaagtggtttttttcccccaataaaattatttaattgaaaaaaaaaaaaaaaaaaaaaaaaa

SEQ ID NO: 4311 - DNA, 690 bp, Homo Sapiens
  NM_016497
gctcgtggctgttgcggatggggcgtaggtgggcggtgcgcccacagctgcctgggtaaggcccaagatggctgtcttcgccttagtactcgtgtgaagttggcggggacggttcctgtcatcttcttgggcttatttggtgtgctgttgaaggggggagactagagaaatggcagggaacctcttatccggggcaggtaggcgcctgtgggactgggtgcctctggcgtgcagaagcttctctcttggtgtgcctagattgatcggtataaggctcactctcccgccccccaaagtggttgatcgttggaacgagaaaagggccatgttcggagtgtatgacaacatcgggatcctgggaaactttgaaaagcaccccaaagaactgatcagggggcccatatggcttcgaggttggaaagggaatgaattgcaacgttgtatccgaaagaggaaaatggttggaagtagaatgttcgctgatgacctgcacaaccttaataaacgcatccgctatctctacaaacactttaaccgacatgggaagtttcgatagaagagaaagctgagaacttcggaaaaggctcatctgtcaccctggagaagggaaactgtacttttccctgtgaggaaacggctttgtattttctctgtaataaaatggggcttctttggaaaaaaaaaaaaaaa

SEQ ID NO: 4312 - DNA, 1193 bp, Homo Sapiens
  NM_016498
agacgctccctgctggcggagatttcctgacctgtccttcggcgcgggactttcggcgggtcccggccgggcagacccaagtgccggcggcggagactgcagtggagccagtaccggctgtagtggccggggccgtggcgggagagtcatgtcagagccgcagccgcggggcgcagagcgcgatctctaccgggacacgtgggtgcgatacctgggctatgccaatgaggtgggcgaggctttccgctctcttgtgccagcggcggtggtgtggctgagctatggcgtggccagctcctacgtgctggcggatgccattgacaaaggcaagaaggctggagaggtgcccagccctgaagcaggccgcagcgccagggtgactgtggctgtggtggacacctttgtatggcaggctctagcctctgtggccattccgggcttcaccatcaaccgcgtgtgtgctgcctctctctatgtcctgggcactgccacccgctggcccctggctgtccgcaagtggaccaccaccgcgcttgggctgttgaccatccccatcattatccaccccattgacaggtcggtggatttcctcctggactccagcctgcgcaagctctacccaacagtggggaagcccagctcctcctgatcatactctggtacctggcctgtgcatcggcctcctgcttcatgtcaacctcctactcctgccagggaatgtggacacctggctccctggtgtccaaagaccctggcacctgggtgggtttgagctggacagaagcttagagacaaaggcttcaagaagcagtggctgcagggagtcacagaagggcaggacctgaacgctgtctgcttccctggaatccaagatgctgagtggaagtggaccctgggtgggcccggccctgtctttttcaggaaaattacatcctcccatggaggatgagagactgaggctcagggagggcaaggaataggcccaagatcacttggcaagctgggcacccaggacccccaggtgcttgacagagtcaccccatggtggtatggctgaacaaggagcggcagacaactcagggagaaactcaggagtgcagtaccagggacacctcaggacagattctctggccaggcccttccctgacccaataaatcctgaagaggttaaaaaaaaaaaaaaaaaaaaaaaa

SEQ ID NO: 4313 - DNA, 1214 bp, Homo Sapiens
  NM_016500
gtcaatcacctcagatctctcaagcagtccagcctacgcaacagtactccacctctgcgcctgtgcggggagggtaaggcggggccagcaacttcctcagctggagggagagcgcacggtggagccgccagttgagaaggactctgatccggctcagctttccaatcagctgcggaaggagccacgctttcgggggttgcaagatggcggccaccagtggaactgatgagccggtttccggggagttggtgtctgtggcacatgcgctttctctcccagcagagtcgtatggcaacgatcctgacattgagatggcttgggccatgagagcaatgcagcatgctgaagtctattacaagctgatttcatcagttgacccacagttcctgaaactcaccaaagtagatgaccaaatttactctgagttccggaaaaattttgagacccttaggatagatgtgttggacccagaagaactcaagtcagaatcagccaaagagaagtggaggccattctgcttgaagtttaatgggattgttgaagacttcaactatggtactttgctgcgactagattgttctcagggctacactgaggaaaacaccatctttgcccccaggatacaattctttgccattgaaattgctcggaaccgggaaggctataacaaagctgtttatatcagtgttcaggacaaagaaggagagaaaggagtcaacaatggaggagaaaaaagagctgacagtggagaagaagagaacaccaagaatggaggagagaaaggagctgatagtggagaagaaaaagaggaaggaatcaacagagaagacaaaactgacaaaggaggagaaaaagggaaagaagctgacaaagaaatcaacaaaagtggtgaaaaagctatgtaaggtatacagggaacagcactctagaagctatgactcaattgagactacaagtaccacggtgctacttgcacagacccctttggttaaatgtaaattcttgtacaattgaaggatacgcagaaggacatctttctagtctaacagtcaggagctgctctggtcattcccttgtatgaactggtctaaagactgttagtggggtgttagttgatttttcctggtatactgtttcttggctgacactactggtcaagtaagaaatttgtaaataaatttcttttggttcttataaaaaaaaaaaaaaaaaaa

SEQ ID NO: 4314 - DNA, 1602 bp, Homo Sapiens
  NM_016505
cttgtgggtggaaacgcgctggctgactggggtcggcgtttagttcagcgcagcgactcggggacctggagctgacgcctagacacttgtattagctttaatagaagagaaatggaggagccatagaatattaaggatgaattcaggaaggcctgagaccatggaaaacttgcctgctctctacactattttccaaggagaggttgctatggtgacagactatggggcctttatcaaaatcccaggctgtcggaagcaaggtctggtccatcgaactcatatgtcatcctgtcgggtggataagccctctgagatagtagatgttggagataaagtgtgggtgaagcttattggccgagagatgaaaaatgatagaataaaagtatccctctccatgaaggttgtcaatcaagggactgggaaagaccttgatcccaacaatgttatcattgagcaagaagagaggcggaggcgatccttccaggattacactgggcagaagatcacccttgaggctgtcttgaacactacctgcaagaagtgtggctgtaaaggccactttgcaaaagattgtttcatgcaaccaggtgggactaaatactctctgatacctgatgaggaagaggaaaaggaagaggcaaagtcagcagagtttgagaagcctgaccctacaaggaatccttctagaaaaagaaagaaggagaagaagaaaaagaaacatagagataggaagtcatctgactctgacagctcagactctgagagtgatacaggcaagagggcaaggcacacatcaaaagacagcaaggcagcaaagaagaagaaaaagaagaagaagcacaagaagaagcacaaggagtgagagtataaagagtgtagggggtggttgagagtaagaaaccaggagccttgtgccttgagactcctggaaagactcaatagtgagaatatagcctcccaccccattaacttcgctcccatgggagatggcttcccctcatgcaacaggcaggtttgggagttagaggtcaaaagcagctgcctgaatgagttgttgtttccttatcactcctggtccctttgcaagtgaaccctgcagctcacccattcattcacccaacttccttcattcagcaggaggccctattaccctctccagctgccactgccagagctggattcctgtaaaggagtccaggctagagccacagagactgttgtggaggtgagttcggctgtagttagagtgattggacccttcctattggtctgtcctgggccaactggtgggtgatctctgctgcatccaacatgggagcagagactggcagcaggaggggggaacatggtgagaagtggtgctcacttttcccattcctcctaacatagttctactatgctagaagtggcatccagcggccacagctagaaaacagtctgcagtgtgacttaacttgtgtattgcattccagcagaccactgaaccagacagcgaagccaagatcattgttctactttgtatttactactgtgtgaatcagttgattctacttcaggtccttgcttaaattcctgtcactaaatggaaatgtgtttggtttt

SEQ ID NO: 4315 - DNA, 982 bp, Homo Sapiens
  NM_016509
gtccatgtatctctgagcagctatgaagaagcttcctggaaaacaataagcaaaggaaaacaaatgtgtcccatctcacatggttctaccctactaaagacaggaagatcataaactgacagatactgaaattgtaaagttggaaactacattttgcaaagtcattgaactctgagctcagttgcagtactcgggaagccatgcaggatgaagatggatacatcaccttaaatattaaaactcggaaaccagctctcatctccgttggctctgcatcctcctcctggtggcgtgtgatggctttgattctgctgatcctgtgcgtggggatggttgtcgggctggtggctctggggatttggtctgtcatgcagcgcaattacctacaaggtgagaatgaaaatcgcacaggaactctgcaacaattagcaaagcgcttctgtcaatatgtggtaaaacaatcagaactaaagggcactttcaaaggtcataaatgcagcccctgtgacacaaactggagatattatggagatagctgctatgggttcttcaggcacaacttaacatgggaagagagtaagcagtactgcactgacatgaatgctactctcctgaagattgacaaccggaacattgtggagtacatcaaagccaggactcatttaattcgttgggtcggattatctcgccagaagtcgaatgaggtctggaagtgggaggatggctcggttatctcagaaaatatgtttgagtttttggaagatggaaaaggaaatatgaattgtgcttattttcataatgggaaaatgcaccctaccttctgtgagaacaaacattatttaatgtgtgagaggaaggctggcatgaccaaggtggaccaactaccttaatgcaaagaggtggacaggataacacagataagggctttattgtacaataaaagatatgtatgaatgcatcagtagctgaaaaaaaaaaaaaa

SEQ ID NO: 4316 - DNA, 2477 bp, Homo Sapiens
  NM_016510
ggcgctctgggcccgtagcgctccgcgggaaggaggctggatgcccggcagcagtggggcggggatggaggcggccgtggcgccggggagggatgcgccggcacccgcggcgagtcagcccagcggctgcgggaaacacaactcgccggagaggaaagtttatatggactataatgcaacgactcccctggagccagaagttatccaggccatgaccaaggccatgtgggaagcctggggaaatcccagcagcccgtattcagcaggaagaaaggccaaggatattataaatgcagctcgggaaagcctcgcgaagatgataggggggaaacctcaagatataatcttcacttccgggggcactgagtcaaataatttagtaatccattctgtggtgaaacatttccacgcaaaccagacctcaaagggacacacaggtgggcaccacagcccagtgaagggggccaagccccatttcattacttcctcggtggaacacgactccatccggctgcccctggagcacctggtggaagaacaagtggcagcggtcacctttgtcccggtgtccaaggtgagcgggcaggcagaggtggacgacatcctcgcggcagtccgcccgaccacacgcctcgtgaccatcatgctggccaacaatgagactggcattgtcatgcctgtccctgaaatcagtcagcgcattaaagccctgaaccaggaacgggtggcagctgggctacctcccatcctcgtgcacacggatgctgcacaggccttggggaagcagcgcgtggatgtggaggacctgggcgtggacttccttacaatcgtggggcacaagttttatggtcccaggattggcgcactttatatacgaggacttggtgaatttacccctctctaccctatgctatttggaggtggacaagaacggaatttcaggccagggacagagaacaccccaatgattgctggccttgggaaggccgcggagctggtgacccagaactgcgaggcttatgaggcccacatgagggacgtccgcgactacctggaagagaggctggaagctgaattcggtcagaagagaatccatctgaatagccagtttccaggcacccagcggcttcccaatacctgtaacttttccatccggggaccccggcttcaaggccacgtggtgcttgcgcagtgccgagtgctgatggccagtgtgggggccgcgtgccactcggaccacggggaccagccgtccccagtgctgctgagctacggtgtccccttcgacgtggccaggaacgcgctccggctcagcgtgggccgcagcaccaccagggccgaggtggacctcgtcgtgcaggacctgaagcaggccgtggcgcagctggaggaccaggcctagcactggggccgccttccccaccccgcttctgggaagcccgtggcagggcacagggttgtccctccagttccctcctgagggctgtgccaggatgactgtctcatgccccctctgcattttgtcctggagtgccagcgagtgtgcacccccagtttccttccctggacccctgcagagctcacagggcccaggacaccaacgccgcataggactgcccacatgggaccgcccacataggaccgcccacataggaccgcccacatgggaccgcccacatgggaccgcccacatgggaccgcccacatagaaccgtcctccagtggtgaagcggaaacacttagctttatccaccctccccactgggaactgggcacgcctgttgtgagtgccctttcctggaaggtgtttttatctggaagatagaatccaagtatttataactcattgtcagccaaatgctatcatgaacgtaggaaacttgatttttttgttttgatcatggcctctacatgcacctttccagagtggtctcttctcaggccctttttagtccctttccaaagctgcccccaccaccctgctcctctggcctcagtgcacagtggcccccagcctcggccaggcctgctctgctcagcgcccaccgcccaccacccctcctgcttccccgagcctgaccctgttccgcccactggcaatcagggctgcgcacttccctgtccacggtccccaggccttcctgtcttgtcccttttgatcattattaactcagggtttcagctccaacctcgctgagttggtgcagctccaggtcattcctggggtgggaatcggatcatccctgactcagcttttaccttaattttatttgcagaggattcttttctcaaaatgctctggcatttggacacacatcacatgtcgatatttgcataggagtcattttcagtggaataacatttttaatgtgtggttttacggttcaaggaactacttgatgattttgaggaaacacttgccagaaactaaattaacgaataaaagatttcagtgcccgaaaaaaaaaaaaaaaaaa

SEQ ID NO: 4317 - DNA, 6238 bp, Homo Sapiens
  NM_016513
ggaaaacggccgggttcctgctgcactaccatgcgccgtgcggcccgtgcgactcgccggacctcgcgggcgtccctgtacggagccctcggccggtcctagcagggattgtccccatttccagctccggagcgggcggctgcgccccgctcgtcgaggagctgcgctcacctcaggggcgggcccccgcctgcgttcgcggcgccaagaagagtattcctttccacttacaactaaataagacctgcttttgctggagctgtgctaggctgagggaattccacactgaattttacaagcgggatggatttctctaaggcagaagactgatttttggaaatatgtatttgggagacagtcacgtcctattgaataccttgtgctggtgctgccatcgaaaaatctggttacactctggggaggactgctaccactgcagaactgaaccacttcggccgtgagatgagtgtccggcctgagcaggcacaccatgaatagatacacaacaatcaggcagctcggggatggaacctacggttccgtcctgctgggaagaagcattgagtctggggagctgatcgctattaaaaaaatgaaaagaaaattttattcctgggaggaatgcatgaaccttcgggaggttaagtctttaaagaagctcaaccatgccaatgtagtcaaattaaaagaagttatcagggaaaatgatcatctttattttatcttcgagtacatgaaggaaaatctttaccagctcattaaagagagaaataagttgtttcctgagtctgctataaggaatatcatgtatcagatattacaaggactcgcatttattcacaaacacggcttctttcatcgagacttaaagcctgagaacctcctctgcatgggaccagaacttgtgaaaattgcagactttggtttggcccgagaaatacgatcaaaacctccatatacagattatgtatctaccagatggtacagggctccagaagtactcctgaggtctaccaactacagctcccccattgacgtctgggcggtgggctgcatcatggcagaagtttacaccctcaggccactcttccctggagccagtgaaattgacacaatattcaaaatttgccaagtgctggggacaccaaaaaagactgactggcctgaaggctatcaactttcaagtgcaatgaacttccgttggccacagtgtgtacccaataacttaaagaccttgattcccaatgctagcagtgaagcagtccagctcctgagagacatgcttcagtgggatcccaagaaacgaccaacagctagtcaggcacttcgatatccttacttccaagttggacacccactaggcagcaccacacaaaaccttcaggattcagaaaaaccacagaaaggcatcctggaaaaggcaggcccacctccttatattaagccagtcccacctgcccagccaccagccaagccacacacacgaatttcttcacgacagcatcaagccagccagccccctctgcatctcacgtacccctacaaagcagaggtctccaggacagatcacccaagccatctccaggaggacaagccaagcccgttgcttttcccatccctccacaacaagcatccacagtcgaaaatcacagctggcctggagcacaaaaatggtgagataaagccaaagagtaggagaaggtggggtcttatttccaggtcaacaaaggattcagatgattgggctgacttggatgacttggatttcagtccatccctcagcaggattgacctgaaaaacaagaaaagacagagtgatgacactctctgcaggtttgagagtgttttggacctgaagccctctgagcctgtgggcacaggaaacagtgcccccacccagacgtcatatcagcggcgagacacgcccaccctgagatctgcagccaagcagcactatttgaagcactctcgatacttgcctgggatcagtataagaaatggcatactctcgaatccaggcaaggaatttattccacctaatccatggtctagttctggcttgtctggaaaatcttcagggacaatgtcagtaatcagcaaagtaaattcagttggttccagctctacaagttctagtggactgactggaaactatgtcccttcctttctgaaaaaagaaatcggttctgctatgcagagggtacacctagcacctattccagacccttcccctggttattcctccctgaaggccatgagacctcatcctgggcgaccattcttccacacccagcctagaagcactcctgggttgataccacggcctccagccgcccagccagtgcatggccggacagactgggcttccaagtacgcatctcggcgatgactgtctgccttggtgatgaatctcttcctagggagaagcaggatactttccctcagctgactggtgttctacctgcaagatgtgcagagggcataaaagcaaatcaacactttatagttattcttctgaactaagacatgtcaatattcttttttaaagtttttttttaaaatattgatttgaatgcagtaggcttttttgtataaaattattttattctaaaactgggtcccattattttcttaaacaacagcattttgtatatatggattatgttttagcattttatacagtcaactttgtaatgaactttttaaaaattaattgattttcctttggggttccagataatattttctacagattttgaaaaatgtaataatattaatgcagtattgcaacaggggtgcaatttaaggctatgtgatagagggttatttactcagtgtgtgcagatatttatgaagtggtgaaatttcaagtgtggctcactaggtacttcaggccttcttggactgttgttagaaaagtgatcctctgcttttcttagtaggtcattggtttgatttttggataccactctgctgttctaaaaggactattatattatataattcactttgttttacttttgttccccagatgaaagaactctaagtaaatacattttaaaaaatttttctgacaccctttaatgtggttgcagatctcagatgaaaccaagcttaattatactatgccattatattctaatttattccatttttgaaatcaagttgtatgtgtaccaataaaagagatttctgcttcaaaaggctctcaacatgaaggttaacacagtcaatcaaacttacattcctgccaagatgcatggccaaaaaactaagtatcaaagcagcagaaggtttttgattatagtaactgagatggaattttgtgcctagctcagttctccagatctggctaggagcagtcaatgactaatgttctgtcctagccaaattctcaggacaatttggggagcagaaagagttatggcagaggttccactcatctacaaagtcacagtcacatgccacatttgatctcctaaccctggtgtagtttctttcaagagtgagaactttatttgttgggcagaggctgttccattgagaggaatgtttacagcagtttcaaaaatgacaaagtcagtttggagacagaaaaagacaaaaggtccagtctcatccatctctatatggtacatttgcctcacttatggttgccttaaaggcaagagggaaggtcaccatcagtgaacgcaatgcaatctcaacagtgtattgattcatattctcctagggctcaaactactctctattggttccaggataatgacaaattgaaccatatgtaagtaatcttttattttttattttttttttgagacagagtctcactctgtcacccaggctggagtgcagtggcgcgatcttagctctctgcaacctctgcctcccaggttcaagcctcctgagtaactgggactacaggcgcccgccaccacgcccagctaattttttgtatttttagtagagacggggtttcactgtgttagccaggacggcctcgatctcctgacctcgtgatccaccctcctccacctcccaaagtactgggattacaggcatgagccactgcacccagccaagtgatcatttttataggttaaaatgataggtgaaatgaatatagacactttcatatggttcaacctaatgacttggtaaattattgccttggtgtattaataatatgttgcattctgaacaaataaccatggcttccaaagggccctaacctaaaatcggagagtaatttatgctttggagaatttgactcaaatatatacttgaccaagcaccatgatccctaggggcatgagaaaagcacataatggatgtggatgtgataggtggtcttttcctgttaacaagctggcagcaaagcttcagaaaatatatatgcaagcacaacttgaagctgaattcatttctgtattatattctcaactcgttatctaaagcatcagaacatgtgttttcagagatgagtcctttactataaggttaatatttattttcattttctgtattatatatgaaaagtaaattaatgtgaaacctggcccagcttgctggaaagcaggttttaaattgtaaatattccttagaggagcaaatggattgtttaataccatagtctcagtaatctagcttatataaggtcattacattttttaactgaaaaacctagttacctgattattgcacattataaaattgtttttctaatactttatagggcccaacttcagaaaatacttcgcttttttctttttatgctttcgtttgtttaccagcaagcaacttccctggggaagccaaacacatattcataaaaaaaatcaagtagctgatgtgcagttgagaaaactagaggactgaaaaaacaaattttaactagcaaatgctgtgaattactcttcctccccttctctgaaatgggtaaaggacaaattgtgtaaaaaaacctatgcactatagaagggaatagtaaccatttcttttgtctctctgtttctgttctgactgagaacctgcagccatttcttgttacatgaaaacaaaatgctacttgttacctctattttttgttactatacaattatgaaatgtaatgtaagacaccaacagaaatgatatacctgtaactgtacctatcaggactatacctcatttacagtcagaaagcttactgggatgtcaggaaatgatacagggttggttctcatttcgtgccgaaatgagacagaaattcagtgacgaaggtgcgttgtaggggtattgatgtgccccaggtagtgccagcagagtagggaaaactgcatttgcataaaaactactcttgacatgattgttcattttacaaaaaaattccattaattaccaagccctcacccagcccatgtgtgataggatttatgtaggaagaaacttgattttcaaataattttttaaatgtatctcttgcctaaaggactatatacatctaataaagtaacactgtgtcatcttctggagttatcaaaaattgtatacaatcaagacaacacaagaattattttatttttgagtgcaaatacaggtactgttggagttgatgggcaccatgctttctcatgaagtagcatttccctaccatcaagccattgttttgtgccattcaggagaggaaaaaaaggaatttatgctgtacatttcagttcagtgtatgaccaaaagcaatatgtttataagaagatgtttgacatactaattattttatatcatttaaaccatactgtagcaacataatatatggagctaatttgtagaattatttttacgatttccaaacaaatgtactgtactgttatataatttattgtgaggaccttctcatggaagccattaggaaaacaaactagaggtaaatatcacattaatctgtattatcaatttctcatagacactgtgctaatgtgaattttaaatgacctgcatcaagtcttctgatctcagataactcagtacagatagcaattagtcagctgatttgattacaatggagtaaccgacaatatatttatttataaagcacatattcataataacgagaagaattcagaaaaccacttaagcaagacccttctgaaataaaaaatgttgctttttaaatagtttgtcctaaggtgtttaaaacatgtcaaccttatgtaaggaaaaatttcctggtccaaataaagttgaagtttaagaaaaattg

SEQ ID NO: 4318 - DNA, 3994 bp, Homo Sapiens
  NM_016516
gcgggggcgggaacccgggctcgggcccggccgggcgccgggcggcggcggccgtggagcagcagcctcggtgcgacgtggagggctggaggcggcggcgatgcactaggcctcgctcagggcggctgccccgggacccgcagttgagtggtgattttatgcaatggcttcaagccacagttcttcaccagtgcctcaaggaagcagcagtgatgttttctttaaaatagaggtagatccgtcaaaacacattcgacctgtgccatcactgccagatgtgtgtcccaaggaacccacaggtgattcacatagtttatatgttgccccatctctagttacagatcaacatagatggactgtatatcattccaaagtaaatctcccagcagcattaaacgatcctagattagcaaaaagagaatctgacttcttcacaaaaacatggggattggactttgtggacactgaagtcataccttcattctacctcccacagatcagcaaggaacattttacagtatatcaacaggaaatctctcagagagagaagattcatgagagatgcaagaatatttgtcctcctaaagataccttcgaaaggactcttttacatactcatgataaatccaggacagatctggagcaagtacctaagatttttatgaaaccagattttgccttggatgattccttaacttttaattcagttttaccatggtctcattttaatactgctggtggaaaaggaaatcgtgatgcagcttcctcaaagttgcttcaagaaaagctgagccattatctggatattgtggaagtaaacattgctcaccagatctctctacgttcagaagcattttttcatgcaatgacctctcaacacgagttgcaggactacctcaggaaaacttcccaggctgtaaaaatgcttcgagataaaattgcacagattgataaagtaatgtgtgaaggatcactccacattttaagactggcacttaccagaaataattgtgttaaagtatacaataagctgaagttaatggccactgtacaccagactcagcctacagtacaggtgttattatctacttctgaatttgttggagcattggacttaatagcaacaacacaagaggttctacagcaggaacttcagggcattcacagtttccggcatttgggatcacagctttgtgaattagaaaaactgatagataaaatgatgattgcagaattttctacttattctcacagtgacttaaatagaccactggaagatgactgtcaagttttagaagaggaaagactaatatctcttgtatttggacttttaaaacaaagaaagcttaattttttagaaatctatggtgaaaaaatggttattacagcaaagaatatcattaaacagtgtgtgattaataaagtttcacaaacagaagaaatagacacagatgttgttgtgaagcttgcagatcagatgagaatgttgaattttccccagtggtttgatctgctcaaggatattttctctaagtttacaattttcctacagagagtgaaggcaacattaaatatcattcacagtgttgttctctcagttcttgacaaaaaccaaaggactagagaattggaagagatttcacaacagaagaatgctgcaaaagataattcactggacacagaggtggcttatttaatccatgaaggcatgtttataagtgatgcattcggtgagggtgagctaacacctatagcagttgacactacctctcaaagaaatgcatctccaaatagtgagccctgcagcagtgattctgtatccgagccagaatgtactactgattcttcatccagcaaagagcacacatcatcatctgctattccaggaggtgtggatattatggtcagtgaagatatgaaattaactgactcagagctaggaaagctggcaaataatatccaggaattattatatagtgcctcagatatatgccatgatcgagctgtcaaatttctcatgtcaagagcaaaggatggttttcttgagaagctaaattccatggaattcataacactttctagattaatggaaacattcattttagacaccgaacagatctgtggaagaaaaagcacgtcattacttggagcacttcagagccaagctattaagtttgtaaataggtttcatgaagagagaaaaaccaagctcagcctcctcttagacaatgagcgctggaagcaagcagatgttcctgcagaatttcaggatcttgttgattctctgtcagatgggaagattgctttacctgaaaaaaaatcaggagccacagaagaaaggaaaccagctgaagttcttattgtcgagggacaacagtatgcagttgttggaaccgtattgctgttaataagaattatccttgaatattgccagtgtgtggataacatcccatctgttactactgacatgcttactcgtctgtcagatttattgaagtacttcaattcaagaagttgccagttagttcttggagctggtgcactgcaagttgttggactaaaaacgataactacaaaaaatttggctctttcttcacgatgtttgcagttaattgtgcactacattcctgtgatccgggctcattttgaagctcgactaccacctaagcaatatagcatgcttaggcattttgatcatatcactaaggactaccatgatcacatagctgaaatatcagctaagcttgtagcgataatggatagcttatttgacaagctgttatctaagtatgaagtgaaggctcctgttccttctgcctgtttcaggaatatttgtaagcaaatgacaaaaatgcacgaagctatatttgatctccttccagaagaacaaacacagatgttatttttaagaattaatgcaagttataaactccacttgaaaaagcagttatctcacttaaatgtgataaatgatggaggacctcaaaatgggttggtcacagcagatgtagctttttacactggaaatcttcaagccttaaaaggccttaaagatttggacctaaatatggccgaaatttgggagcagaagaggtgatgtcatcctggaaaactgggtagttcatctgaccatgggatgtgtttgttatgaagaaaatctggatgcctgtgattcgagaattgaacctgaaacccaaagtgaactggggtgggggaagggaaaaaggaaagtatcaagtgttgggaaactggattcagtgggatctacaaggaatgtcatttttgtgcatcctacagtgaggagtaactgatcaggtgtctataacatttttcattctctctggaaacagactcaggtttctttggaccaaatccaaaagaacacatagctgtaacacagctgtagttgactagaatgctctgtatactttatattaaaaaatgctttgcatttcttccagtgcaatgaaattcatatggtgtcccaccttatttaatgatggtacaatttaaaatcttagtcaacttctgtagaaagttttctctatgaaagtaaagctgtttgaaaaattattatttttttacagatctttctataaaaaataaacatcttttgattgcttggatttaggaattcaatttttgtttcagtgaccaatgtcaagttgcaggctttgtgtgttgcatatttaatatttctactaccaccgtatgtcaactgggtaaagccttccagagctctctaaatacctgaaagacttaagcctttttttaagtaattaatacttaaaaaaaaagatcctggcatctatttatgcaactaaatacttttcagaaatggtatataaaaggctacagtttaatatctgtatttttataaaagtatgatgaagggtttggggtgtttttatttgtagcagaggtaagaatatgtattcatataatctgcctacttttgagttctcatattaacatttagataacatatgaagta

SEQ ID NO: 4319 - DNA, 1242 bp, Homo Sapiens
  NM_016523
atttcatgttatacttaataaaacaaaacatacctgtatacacacacattcactcacattgaagatgcaagatgaagaaagatacatgacattgaatgtacagtcaaagaaaaggagttctgcccaaacatctcaacttacatttaaagattattcagtgacgttgcactggtataaaatcttactgggaatatctggaaccgtgaatggtattctcactttgactttgatctccttgatcctgttggtttctcagggagtattgctaaaatgccaaaaaggaagttgttcaaatgccactcagtatgaggacactggagatctaaaagtgaataatggcacaagaagaaatataagtaataaggacctttgtgcttcgagatctgcagaccagacagtactatgccaatcagaatggctcaaataccaagggaagtgttattggttctctaatgagatgaaaagctggagtgacagttatgtgtattgtttggaaagaaaatctcatctactaatcatacatgaccaacttgaaatggcttttatacagaaaaacctaagacaattaaactacgtatggattgggcttaactttacctccttgaaaatgacatggacttgggtggatggttctccaatagattcaaagatattcttcataaagggaccagctaaagaaaacagctgtgctgccattaaggaaagcaaaattttctctgaaacctgcagcagtgttttcaaatggatttgtcagtattagagtttgacaaaattcacagtgaaataatcaatgatcactatttttggcctattagtttctaatattaatctccaggtgtaagattttaaagtgcaattaaatgccaaaatctcttctcccttctccctccatcatcgacactggtctagcctcagagtaacccctgttaacaaactaaaatgtacacttcaaaatttttacgtgatagtataaaccaatgtgacttcatgtgatcatatccaggatttttattcgtcgcttattttatgccaaatgtgatcaaattatgcctgtttttctgtatcttgcgttttaaattcttaataaggtcctaaacaaaatttcttatatttctaatggttgaattataatgtgggtttatacattttttacccttttgtcaaagagaattaactttgtttccaggcttttgctactcttcactcagctacaataaacatcctgaatgttttcttaaaaaa

SEQ ID NO: 4320 - DNA, 1912 bp, Homo Sapiens
  NM_016524
cccaggcgccccggccttattccagcctggggagcgcctcggtggggagcacgggacagcgagggaggccgaggcgggggccctgggcgcccgatatctccgaaccggggaggcggccccgattccgagagccggaacgcagggaaaggcaaggacggggcggccggcggaggggcgggcgccgctcatcagccacgccagtcacgtctggggccaccggctgcctttttcttcctttccccctttgctttcttccccctccgctgttggcgagggcaaagtggccgtggcggcgccatgcccgggccggagtgagtgcgcgcgggcgaaaatggcgtacatccagttggaaccattaaacgagggttttctttctagaatctctggtctgctgctgtgcagatggacctgccggcactgctgtcagaagtgctacgagtccagctgttgccagtcaagtgaggatgaagttgaaattctgggacctttccctgctcagacccctccctggctgatggccagccggagcagtgacaaggatggtgactctgtccacacggccagcgaagtcccgctgaccccacggaccaattccccggatggaagacgctcgtcctcagacacatccaagtctacatacagcctgacgcggaggatttcgagtcttgagtcaagacgtcccagctctccactcatcgatattaaacccatcgagtttggcgttctcagcgccaagaaggagcccatccaaccttcggtgctcagacggacctataaccccgacgactatttcaggaagttcgaaccccacctgtactccctcgactccaacagcgacgatgtggactctctgacagacgaggagatcctgtccaagtaccagctgggcatgctgcacttcagcactcagtacgacctgctgcacaaccacctcaccgtgcgcgtgatcgaggccagggacctgccacctcccatctcccacgatggctcgcgccaggacatggcgcactccaacccctacgtcaagatctgtctcctgccagaccagaagaactcaaagcagaccggggtcaaacgcaagacccagaagcccgtgtttgaggagcgctacaccttcgagatccccttcctggaggcccagaggaggaccctgctcctgaccgtggtggattttgataagttctcccgccactgtgtcattgggaaagtttctgtgcctttgtgtgaagttgacctggtcaagggcgggcactggtggaaggcgctgattcccagttctcagaatgaagtggagctgggggagctgcttctgtcactgaattatctcccaagtgctggcagactgaatgttgatgtcattcgagccaagcaacttcttcagacagatgtgagccaaggttcagacccctttgtgaaaatccagctggtgcatggactcaaacttgtgaaaaccaagaagacgtccttcttaaggggcacaattgatcctttctacaatgaatccttcagcttcaaagttccccaagaagaactggaaaatgccagcctagtgtttacagttttcggccacaacatgaagagcagcaatgacttcatcgggaggatcgtcattggccagtactcttcaggcccctctgagaccaaccactggaggcgcatgctcaacacgcaccgcacagccgtggagcagtggcatagcctgaggtcccgagctgagtgtgaccgcgtgtctcctgcctccctggaggtgacctgagggctgcagggaaggcagctttcatttgtttaaaaaaaaaaaaaaaagacggaaaaaaatgtgtcacatactattacatccacacctgcatacacactcgcaacatgtctacacacgtccacacacacagacacacagataccccaaatcctctca

SEQ ID NO: 4321 - DNA, 2743 bp, Homo Sapiens
  NM_016525
agacgcccaaatgagtggggcggtgaggggaaggaggagggaagtaggacttcaacatggcggctgcggcactggcggtggctacggtgacggcctggcccggagcgggcagagttggaggtggtggcgttcgctctccctaggggctgtcgggagctcagcggggaccgagcctgggaggccggccggtgccagcacctttcggcttctgagacggcggcagcagcggcattcaggttctaaatggcttctaagaagttgggtgcagattttcatgggactttcagttaccttgatgatgtcccatttaagacaggagacaaattcaaaacaccagctaaagttggtctacctattggcttctccttgcctgattgtttgcaggttgtcagagaagtacagtatgacttctctttggaaaagaaaaccattgagtgggctgaagagattaagaaaatcgaagaagccgagcgggaagcagagtgcaaaattgcggaagcagaagctaaagtgaattctaagagtggcccagagggcgatagcaaaatgagcttctccaagactcacagtacagccacaatgccacctcctattaaccccatcctcgccagcttgcagcacaacagcatcctcacaccaactcgggtcagcagtagtgccacgaaacagaaagttctcagcccacctcacataaaggcggatttcaatcttgctgactttgagtgtgaagaagacccatttgataatctggagttaaaaactattgatgagaaggaagagctgagaaatattctggtaggaaccactggacccattatggctcagttattggacaataacttgcccaggggaggctctgggtctgtgttacaggatgaggaggtcctggcatccttggaacgggcaaccctagatttcaagcctcttcataaacccaatggctttataaccttaccacagttgggcaactgtgaaaagatgtcactgtcttccaaagtgtccctcccccctatacctgcagtaagcaatatcaaatccctgtctttccccaaacttgactctgatgacagcaatcagaagacagccaagctggcgagcactttccatagcacatcctgcctccgcaatggcacgttccagaattccctaaagccttccacccaaagcagtgccagtgagctcaatgggcatcacactcttgggctttcagctttgaacttggacagtggcacagagatgccagccctgacatcctcccagatgccttccctctctgttttgtctgtgtgcacagaggaatcatcacctccaaatactggtcccacggtcacccctcctaatttctcagtgtcacaagtgcccaacatgcccagctgtccccaggcctattctgaactgcagatgctgtcccccagcgagcggcagtgtgtggagacggtggtcaacatgggctactcgtacgagtgtgtcctcagagccatgaagaagaaaggagagaatattgagcagattctcgactatctctttgcacatggacagctttgtgagaagggcttcgaccctcttttagtggaagaggctctggaaatgcaccagtgttcagaagaaaagatgatggagtttcttcagttaatgagcaaatttaaggagatgggctttgagctgaaagacattaaggaagttttgctattacacaacaatgaccaggacaatgctttggaagacctcatggctcgggcaggagccagctgagaccaggccctgcctaggccctgccgcagaaccaccatccctgggaggccctgcagagcccacctgtggggaaagagaaggggcagcttccggattttcttttgggggttagaaggtcaggtgtggagactgctcgccagtctctgtgagcctaggccctgagctggggaggtggggaagattcgggcatgtgagtgcccccagaactgtcctggctccttccgtattaaacgcatttgcattttgagaagtgtccttcccacttcagccctccggagagactaccctagtctttctggggtgtttatgtcctcagctgaagcctggcctagttgctgagaggggctggggagatggggcgggagggccagactcagtgctgctgtggagctaggtgcttcccccttcccctgagactggtggactgaactccagtcaagttgagttcaagtgaaagattcttccagggttttattttttcccctcctaacaaagtctcatagtgttaacactggttctgcaatatctctgaggtgcaaagaatgcacttttccctatggggcccagagtttgccttttctgccaggcagtcaccatgcttccctaccccagcctgtttcttttggcttggtttggaccacagtcctctgctacccagggttttagagcccctgctctaggaaacagtttaagaaatcattggccccttcccagcacattgaatgggtaagcagacaggccatgatttagttggccagcactaactccacctctgttctccttgaacagcttcccctccagcccactgctttaggatgacacaatgaataacacctagtcatagaaatcagtctctctggtttgttttgtattatgttgtacatcattaaagatctaaatacaaaggatatacagtcttgaatctaaaataatttgctaactaactattttgattcttcagagagaactactaataaaaatctaaaaggta

SEQ ID NO: 4322 - DNA, 2971 bp, Homo Sapiens
  NM_016526
agctgggggcggggccggaagctctttccccgcgactgcgccacgtctgaggcggctgtggccgcgtcggtgtccgcgtcgaggagccggggcagggcacgatggcggactgggctcgggctcagagcccgggcgctgtggaagagattctagaccgggagaacaagcgaatggctgacagcctggcctccaaagtcaccaggctcaaatcgctcgccctggacatcgatagggatgcagaggatcagaaccggtacctggatggcatggtaagggcccacggtgtgcgtgtatcagtgccctgccctagcactacctgctgcagagcctgcagtgtctccttcagcactggtgcgggtgggtggtcaaatcaccacttctgtgtgatcttgctgggattcctcccttaggactcggatttcacaagcatgaccagcctgcttacagggagcgtgaagcgcttttccacaatggcaaggtccggacaagacaaccggaagcttctatgtggcatggccgtgggtctaattgtggccttcttcatcctctcctacttcttgtccagggcaaggacgtgagccagtgggagctggtgtctgtgggtgccaagggcagccagggtcttccctgcctggtgttttgggctccagaggacttacctacaaaatactcctttgcaatgataattgtgggtcaggaatcttcttcctgtgtggcaggaggctgcggctgcctgtgacctgatgagctcatgttggctggtcccatgtgtgaaagggactctctcggggaaaccaaggcccagcccctcccccctcccccaggtgctagagagccaggcagagctggggccacagcgtgtctggagaagccaggtctgagcagagcagctggtgaatcccagacgtggccacctgtggcttgcagcccttctccccgcgcttgggactctgacatcttaaggctgcacggtcgtgtccttgtctgggtgaggccatgtctgtgatccaaggttcctggaactgacacaggaaggggctgtgaaccctaagtgggtgtcatctcctccgaccgaggcttctcaccctggagatggcagttactcctggccatggttgctgagcatgggcagaccagtggaggccaccctactgtgttatctgcgccttcgatgaagtgagacccttggggagaacgggctgtggatgaaggagtggactgcagccttggcctagccactgggctgggatcttctgggtcatgtgactgtgtatccaggagcagaaacttgtattctcaggattcaggatctacccagcaccaaagatgtattttcaggagaacagacctagaaatgggcctgtctggcatttcagagtcaggcaaagcaggcagggccagggagcttctgtgggtctacacaagaaggttcctgtgagggctatcagttgttgccttctagcttgctggtaactttggcgcctccgccaagccctgccagactcccctggctgtgatggcattctgtgccatcctccttgtccccagcctctgcaggatgccctccctacccacctctccctgggccttccctgtccactgggctggattcatgttcaaaccactggactggcagggcaacgacttcttcccacctcaagatgaggtcctcgcccccttgtcttggcataaaaacacctttaaagcatgagccatgtgcttctttgcccttctctgtcctgttccaatcttctgcctcccagtcactccctggggactatgggatcactgtccccccacctgtgtggccacaccatatgtcctgtcaatccagaactgcctctgagctccaggctgaccacagatcagccacagcctgatgcctgcagccccactttgctcacccttcccctcccctcctccttccttccacacagcaagcctacctttctccatccatgctcaccatagcccccttccttgtgacctggaccctccattgtacctggctgagactgtcagcctcctggaggagtggggtccaccttcttcttgccctatgcagtgcaagctcacttctcacccagcaaggttgactcatctgcctccatgtctctggggctttgctgttgccctgaaacctagctgggctggtcttgctcccagcttgcttccccctcctcggatgtccctttgcaggcccctgtcgttcctccggcaccagtgtccttggctgccatggcaagctcatcaggggcttgtaccctggtcaccaagcatggtagcagctgcctgcattgtatctccatctggtcactgcaggtgccaacccttcatcccccatgttttcctgggccatggagggctgacctccgtttctggggaatgtggctgagctgtggtaaccagctacaccccaggtgctctttccatggtggtgcctgctcatcttgctgatgcaaactaggaagttaggctgcatctcggagtggctttcgctggagaggtgctttgctgtctctcagactcagtcactgtgttccctccccgcctctcttatctccatggctgtttgcagctctcccaggtactttggggtctgagctggaattcctttgtggtttgctcttctgcttctcactcttgtattaagaaggattccacaaagggagagtggcatccctgctgctgctgtgccagaccagagtttcctgaggggccctgaccctaaccctccagctcagccctgtacacctgaccctgtaaatgagtggggtttgctgactgtaatccctgacaccagtaaaaccaaaaggactcttgggggctcagtgtgagagccagggttacctactctgccaagtgaggacaaactgctaggctgtatcccataatttcaggatgagaaacattaacaataaaaatttgtagtaaacataacctcatgaagaactaaaaaaaaaaaaaaaaa

SEQ ID NO: 4323 - DNA, 4877 bp, Homo Sapiens
  NM_016530
ggcggattggcgggcacgccccctcgcccgcggccccctccccgcctctctccaccgcctcctctggctccccggtcagagggccggagcgagaagatggcgaagacgtacgattatctcttcaagctcctgctgatcggcgactcgggggtaggcaagacctgcctcctgttccgcttctcagaggacgccttcaacaccaccttcatctccaccatcggaattgattttaaaattagaacgatagaactagatggaaagaaaattaagcttcagatatgggacacagcgggtcaggaaagattccgaacaatcacgacagcgtactacagaggagccatgggcattatgctggtctatgacatcacaaatgaaaaatcctttgacaatattaaaaattggatcagaaacattgaagagcatgcctcttccgatgtcgaaagaatgatcctgggtaacaaatgtgatatgaatgacaaaagacaagtgtcaaaagaaagaggggagaagctagcaattgactatgggattaaattcttggagacaagcgcaaaatccagtgcaaatgtagaagaggcattttttacacttgcacgagatataatgacaaaactcaacagaaaaatgaatgacagcaattcagcaggagcaggtggaccagtgaaaataacagaaaaccgatcaaagaagaccagtttctttcgttgctcgctactttgatgaactctttctgagagactgcagcacacctagagggccctttcctgcttctctgaaagcacaggtcacccagcctcagaatcacacctcccggctgctgctgagagcaccactgaacttagacctctcaacacagtatgccaagtggattccagcctcatggcctagcaaaagaacagactccctttttcaaacatggaagcaatgaagtggagacacatgcaggacctaactcgttttttccttgttttattacctgttgcagaagcggttatctttcttttttactttgcacatcagtgttagcctttccctatttcagcacaatcttagactcatatttgcacacttttgtgtcgtgaagttctagacaaatttgtacatgtggcaatgttaaaagagcatttacagcagaggttaatatactaaaattaaagggtatttggtctggttcatatggtcaaatattactgccttggtagcatttatttaagggctttttcttaaataagaatcattaaagtcattaaaaaaatttactgaaatgcccatcttgtcatcaaaggccacaatttctttatttcttcagattaagagctttgcctcatccccgacctgttttccagagtctgggtagctgaatgaatcactttaaaatgattacctctgcctaatctatagaaactgcatttggaaatcaccataatctcatttttccctggggtttgtatttgctattctttcccatgtttgacttaagtgtaatcactcttaagtaatatttgaacattattatctgtttctatttgtgaacttcttgagctgaaattttacgtgggctgagagatataccatttagggttttagtgcagcatctaactgtgattctgtcaataaggatatgtaatatattttttcttaggttcactccttagctggctggtttagttgtaataccaaattcctaccataatccctgtctacaaaagttaggtttagattttagtttgcggaaaccttccctatatagagacagattaacttgttgatataaatttaatagagctagctcttggtaatggtgaaaataatgagttttggttggttttatttggcagatgtttttagaaataaaagtacttagacctagtgcagcctctaggaaaagtcttgccttttcattagagaaaacaggaccaaggtttcagttttcaaacagctgttgttgattgtgtagaacccagttccatctgttttggttcattgttacagaacttagtccagtcatttgggctaaagccaaccaaaagcttagttgcctttctcaacaaacactggtactggtatacttttgtagatgaaaccatcacaaggtatttagtgttaacttgtgtgccaaattcagatcactatgtcgttgttgctctagccttcagtgtcataacacaggggggataaaacagaggggatgagggaaatgaattctgttaataattattcttcctggtatgcctgttttgcttcacaaaggctactatcatgctggatagataagaacaggagatggcagtggaaagggattgcttgttaccacagagaattctcttcaaattaagatatgtcattagaatgcttggaccagtcaatcttttgtacttatttgaaaatataggaacaatttagcagctgcaaatatgcccaagctatttttaatagatatactaaacttattgttgacaaatttcagcctccttaatttttttttttttggtaattacctataggcttaaaagtcattcgttgctgttctagtataattagtagttccgtgattgaaagtttattgtaattctactatcttcaaattagatacattttcaaaaggaaaagataattttttagaaacatcttaatattcactatttcctgaaaaaatccaagcagttaacgctttctggatggtaacaaagtaccttctaaaagataagtgctatgacaccatgtatgaatgtaattctcttagtaatttacctctgactatttggtgtcttaacgctttggtttatataatctcaggggttgtctgcaaaccaaaactgacatattctgtggttagcttttattacttttttttttaacagaatgctttgctttggttatatttcttctttcttcttttgtcttatatggattaataactagtctccatgaacttcacttgaaagagcctgtaaaagttagatgagtctaaaagtgctctttgaagtagcagcaaattgggagtatatgctctgttatatagaaataaattgtccttgctattttcttacatttagctttgctagattgtatatacattgagctaagaccttaggaaattcactttctgcatgataaaatgacccaataaatattccactttgcttaataatgtacatacagtgcattattttttctatttgtagatgaatttaatgacagataattgtctgttccccgctgaaactgaagaaatctagtttttttgtgaacatttttgtggtcttatggataaggtacatgaagatttttgcagcagtattagtggttcagtggctgcactttattaatcagtgtgttaatttttgacagtgattggactagaccttttcaaatagagtctgagggtatcagacagtgaaaatgtgctgtaactaagtagcatgtaaatcagttgattgtaaaacgtttcgctgggaacttattttagctatattttacttcagacagattatgatacaataatctacctgtgcatcagttagtaggtgctgcagggtttcttactatttacagaaacattttgtgcagtctttgttataaattttcagaagactatactctttactttgaaggtctattttttaattatacctcatttagctaactagtattctaatacctggtagaaaaacagtgagccagcctttaagcatctaacaaaatttagactctttgttttgttttgaactgaagacatcattgggaaaggtaggaaatattagtttaggatagagcatacatgtcatatccagtagcataaaaaaagtattatctccctgtctccattaataaatttagctgtgcaatataggtgcgtttttgcagaagtttctagtaagagattataactccattttacaggttctgaatgctcagagtctatattaaggcttataaagtttttcctgtgatcagtaagtgacacatttaagcagacattcttttcaagttcatgacttagattcctttacaaatttagttctcaatctttaaaaaccacatttcattatgttggttaattattataaattttaagcactcatttctgcaatcaggtttctcagaattttttttttttaaacagaagagacattcctttttccttgttacatccaaggggggcacaggggtgggtggaaaggaatgtctaaaaatgaaatcccttgatatagagggacctagacggacaggatatgctaaaataatttcaaattctagcacaattttagagtagaataagtcatttttttagactaataaaattaatggctgtcatgttcactctgaaaaaaatctaaatgactgaaatgtacagaaataaaaattagcaaacaattattctagggatattttcagattttacttcatttcttgaaatgcgtgtgccatatgcaattgcatttcttgtgccaagaaactaatagaacttatttcactttacctttttttaaaatgtgaatttagttattatagttcaattttatggccttacagatggcttttattttgtttgcagctgacactgcagttcctttcatgcaaaataccataaactgtttgatgaaaatcatgcccctaatggaaactctctagtttttccatataactatcctactgtacatgtttaaacatattttatttttgctccaatggcttaatgtgaaaagctcctgcagataagtggacctgtcatgtggttaatcttgtttaagccaattcattaactgtgtactgatactgatgctatgttttttttaaatggattttattccaggtgaactttttttttataataatgttcgtctaaaataaaaactacataatgaaaatgaaaa

SEQ ID NO: 4324 - DNA, 1073 bp, Homo Sapiens
  NM_016533
atgtgcacacacatacactcacacgtgtgtgcaggtgcacacctcccccagaggctgcagccaagacgggcatcccacatcagagggatgaatggcaggtctgtcccgccagctgtgtgctctctcccacccgaagaaagcagcagagactcagacggcggagcctggaggagcccacgcagtctgttcccggcacccggtgcgtgtgaagggacttgagggcagcgagatggaatcagcaagagaaaacatcgaccttcaacctggaagctccgaccccaggagccagcccatcaacctgaaccattacgccaccaagaagagcgtggcggagagcatgctggacgtggccctgttcatgtccaacgccatgcggctgaaggcggtgctggagcagggaccatcctctcactactacaccaccctggtcaccctcatcagcctctctctgctcctgcaggtggtcatcggtgtcctgctcgtggtcattgcacggctgaacctgaatgaggtagaaaagcagtggcgactcaaccagctcaacaacgcagccaccatcttggtcttcttcactgtggtcatcaatgttttcattacagccttcggggcacataaaacagggttcctggctgccagggcctcaaggaatcctctctgaatgcagcctgggacccaggttctgggcctggaacttctgcctccttcctccgtgatctgccaggctcgtgggcactttccacagcccaggagagcttctgaaaggacagtatagctgcccttgctccctacccacagcacctgagttaaaaagtgatttttatgttattggtctaagggacttccatcttggtctgaagtcctgagctcagacgcaggtactgccagccataccttcctggtagcatctgctggacctaagtaaggcatgtctgtctaaggccaagtctgcccggcttaaggatgctggttctgactctaccccactgcttccttctgctccaggcctcaattttcccttcttgtaaaatggaatctatatctataaaggtttcttcaaatccaaaaaaaaaaaa

SEQ ID NO: 4325 - DNA, 1258 bp, Homo Sapiens
  NM_016535
ctagaccctcttctctcccttcggcttctctctttcggccggcgccgccagttcctggggcacacccagaggtccccttctcgccgccgcctgcaactgcgagggtagcccggggccgcttggagtcgcccggacctgagaggctgctgcactgggcctcagccagccctccggatgctggtgctgccatccccctgccctcagcctctggcattttcctccgttgagaccatggagggccctccccgtcggacttgccgctccccagaacctggaccttcctcctccatcggatctccccaggcttcatctcctccaaggcccaaccactacctgcttattgacactcagggtgtcccctacacagtgctggtggacgaggagtcacagagggagccaggggccagtggggctccaggccagaaaaagtgctacagctgccccgtgtgctcaagggtcttcgagtacatgtcctaccttcagcgacacagcatcacccactcggaggtaaagcccttcgagtgtgacatctgtgggaaggcattcaagcgcgccagccacttggcacggcaccattccattcacctggcgggtggtgggcggccccacggctgcccgctctgccctcgccgcttccgggatgcgggtgagctggcccagcacagccgggtgcactctggggaacgcccgtttcagtgtccacactgccctcgccgctttatggagcagaacacactgcagaaacacacgcggtggaagcatccatgagccgggctgccgggtgccccaggtaccacaggactttgcagggagcctggactcctgtccagacacctggtgagagcctgaggctggtgttcagggccctggacacagacacagagcagccgcatctcaaaggcagagccctgcctgaaggaggaatccgtgagtaatcttcaggtcctccgtgttctggagctgagatgggaatgagcccctacacagaatggagtcctctagcctaaagatatcagctgttccatggcagagccttgactggatggaggtggggagtgtggtgtgtaaagtctctggcctcataaaaggtggctgtgggtcgtcaggaatctgcgccatcttcctggggcttctgcgctgttgttggggaagggaccccagtcctgccttccaccccccaaccaggcctgagactgatcaaacaataaacacgtttcccactctgaaaaaaaaaaaaaaaaaaaaaaaaaaaaaaaaa

SEQ ID NO: 4326 - DNA, 2350 bp, Homo Sapiens
  NM_016545
gcggccgcaagccgtcgccccctttaagagcctgctccgcgggactaacgttcgaacgggccctggcgcccctcctcgggctccgattggccgtgcgcggcgcacgagggcgcgccggccagccccggaacggttggcggcccttcgtgattggcggtcgagaagcctatataaggcgcggggcagccaggctgccctgtttagcgaccggacccgaaacggggaagttgtcttgtttggagaggttagtagagcagcgcgcgcgtcaccagagtcgtttctcttcggagtcttaggtgatcgagggtgtgcccagggggcggacttgtttgcgcctcccgttccctcccaatttccaaacgtgtcaccccggcgccgacggccctgtgcaggggaagcagatggagttcaagctggaggctcatcgcatcgtcagcatctctctgggcaagatctacaactcgcgggtccagcgcggcggcatcaagctgcataagaacctcctggtctcgctggtgctgcgcagcgcccgccaagtctacctgagcgacccgtgccccggcctctacctggccggtcccgctgggaccccggcgccgccaccgcagcagcagcccggggagccggcggccgggccacccgccggctggggagagccgcccccgcccgccgctcgtgcctcttggccggagaccgagccgcagccggagcgctcctccgtctcagacgcgccgcgggtaggggacgaggtgccggtggccacggtgactggagtcggggacgtttttcagggcggagaggcggacgcgacggaagctgcctggagccgcgtggaggggccgcgccaggcggcggccagagaagccgagggtaccgccggaggctggggcgtcttccccgaggtatctcgtgccgcgcgccgcccctgcggctgccccctaggcggggaggacccgccgggtacaccggccgcgaccccccgcgctgcctgctgctgcgcgccgcaaccagcggaggacgagccccccgcgccgcccgcggtgtgccccaggaagcgctgcgcggcgggggtgggcggcggcccagcgggctgcccggcgcccggctcgaccccgctcaagaagccccgccggaacttagagcagccgccgagtggaggagaggacgacgacgcggaggagatggagaccgggaacgtggctaacctcatcagcatcttcggttccagtttctcgggactcctacggaaaagccccgggggcggcagagaggaagaggagggagaggagagcggtccggaagccgccgagcccgggcagatctgctgcgataagccggtgctgagagacatgaacccctggagcacagccatcgtggccttctgagcccttggcccccctgcggggaggaggtggagcagcgggcgtccccgaagtgagggccaggcccttcccggctgcgaggacgcccagagaccgcgggcgctgagcgcgttgggcagactggttgcctctgggcatcgcaaactgcccccgggcgcatctggcttatctggagacctgggagcttgaggctcattggaagaggacgatcgttaacttttgtgtttgtgtatgtctgtgtatgtaagtttgtcttgtggcattaagactattttgctcttctggaatgcaccactccttccccagggtttaagagattgggggcagacagggactttcctctgccggctgcgtggagaaggaagcggctaaaaggtttgggccggggagttccccattcgttctccggggagggagggactttacacctacccctcaccggaaagctagacccgcttcagggccaggagtggcgtttccgcacaggatttcctaagacgagagggatttagccaagagcacagacttggattccttctgtccctccccacctttctctcccaatgaagaaacgtttatatcctgtgattactctaggaaaggggcgtattaacggtcctttgcttccccgcaggggagaaaaagcttgacgaacttcacagaagagttcaagcttggaaataatggagtttatagagaaaagatatatttttaaaagctctaggtcagaagtactacacagtgcttttaaaaagtgtttaatgagagtttacagacagaagcccgaagtggaaagaccttatggttttgtagatatggtgactccagtctttgttgtataaaggttgggggagctgataaggtttttgtacagtattttctccttcgttgtattgatttttgtataaaaatgtaacttctacgtgtctaacacgtattaaatattttgaagcaacgtaaaaaaaaaa

SEQ ID NO: 4327 - DNA, 3398 bp, Homo Sapiens
  NM_016546
atttccaggaacttcctcctcccccaccggccttcaccttttgttccctatcctgggccagttctctcgcaggtcccagatgtccagttccagatgcctggacccagagtgtgggggaaatatctctggagaagccctcactccaaaggctgtccaggcgcaatgtggtggctgcttctctggggagtcctccaggcttgcccaacccggggctccgtcctcttggcccaagagctaccccagcagctgacatcccccgggtacccagagccgtatggcaaaggccaagagagcagcacggacatcaaggctccagagggctttgctgtgaggctcgtcttccaggacttcgacctggagccgtcccaggactgtgcaggggactctgtcacaatctcattcgtcggttcggatccaagccagttctgtggtcagcaaggctcccctctgggcaggccccctggtcagagggagtttgtatcctcagggaggagtttgcggctgaccttccgcacacagccttcctcggagaacaagactgcccacctccacaagggcttcctggccctctaccaaaccgtggctgtgaactatagtcagcccatcagcgaggccagcaggggctctgaggccatcaacgcacctggagacaaccctgccaaggtccagaaccactgccaggagccctattatcaggccgcggcagcaggggcactcacctgtgcaaccccagggacctggaaagacagacaggatggggaggaggttcttcagtgtatgcctgtctgcggacggccagtcacccccattgcccagaatcagacgaccctcggttcttccagagccaagctgggcaacttcccctggcaagccttcaccagtatccacggccgtgggggcggggccctgctgggggacagatggatcctcactgctgcccacaccatctaccccaaggacagtgtttctctcaggaagaaccagagtgtgaatgtgttcttgggccacacagccatagatgagatgctgaaactggggaaccaccctgtccaccgtgtcgttgtgcaccccgactaccgtcagaatgagtcccataactttagcggggacatcgccctcctggagctgcagcacagcatccccctgggccccaacgtcctcccggtctgtctgcccgataatgagaccctctaccgcagcggcttgttgggctacgtcagtgggtttggcatggagatgggctggctaactactgagctgaagtactcgaggctgcctgtagctcccagggaggcctgcaacgcctggctccaaaagagacagagacccgaggtgttttctgacaatatgttctgtgttggggatgagacgcaaaggcacagtgtctgccagggggacagtggcagcgtctatgtggtatgggacaatcatgcccatcactgggtggccacgggcattgtgtcctggggcatagggtgtggcgaagggtatgacttctacaccaaggtgctcagctatgtggactggatcaagggagtgatgaatggcaagaattgaccctgggggcttgaacagggactgaccagcacagtggaggccccaggcaacagagggcctggagtgaggactgaacactggggtaggggttgggggtggggggttgggggaggcagggaaatcctattcacatcactgttgcaccaagccactgcaagagaaacccccacccggcaagcccgccccatcccagacaggaagcagagtcccacagaccgctcctcctcaccctctacctccctgtgctcatgcactaggccccgggaagcctgtacatctcaacaactttcgccttgaatgtccttagaaccgccttcccctacttcatctgttgacacagcttttatactcacctgtggaagagtcagctactcacccgctattagagtatggaggaaggggttttcattgcattgcatttctgaaacattcctaagaccctttagttgaccttcaaatattcaagctattctgcagctccaagatgcaattatagaaacagctccttttttattttatgtcctctatatgccaggtgcttcacctgttatttcacttaatcctcataccatatttgcaaaggatgtgttattatctatgtgtgacaaatgaggaaactgaggctcaggggataaagggacttgcccaagtcccacagctggtgtgtgactgcagagactgtgctcttcccagtgtgctgcaatacttctcaaccctcctctaacctgctgtgtcacccgctttccctcccagcccccacatccttaccattttccctccctgggaattcctgcttctgcgaaaatggtatcctctagctcacactttcctaatggccccatctcctgcagaagccaggtgagcccagcactggactgaagttcttgcagacaccccacctgtgcccctatcatcaggggaactgctccacctgagaggaccaactctttaatttttagtaaaacctggaggtgatgggccgggcgcagtggctcacgcctgtaatcccaacaccttaggagtccgaggtgggtggatcacgaggtcaggagatccagcccatcctggccaacatggtgaaaccccatctctactaaaaatacaaaaattagccgggcgtggtgacacgtgcctgtagtcccagctactcgggaggctgaggcaggagaatcacttgaacctgggaggcggaggttgcagtgagctaagatcacgccactgcactccagcctgcggacagaccaagacttcatcccccccaaaaaaaaaagattggaggtgatttacagtgaaagacacaaataaaatacaactgttcaatggaaatagaaaataaacaccataaaagagagaagagaggtaatttgttagcatcaagagtcaagttgctatatggtcaaaggttaaatttatctctaaaaaatggcaggattcaaagttgtacatacatgtgattacttctgttttttacacccacatacagtacaaaagattattaaaaatattcccaaaaggcaggtgcaatgatgcacacttatacccccagccactcaggaggctgatgcaagaggatcgcttgagcccaggagttgaagtccagcctaagcaacatagtgaaaccccatcgccaaaaatataataataattctctcaaaatactaaacagaggtggttttattgataagattttggctgtttggttttccactattctctattggctaaaatttgtttaatgagcatgaaatgtttttattttattttgcttatttttatgattgcaaaaaatgatatgagtttctccctgccaaggcaaaaaaatatatatatacctatattta

SEQ ID NO: 4328 - DNA, 2167 bp, Homo Sapiens
  NM_016547
gcgaccgcttccgcccggaggagagatggtggcgccggcgtcccctccgtgaggtcgcgcccgttcgcaccgcccccgcccgcaagaaagatggcagtggcctgatccgggcccgttggcggcgtcactgacgcttcgctccggtcctcggatcccgagcgcggggaggcagaccgactgtgagctgcttgtccccatcctgcggccgtcctggggacacagagccctccgtggtgcccggggattggattggagccaggacctcacttcctcctctgcccctgcccctgcccctcccagcacctggcccacaccctgcagcccgccccatggtctggccctgggtggcgatggcgtccaggtggggtcccctcattggcctggctccgtgctgcctctggctcctgggggcagtccttctgatggacgcgtctgcacggcctgccaaccactcgtccactcgagagagagtagccaacagggaggagaatgagatcctgcccccagaccacctgaacggggtgaagctggagatggacgggcacctcaatcgcggcttccaccaggaggtcttcctaggcaaggacctgggtggctttgatgaggacgcggagccgcggcggagccggaggaagctgatggtcatcttttccaaggtggatgtgaacactgaccggaagatcagtgccaaggagatgcagcgctggatcatggagaagacggccgagcacttccaggaggccatggaggagagcaagacacacttccgcgccgtggaccctgacggggacggtcacgtgtcttgggacgagtataaggtgaagtttttggcgagtaaaggccatagcgagaaggaggttgccgacgccatcaggctcaacgaggaactcaaagtggatgaggaaacacaggaagtcctggagaacctgaaggaccgctggtaccaggcggacagcccccctgcagacctgctgctgacggaggaggagttcctgtcgttcctccaccccgagcacagccggggaatgctcaggttcatggtgaaggagatcgtccgggacctggaccaggacggtgacaagcagctctctgtgcccgagttcatctccctgcccgtgggcaccgtggagaaccagcagggccaggacattgacgacaactgggtgaaagacagaaaaaaggagtttgaggagctcattgactccaaccacgacggcatcgtgaccgccgaggagctggagaacgtgcccacactcccgctgcagccaataggcaccttaaatagccacttcgtgcggctggccgcggagctcggagggggaaaggcgacgctgacctgtgccccgctcgcccgcagagctacatggaccccatgaacgagtacaacgcgctgaacgaggccaagcagatgatcgccgtcgccgacgagaaccagaaccaccacctggagcccgaggaggtgctcaagtacagcgagttcttcacgggcagcaagctggtggactacgcgcgcagcgtgcacgaggagttttgagcgcccggccgcgccccgcgccgccccccacgcaccaccggggcggcctcgcgggtgactccgggctccgtggctgtcccggaccccacctcttccctgccgcccgccaccggccgaccgaccgcggctgccccagttgatgagcggcgtgtcccctctgcagcgcgcaccccggcggggctttggctgtgacgcggtcggggcgcggggctgggctgtggccccgcggcgccgcctcctccctggtccctcgaaatcgtggcatctcacttctgagaacgaaatctcgcttcagtcactctgccgaaggcgctgacggcatcgcggccggaacctctgggcccggcccctcccagggccgccgctccgtgggaaaaaacagctcctccatttccttgaaaactgaacgattattaaaaatagattaaacttcgctggaaatgagtagccaggaagttcaggggagggtgccgggtccttcccgggcctggcgtgtcggagccacccaggtcccgcagctgccgctgagaaaatgcaaatatttgttgtgacaagaatcacatacatttactttaaatatagttgccttttttggtcagcttcaaaaaaaaaaaaaaaaaaaaaaaaaaaaaa

SEQ ID NO: 4329 - DNA, 4346 bp, Homo Sapiens
  NM_016551
gcgggaacgcgcgttgggggtcaggtgccggaagaggaaacctctcgctggggctaggagttcggcggggcgcgcgccggcggctgcggagctggcaggtgcgaagcgtctgcacctggcgggcgatggcgcccgatgcgggcgccccgggatagcgtgggcgaggctgcggggccccggcgcgcacgcccgcacctctccccagccctggcgtgggcccagcccggcccaggcagcaatggggttcctgcagctgctggtcgtagcggtgctggcatccgaacaccgggtggctggtgcagccgaggtcttcgggaattccagcgagggtcttattgaattttctgtggggaaatttagatacttcgagctcaataggccctttccagaggaagctattttgcatgatatttcaagcaatgtgacttttcttattttccaaatacactcacagtatcagaatacaactgtttccttttctccgactctcctttccaattcctcggaaacaggcactgccagtggactggttttcatccttagaccagagcagagtacatgcacttggtacttggggacttcaggcatacagcctgtccagaatatggctatcctactctcctactcagaaagagatcctgtccctggaggctgtaatttggagttcgatttagatattgatcccaacatttacttggagtataatttctttgaaacgactatcaagtttgccccagcaaacctaggctatgcgagaggcgtagatcccccaccatgtgacgctgggacagaccaggactccaggtggaggttgcagtatgatgtctatcagtattttctgcctgagaatgacctcactgaggagatgttgctgaagcatctgcagaggatggtcagtgtgccccaggtgaaggccagtgctctcaaggtggttaccctaacagctaatgataagacaagtgtttccttctcctccctcccgggacaaggtgtcatatacaatgtcattgtttgggacccgtttctaaatacatctgctgcctacattcctgctcacacatacgcttgcagctttgaggcaggagagggtagttgtgcttccctaggaagagtgtcttccaaagtgttcttcactctttttgccctgcttggtttcttcatttgtttctttggacacagattctggaaaacagaattattcttcataggctttatcatcatgggattcttcttttatatactgattacaagactgacacctatcaagtatgatgtgaatctgattctgacagctgtcactggaagcgtcggtggaatgttcttggtagctgtgtggtggcgatttggaatcctctcgatctgcatgctctgtgttggactagtgctggggttcctcatctcgtcagtgactttctttactccactgggaaacctaaagatttttcatgatgatggtgtattctgggtcactttctcttgcatagctatcctcattccagtagttttcatgggctgcctaagaatactgaacatactgacttgtggagtcattggctcctattcggtggttttagccattgacagttactggtccacaagcctttcctacatcactttgaacgtactcaagagagcgctcaacaaggatttccacagagctttcacaaatgtgccttttcaaactaatgacttcattatcctggcagtatggggcatgctggctgtaagtggaattacgttacagattcgaagagagagaggacgaccgttcttccctccccacccatacaagttatggaagcaagagagagagcgccgagtgacaaacattctggaccctagctaccacattcctccattgagagagaggctctatggccgattaacccagattaaagggctcttccagaaggagcagccagctggagagagaacgcctttgcttctgtagatgcccaggggcttggtcagtgtgcctcagctttggagttcatgcctggagtggttcaacagtctctggtgcaagtctaataagagatcaggcatatatatctgttctttgcataatattatggtgcccttattgatatatggtaagggtgtactaggggattaggatgattgtaagagaatgagaaagatgaccaaaaggttggtggtagggaggctttttcttatttccaaatacttgagaaattaccttttggtttacaaatctatgatcaacttattccattaaatagatacattaaaaaaattaaaaactgattcttctgcagagcactggtgtttctttttataaccccttgaaacaagtctctcacctgagcctgtctaaactttcggagggagtttattattgagtctttatctgtgacagtatttggagatttagggatttgatacttaggcctttgaattttagaatacaaaaagagaagcaagccagacatggtggctcacacctgtaatcccaatactgggaagccaaggtgggagtatcgcttgagcccaggagtttgagaccgacatgggcaacatgacaagaccccatctctacaaaaaaattaaaaaattagccaggcatggtggcacatgcctactcccagctcccaaggagactgagatgggaggatccctggagccctgaagattgaggctacagtgagccttgattgtgtcactgcactccagcttgggtgacagagaccctgtctcgagaaattaaaaaaaaaaaaaacttattttcttactaaaagcagtctgattacttagttgcatgcccttcttagtatcatacattatccaaaagttaccctttgtttttttttcagtattttttaaaatttttaagttgtgataaaatacacatgaaatttaccttcttattcatgtttaagtgtacaattcagtaggttccctttgtttttgccttttattgcttaaaatggtaattgaaatagctaaattattatttgaaaataggccaatttatatagataatagaattttataagggtgatttatattccaaataatggcccccttttttttttcaaggccttttcaaatagtgtcaacaggtgatctttaatttaactgcattagatgacatatggattacttttgtttttaggaaataacccccaccttaatctatattgccgaccaggtgcggtggctcaaacctgtaatcccagcattttgggaggtcgaggcgggtggatcacctggggtcaggagttcgagaccagcctggccaacatagtggtctctactatagtatagtagaatatatactactacaccctgtctctactaaaaatacaaaaattagctgggtattgtggcaggtgcctgtaatcccagctactcgggaggctgaggcaggagaatcgcttgaacccaggaggcagaggttgcagtgagccaagatcacgccactgcactccaccctgggcaacagagcgagactccgtctcaaaaaaaaaaaaagtctgtattgccattaataagaaaaccttagaaaaatttgtacttcatagttctttctgctcaattagctgttagcattagtgtaaaatatagtttttaataatttctgtacaaagcctttgtacagaaaggcttcatccttaaagtgatgagaatggagtcaaaaaggattcaggtgtttagaggagctgcttttcattaggaccttggagagtcccctcagttttgacacccttgtttcaccacaagaaagcacccgacaccctgggttgcatacttactactcaggggctttccccccagctttcagagcactgaattattgtgagctggtgactctgcaggcctgagtggtattagggttgtggaatgttgttgcatacacgtttatgagttaaccactatttaaatgatgctgctttttaaagttttttcaaagtacaatagatttttgaagtttcaggtaactggaaaaatatttaacttttgctttaagtgtttggggcaggataaaacaacatagaaaatataaaacaatttttgctttgaaaaatacagtgcaggtgaccatttactgcttattctgtaatccttactgtctataattaacttcagtaacactgaaacttgatgaaaagttttaaaaaattatttactgtagggacaaagttatatggaatgtttgttattttctatactatctgaatgcactgccagtgaagactgtaaagacagaacacactattttggagggaggatactaattgtttaaaatttttcatcatttgtgagtgataaaaagtttgtatagtttttataataaatccctattttgaaaaaaatgctaaaaa

SEQ ID NO: 4330 - DNA, 3602 bp, Homo Sapiens
  NM_016553
agctctttcactacggggcactggtgggctactgcgcaggaacaaccaagcacgaagaatcgtttagaaaaaaaaaaaacacaccctcccctggagtgctcaggcccagctgcacgcgggctgacaaacatcgagtctagaactctcccacccggccccgggcccagtgcgcatgcgcagccgcgcgccttcggcccaccgtactacttctgcgcctgcgcgaccgtgattccccgctcgcgactccccaccccccagggctccctaaagagggccacgagctgcgaaagggcgggaaaggcagttggagaagaggtaagcggttactcactccatggctgcagcaaggagaggcggcggcggcctcggctgaagaaagaaggtgggagcggagagcgcaggcgtgaaacccaccttgtcccatccacatcaggacatcccagctggagttcaaccttcatcccttctgtggcagttaggagactgaatcaaggtccagagaaggtggaggaatcctgatactgagcgaaatcttcccaaggctgcagacaccgacggatttgctttgggagccagagtagctgccgccaccagagtccggagccatgagcgggtttaattttggaggcactggggcccctacaggcgggttcacgtttggcactgcaaagacggcaacaaccacacctgctacagggttttctttctccacctctggcactggagggtttaattttggggctcccttccaaccagccacaagtaccccttccaccggcctgttctcacttgccacccagactccggccacacagacgacaggcttcacttttggaacagcgactcttgcttcggggggaactggattttctttggggatcggtgcttcaaagctcaacttgagcaacacagctgccaccccagccatggcaaaccccagcggctttgggctgggcagcagcaacctcactaatgccatatcgagcaccgtcacctccagccagggcacagcacccaccggctttgtgtttggcccctccaccacctctgtggctccagctaccacatctggaggcttctcattcactggtggaagcacggcccaaccctccggtttcaacattggctcagcagggaattcagcccagcccacggcacctgccacgttgcccttcactccggccacgccagcagccaccacagcaggtgccacacagccagctgctcccacacccacagccaccatcaccagcactgggcccagcctctttgcgtcaatagcaactgctccaacctcatctgccaccactggactctccctctgtacccctgtgaccacagcgggcgcccccactgctgggacacagggcttcagcttaaaggcacctggagcagcttccggcacctccacaacaacatccaccgctgccaccgccaccgccaccaccaccagcagcagcagcaccaccggctttgccttgaatttaaaaccactggcgccagccgggatccccagcaatacagcagctgccgtgaccgctccacctggccctggcgcagctgcaggggcggctgccagctccgccatgacctacgcgcagctggagagcctgatcaacaaatggagcctggagctagaggaccaggagcggcacttcctccagcaggccacccaggtcaacgcctgggaccgcacgctgatcgagaatggagaaaagatcaccagcctgcaccgcgaggtggagaaggtgaagctggaccagaagaggctggaccaggagctcgacttcatcctgtcccagcagaaggagctggaagacctgctgagcccactggaggagttggtcaaggagcagagcgggaccatctacctgcagcacgcggatgaggagcgtgagaaaacctacaagctggctgagaacatcgatgcacagctcaagcgcatggcccaggatctcaaggacatcatcgagcacctgaacacgtccggggcccccgccgacaccagtgacccactgcagcagatctgcaagatcctcaatgcgcacatggactcactgcagtggatcgaccagaactcggccctgctgcagaggaaggtggaggaggtgaccaaggtgtgcgagggccggcgcaaggagcaggagcgcagcttccggatcacctttgactgagcgacagcagccctggggcccgcaggtccctagggagttcatgaggggaatgcgccctgttgtctgtagtttggggttgtggcaagatacttgtttgtttgtttctttctttcacatgactgcccttgacatgatcgctgtgtgctttgcgtttttccatttaggagggtattctgggccttctgcccaggcagcagcctcatgggtgtggcttctgtggctttcatttgagtatctttggccccttttcacctactgcgaccacccacctcatcctggctcagcctggtgatggagaagtgctgatggtcttggtcccagccagggtcgtgggggcagccactctctccaaagcatagtcataggtgtcatgaaaaaataccaaatgtaagagaacctccaagtcagggcgcagtggctcacccctgtaatctcagcactttgggtggccaaggcgggcagatgacttgaggtcaggagttcgagaccagcctggccaacatggtgaaaccccgtctctactaaaaatacaaaaattagtcaggtgtggtggacgcctgtgatctcaatctcagctactcgggaggctgaggcaggagaatcacttgaacccaggaggtgttgcagtgaaccaagatcacaccactgcactccagcctaggcaacagagactctgtctcaaaaaaaaaaaaaaaaaaaaagaaactcccaggagacagcagcctagttttcgagtgtgagcttgtgcttgtgaaagctaaccatgctaaccaccaaggcaaagcagcacagtgtgaatagaacagagcgggatcaagaatttcacagaagacaggtcagctgaggggcctgcacacacagggtgttgaggaaccacagatgggcgccgagaggcctgccttttgcctggcccaggctcacccccaccttgggcctcacctcctccaggaagccttcccagctacccgaagctcaggtggccttcttgcaggtccccgtagcaccctgagcctgtaccttgggtggcacttgttatgctatcctgtgctagccgtttgtgcctcgtctcgctgttagattgtgagttcccatgggcagagacccactgtcgttccccgtgtgtccccagcccggtccctgtcacatttgttaaatgaaagaacaatgaagcccagtgtaacgtcagtccacagaaatagccacagcttccagtggtggccgtagacttggctcggaacttagtggcaccagagtaactctagtcagttacagtaaaatccactgtgtgtggaaggcagaagctagcggttgtatcccaagcatcttttgtatttgtctttatactttgctgaattctctgaaatacctattactgtatgttgcttttctaaataaatgtattgtgaaaccaaaaaaaaaaaaaaaaaa

SEQ ID NO: 4331 - DNA, 3060 bp, Homo Sapiens
  NM_016561
gggagtggccgctctaggcagcggggaggtcgcggggttgaggggggttgtgaaaggagagcggcctctcctctatggtcacggggccggggcacgcttcccccactctgtcttgttacttccggtagcgaagcctctccctcttcctctgctcccgcggggtctgtgctgagaataatggcccggttggcccgggacgagtggaatgattaatgatgttttgcagcagttttctacgtctgaaattttttatgtctctggaacccagaatttgctaagagatggaggaacctcagaaaagctatgtgaacacaatggaccttgagagagatgaacctctcaaaagcaccggccctcagatttctgttagtgaattttcttgccactgctgctacgacatcctggttaaccccaccaccttgaactgtgggcacagcttctgccgtcactgccttgctttatggtgggcatcttcaaagaaaacagaatgtccagaatgcagagaaaaatgggaaggtttccccaaagtcagtattctcctcagggatgccattgaaaagttatttcctgatgccattagactgagatttgaagacattcagcagaataatgacatagtccaaagtcttgcagcctttcagaaatatgggaatgatcagattcctttagctcctaacacaggccgagcgaatcagcagatgggagggggattcttttccggtgtgctcacagctttaactggagtggcagtggtcctgctcgtctatcactggagcagcagggaatctgaacacgacctcctggtccacaaggctgtggccaaatggacggcggaagaagttgtcctctggctggagcagctgggcccttgggcatctctttacagggaaaggtttttatctgaacgagtaaatggaaggttgcttttaactttgacagaggaagaattttccaagacgccctataccatagaaaacagcagccacaggagagccatcctcatggagctagaacgtgtcaaagcattaggcgtgaagcccccccagaatctctgggaatataaggctgtgaacccaggcaggtccctgttcctgctatacgccctcaagagctcccccaggctgagtctgctctacctgtacctgtttgactacaccgacaccttcctacctttcatccacaccatctgccctctgcaagaagacagctctggggaggacatcgtcaccaagcttctggatcttaaggagcctacgtggaagcagtggagagagttcctggtcaaatactccttccttccataccagctgattgctgagtttgcttgggactggttggaggtccattactggacatcacggtttctcatcatcaatgctatgttactctcagttctggaattattctccttttggagaatctggtcgagaagtgaactgaagaccgtgcctcagaggatgtggagccatttctggaaagtatcaacgcaggggctttttgtggccatgttctggcccctcatccctcagtttgtttgcaactgtttgttttactgggccctgtactttaacccaattattaacattgatcttgtggtcaaggaactccggcggctggaaacccaggtgttgtgactggcactgcccaggctgagactcttcaagtcccgctgacgtctgagctttgatgcttaagaggggtgaggcagggagcggacttcctattttctaccctcagtaaaacaaggtgctgctttgtatatcaaaagctccaaccatgtcctctccccctcagcctgtgggtggcacgagcaaggactgacatccgcacagggaggattgtctgtttggctgacacagcagcagcccttcccacccagccaccttcctcacagggactaggaggctcagtccccaacggctggcaagactcagggtcctcagtggacatggtgtgggtgacatcagaagggtgccacatcagtcccctccccaacctcagtgactgacagaggatccggatctcagagcctgagaccaggtttattggggcctggcctgtcctctaagtcaagtttaggaaaacaaggataagattctgtcataggcatagagagttgcacataaaaaataccgaagaaaacccaaaattcaatcaacaattctgtcttattgaagagttgctaggattcagagtaaaactcaaaggattcagtttgagcctagaatgatggttagacttgtagtcactgggcttttgttttgctttatggaaatcattgaaggtctggatccctttctctgaatggagagattgagagggatgtcgggcagttcccattagatttagtggccttcatgttattcagaattgttttggtgatacctcacccctgtaatcccagcactttgggtgggtgaggcaggcggatcacttgaagccaggacttcaagaccagcttggccaacatggtgaaacctcatctctactaaaaatacaaaaattagccaagtgtgatggcacatacctgtaatcccagctacttggaattggaaatcgcctgaacccaggaggcggaggttgcagggagggagactgcaccactgcacttcagcctgggtgacagagggagactctgtcttaaaaaaaaaaaaaaaatcatctgtaaaataaattccgggatagtcgttttgttcaaggaaatgttttgtaaattgagctcacactatataatctttattgtcctatcctgatgtataatacagcaggtataattacaccaagcgctatagttataaatatggcatgaagtgaactatggccttttatttccttccagtgtgaacacagcaggtgtgagatgtcatcttggaagacaggccttgcagaaataggcctacatccaaaatattatcttgtgactccatgaaccattcattaaccctttgtatctttgagtgaaaattttactcaaaagttgcatctggaagttcgaagaaattacttgaaataaaaataaagatttctatatagataaaacctaaaaaaaaaaaaaaaaaa

SEQ ID NO: 4332 - DNA, 4992 bp, Homo Sapiens
  NM_016562
gaagactccagatataggatcactccatgccatcaagaaagttgatgctattgggcccatctcaagctgatcttggcacctctcatgctctgctctcttcaaccagacctctacattccattttggaagaagactaaaaatggtgtttccaatgtggacactgaagagacaaattcttatcctttttaacataatcctaatttccaaactccttggggctagatggtttcctaaaactctgccctgtgatgtcactctggatgttccaaagaaccatgtgatcgtggactgcacagacaagcatttgacagaaattcctggaggtattcccacgaacaccacgaacctcaccctcaccattaaccacataccagacatctccccagcgtcctttcacagactggaccatctggtagagatcgatttcagatgcaactgtgtacctattccactggggtcaaaaaacaacatgtgcatcaagaggctgcagattaaacccagaagctttagtggactcacttatttaaaatccctttacctggatggaaaccagctactagagataccgcagggcctcccgcctagcttacagcttctcagccttgaggccaacaacatcttttccatcagaaaagagaatctaacagaactggccaacatagaaatactctacctgggccaaaactgttattatcgaaatccttgttatgtttcatattcaatagagaaagatgccttcctaaacttgacaaagttaaaagtgctctccctgaaagataacaatgtcacagccgtccctactgttttgccatctactttaacagaactatatctctacaacaacatgattgcaaaaatccaagaagatgattttaataacctcaaccaattacaaattcttgacctaagtggaaattgccctcgttgttataatgccccatttccttgtgcgccgtgtaaaaataattctcccctacagatccctgtaaatgcttttgatgcgctgacagaattaaaagttttacgtctacacagtaactctcttcagcatgtgcccccaagatggtttaagaacatcaacaaactccaggaactggatctgtcccaaaacttcttggccaaagaaattggggatgctaaatttctgcattttctccccagcctcatccaattggatctgtctttcaattttgaacttcaggtctatcgtgcatctatgaatctatcacaagcattttcttcactgaaaagcctgaaaattctgcggatcagaggatatgtctttaaagagttgaaaagctttaacctctcgccattacataatcttcaaaatcttgaagttcttgatcttggcactaactttataaaaattgctaacctcagcatgtttaaacaatttaaaagactgaaagtcatagatctttcagtgaataaaatatcaccttcaggagattcaagtgaagttggcttctgctcaaatgccagaacttctgtagaaagttatgaaccccaggtcctggaacaattacattatttcagatatgataagtatgcaaggagttgcagattcaaaaacaaagaggcttctttcatgtctgttaatgaaagctgctacaagtatgggcagaccttggatctaagtaaaaatagtatattttttgtcaagtcctctgattttcagcatctttctttcctcaaatgcctgaatctgtcaggaaatctcattagccaaactcttaatggcagtgaattccaacctttagcagagctgagatatttggacttctccaacaaccggcttgatttactccattcaacagcatttgaagagcttcacaaactggaagttctggatataagcagtaatagccattattttcaatcagaaggaattactcatatgctaaactttaccaagaacctaaaggttctgcagaaactgatgatgaacgacaatgacatctcttcctccaccagcaggaccatggagagtgagtctcttagaactctggaattcagaggaaatcacttagatgttttatggagagaaggtgataacagatacttacaattattcaagaatctgctaaaattagaggaattagacatctctaaaaattccctaagtttcttgccttctggagtttttgatggtatgcctccaaatctaaagaatctctctttggccaaaaatgggctcaaatctttcagttggaagaaactccagtgtctaaagaacctggaaactttggacctcagccacaaccaactgaccactgtccctgagagattatccaactgttccagaagcctcaagaatctgattcttaagaataatcaaatcaggagtctgacgaagtattttctacaagatgccttccagttgcgatatctggatctcagctcaaataaaatccagatgatccaaaagaccagcttcccagaaaatgtcctcaacaatctgaagatgttgcttttgcatcataatcggtttctgtgcacctgtgatgctgtgtggtttgtctggtgggttaaccatacggaggtgactattccttacctggccacagatgtgacttgtgtggggccaggagcacacaagggccaaagtgtgatctccctggatctgtacacctgtgagttagatctgactaacctgattctgttctcactttccatatctgtatctctctttctcatggtgatgatgacagcaagtcacctctatttctgggatgtgtggtatatttaccatttctgtaaggccaagataaaggggtatcagcgtctaatatcaccagactgttgctatgatgcttttattgtgtatgacactaaagacccagctgtgaccgagtgggttttggctgagctggtggccaaactggaagacccaagagagaaacattttaatttatgtctcgaggaaagggactggttaccagggcagccagttctggaaaacctttcccagagcatacagcttagcaaaaagacagtgtttgtgatgacagacaagtatgcaaagactgaaaattttaagatagcattttacttgtcccatcagaggctcatggatgaaaaagttgatgtgattatcttgatatttcttgagaagccctttcagaagtccaagttcctccagctccggaaaaggctctgtgggagttctgtccttgagtggccaacaaacccgcaagctcacccatacttctggcagtgtctaaagaacgccctggccacagacaatcatgtggcctatagtcaggtgttcaaggaaacggtctagcccttctttgcaaaacacaactgcctagtttaccaaggagaggcctggctgtttaaattgttttcatatatatcacaccaaaagcgtgttttgaaattcttcaagaaatgagattgcccatatttcaggggagccaccaacgtctgtcacaggagttggaaagatggggtttatataatgcatcaagtcttctttcttatctctctgtgtctctatttgcacttgagtctctcacctcagctcctgtaaaagagtggcaagtaaaaaacatggggctctgattctcctgtaattgtgataattaaatatacacacaatcatgacattgagaagaactgcatttctacccttaaaaagtactggtatatacagaaatagggttaaaaaaaactcaagctctctctatatgagaccaaaatgtactagagttagtttagtgaaataaaaaaccagtcagctggccgggcatggtggctcatgcttgtaatcccagcactttgggaggccgaggcaggtggatcacgaggtcaggagtttgagaccagtctggccaacatggtgaaaccccgtctgtactaaaaatacaaaaattagctgggcgtggtggtgggtgcctgtaatcccagctacttgggaggctgaggcaggagaatcgcttgaacccgggaggtggaggtggcagtgagccgagatcacgccactgcaatgcagcccgggcaacagagctagactgtctcaaaagaacaaaaaaaaaaaaacacaaaaaaactcagtcagcttcttaaccaattgcttccgtgtcatccagggccccattctgtgcagattgagtgtgggcaccacacaggtggttgctgcttcagtgcttcctgctctttttccttgggcctgcttctgggttccatagggaaacagtaagaaagaaagacacatccttaccataaatgcatatggtccacctacaaatagaaaaatatttaaatgatctgcctttatacaaagtgatattctctacctttgataatttacctgcttaaatgtttttatctgcactgcaaagtactgtatccaaagtaaaatttcctcatccaatatctttcaaactgttttgttaactaatgccatatatttgtaagtatctgcacacttgatacagcaacgttagatggttttgatggtaaaccctaaaggaggactccaagagtgtgtatttatttatagttttatcagagatgacaattatttgaatgccaattatatggattcctttcattttttgctggaggatgggagaagaaaccaaagtttatagaccttcacattgagaaagcttcagttttgaacttcagctatcagattcaaaaacaacagaaagaaccaagacattcttaagatgcctgtactttcagctgggtataaattcatgagttcaaagattgaaacctgaccaatttgctttatttcatggaagaagtgatctacaaaggtgtttgtgccatttggaaaacagcgtgcatgtgttcaagccttagattggcgatgtcgtattttcctcacgtgtggcaatgccaaaggctttactttacctgtgagtacacactatatgaattatttccaacgtacatttaatcaataagggtcacaaattcccaaatcaatctctggaataaatagagaggtaattaaattgctggagccaacta

SEQ ID NO: 4333 - DNA, 833 bp, Homo Sapiens
  NM_016565
aaaggatgtacagaggatccccaaccgcctgcgaaacccaagccgccgcgtaggagcgtgcgttcgggccctcttctcccacctgttcgactccccatccccaggatgtcaacctcagtccctcaaggccatacctggacccaacgggtgaagaaagacgatgaggaggaggacccgctggaccagctgatctcccgctctggctgtgctgcctcccactttgcagtgcaggagtgcatggcccagcaccaggactggcggcaatgccagccacaggtgcaggcgttcaaggattgcatgagtgaacagcaggcgaggcggcaagaggagctgcagaggaggcaagaacaagccggtgcccaccactgagaccccaaaccacctatccccagtagatggccctgccaagaccagcacccagcaagattatagaggaagaaatcctaaatgctggtgtgggaggtctaaaacatggggagagtttttggatctggagttgagagccatgggtttggacatgactggcacaaacagctgtcatatgttcatggtcagatgtcatacattctcagctgtcttgttccaccagtatttaccaggaaaacaaagaatgtgttaagggatgctcccccaccccacatcttaagtcagtgtgccaagtactgagatgattttagggacattttattttaaattaaatttacaatctaatggtaaattgattacctaattagtgcctttctctttcatcacttgttctggatgtttcaatcagtttagtggaaggaaaaataaatggggaaactttttattcaaaaaaaaaaaaaaaaaaa

SEQ ID NO: 4334 - DNA, 1461 bp, Homo Sapiens
  NM_016567
gcaggcgcagtgtgagcggcaacatggcgtccaggtctaagcggcgtgccgtggaaagtggggttccgcagccgccggatcccccagtccagcgcgacgaggaagaggaaaaagaagtcgaaaatgaggatgaagacgatgatgacagtgacaaggaaaaggatgaagaggacgaggtcattgacgaggaagtgaatattgaatttgaagcttattccctatcagataatgattatgacggaattaagaaattactgcagcagctttttctaaaggctcctgtgaacactgcagaactaacagatctcttaattcaacagaaccatattgggagtgtgattaagcaaacggatgtttcagaagacagcaatgatgatatggatgaagatgaggtttttggtttcataagccttttaaatttaactgaaagaaagggtacccagtgtgttgaacaaattcaagagttggttctacgcttctgtgagaagaactgtgaaaagagcatggttgaacagctggacaagtttttaaatgacaccaccaagcctgtgggccttctcctaagtgaaagattcattaatgtccctccacagatcgctctgcccatgtaccagcagcttcagaaagaactggcgggggcacacagaaccaataagccatgtgggaagtgctacttttaccttctgattagtaagacatttgtggaagcaggaaaaaacaattccaaaaagaaacctagcaacaaaaagaaagctgcgttaatgtttgcaaatgcagaggaagaatttttctatgaggagcagggaaaacctgaggtgcttggaggtccagacacaagaagaggattggaaccagttccgatacagcacaatggtggttcacgggggcaagtgacagccctggtttctctgaaggctggactaattcaatcaagatcaactctaagtgatttccagggaaccttcatgactgttggaattgctctgtcataataagtcagggatatttaggaggctcatagtctcctggagggataaaacatctcggcacctagtaatggtaaattagtcaatatttgttagtttcgtttgagatctcaaatgttaggattttctgaagtctcagtgtctttcagagtttgagataccttgttttcattttttctaatttttaatttaaaagtaataaagaatattttgtaatgattaggatgaaaattttatcgtcaattataagccaaaatttgctaaaattaaagtcagtatacttgaaacaagtttctagtaagttctctggggtaagatactaattactctgataaaggggctatcaaaaaaatccagtaaattgttcataagaagagatcagtttaagagtcaaacaatttgctttgctagtaccttagctaaagaaaaaatactattaaagatgactatcacctttaaaaaaaaaaaaaaaaaa

SEQ ID NO: 4335 - DNA, 1781 bp, Homo Sapiens
  NM_016570
agtcgcttttgttctcgcgatatttccgggtacgcgggagccccggcgacccgggcttctgtgaaacatggcggtaggctgggaccataacacaagcatgactatatgaaggaagaggaaggttttcctgaagatgaggcgactgaatcggaaaaaaactttaagtttggtaaaagagttggatgcctttccgaaggttcctgagagctatgtagagacttcagccagtggaggtacagtttctctaatagcatttacaactatggctttattaaccataatggaattctcagtatatcaagatacatggatgaagtatgaatacgaagtagacaaggatttttctagcaaattaagaattaatatagatattactgttgccatgaagtgtcaatatgttggagcggatgtattggatttagcagaaacaatggttgcatctgcagatggtttagtttatgaaccaacagtatttgatctttcaccacagcagaaagagtggcagaggatgctgcagctgattcagagtaggctacaagaagagcattcacttcaagatgtgatatttaaaagtgcttttaaaagtacatcaacagctcttccaccaagagaagatgattcatcacagtctccaaatgcatgcagaattcatggccatctatatgtcaataaagtagcagggaattttcacataacagtgggcaaggcaattccacatcctcgtggtcatgcacatttggcagcacttgtcaaccatgaatcttacaatttttctcatagaatagatcatttgtcttttggagagcttgttccagcaattattaatcctttagatggaactgaaaaaattgctatagatcacaaccagatgttccaatattttattacagttgtgccaacaaaactacatacatataaaatatcagcagacacccatcagttttctgtgacagaaagggaacgtatcattaaccatgctgcaggcagccatggagtctctgggatatttatgaaatatgatctcagttctcttatggtgacagttactgaggagcacatgccattctggcagttttttgtaagactctgtggtattgttggaggaatcttttcaacaacaggcatgttacatggaattggaaaatttatagttgaaataatttgctgtcgtttcagacttggatcctataaacctgtcaattctgttccttttgaggatggccacacagacaaccacttacctcttttagaaaataatacacattaacacctcccgattgaaggagaaaaactttttgcctgagacataaaacctttttttaataataaaatattgtgcaatatattcaaagaaaagaaaacacaaataagcagaaaacatacttattttaaaaaagaaaaaaaaggataaaaaaacccaaactgaaattctatatacgttgtgtctgttacaaatgtcgtagaagaaatcatgcagctaaacgatgaagaagcccaactggagtgttgctttgaagatgacgccttcttatattttcatagcaaatgggtggtatcaaaatcagacattgcttcttgctgataaaaagcctgaaggaaataagtgaaactacatctatgggaaaaaaaaaaacattgagaagtgcaaatgttcgcatccttttgtttttaaaagatatgatgtcagaataaaatgtggaaaacatacggaaaactagtctagactttaaagaattgtgatcaggtcacattgttaataaaaaaaaaaaacgggctaaaaa

SEQ ID NO: 4336 - DNA, 3532 bp, Homo Sapiens
  NM_016573
cgacgcggaaccgaggcggcggcggcggctgcggcggcaggaaatcggggctcggccccgccggcgcgcgaccccatccccatcccggtccctgcagagcgatccccgggcccagatatggacgcagcagagccgggactccccccaggtcctgagggcaggaagaggtacagtgacatcttccggagcctggacaacctcgaaatctcactggggaacgtgacccttgagatgctggctggagaccctctactctcagaagacccagaacctgacaagacccctacagccactgttaccaacgaagccagctgttggagcggcccctccccagagggtcctgtacccctcacaggggaggaactggacttgcggctcattcggacaaaggggggtgtggacgcagccctggaatatgccaagacctggagccgctatgccaaggaactgcttgcctggactgaaaagagagccagctatgagctggagtttgctaagagcaccatgaagatcgctgaagctggcaaggtgtccattcaacagcagagccacatgcctctgcagtacatctacaccctgtttctggagcacgatctcagcctgggaaccctggccatggagacagtggcccagcagaaaagagactactaccagcccctcgccgccaaacggactgagattgagaagtggcggaaggagttcaaggagcagtggatgaaggagcagaagcggatgaatgaggcggtgcaggcactgcggcgcgcccagctgcagtatgtgcaacgcagcgaggacctgcgggcacgctcccaggggtcccctgaggactcggccccccaggcctcgccgggacctagcaagcagcaggagcggcggcggcgctcgcgagaggaggcccaggccaaggcgcaggaggccgaggcgctgtaccaggcctgtgtccgcgaggccaacgcgcggcagcaggacctggagatcgccaagcagcgaatcgtgtcgcacgtgcgcaagctggtgtttcagggggatgaagtgctgaggcgggtgacgctgagtctcttcgggctgcggggggcgcaggcagagcgtggcccccgcgccttcgccgccctggccgagtgctgtgcgccctttgagccgggccagcgctaccaggagtttgtacgggcgctgcggcccgaggccccgccgcccccgccgcccgccttctccttccaggagttccttccctccttgaacagctcccctctggacatcagaaagaagctctctgggcctcttcctccaaggctggatgagaattcagctgagccaggcccttgggaggatccgggcacaggctggcgctggcaagggactccaggccccactccgggcagcgatgtggacagcgtgggtggcggcagcgagtctcggtccctggactcacccacttccagcccaggcgctggcacgaggcagctggtgaaggcttcgtccacaggcactgagtcctcagatgactttgaggagcgagaccctgacctgggagacgggctggagaatgggctgggcagccccttcgggaagtggacactgtccagcgcggctcagacccaccagctgcggcgactgcggggcccagccaagtgccgcgagtgcgaagccttcatggtcagcgggacggagtgtgaggagtgctttctgacctgccacaagcgctgcctggagactctcctgatcctctgtggacacaggcggctcccagcccggacacccctttttggggttgacttcctgcagctacccagggacttcccggaggaggtaccctttgtggtcacgaagtgcacggctgagatagaacaccgtgccctggatgtgcagggcatttaccgggtcagcgggtcccgggtccgtgtggagcggctgtgccaggctttcgagaatggccgagcgttggtggagctgtcggggaactcgcctcatgacgtctcgagtgtcctcaagcgatttcttcaggagctcaccgagcccgtgatccccttccacctctacgacgccttcatctctctggctaagaccttgcatgcagaccctggggacgaccctgggacccccagccccagccctgaggttatccgctcgctgaagaccctcttggtacagctgcctgactctaactacaacaccctgcggcacctggtggcccatctgttcagggtggctgcacgatttatggaaaacaagatgtctgccaacaacctgggcattgtgtttgggccgacactgctgcggccgccggacggcccgcgggcagccagcgccatccctgtcacctgcctgctggactctgggcatcaggcccagcttgtggagttcctcatcgtgcactacgagcagatctttgggatggatgagctcccccaggccactgagcccccgccccaagactccagcccagcccctgggcccctcacaaccagctcccaaccgccacccccgcaccttgacccagactcccagcccccagtcctagcctcagaccccggcccagacccccagcaccacagtaccctggagcagcatcccacggccacacctaccgagattccaactccacagagtgaccagagagaggacgtggctgaagacaccaaagatgggggaggggaagtgtccagccaaggcccagaggactcactcctggggacacagtctcgtggccacttcagccgccagccagtgaagtatccccggggcggtgtgaggcctgtaacccaccagctgtccagtctggccctggtggcttccaagctgtgcgaggagacccccatcacatcagtgcccagagggagtttgcgggggcgggggcccagccctgcagctgcctcccctgagggcagccccctgcgccgcaccccgctgcccaagcattttgagattacccaggagacagcccggctactctcgaaattggacagcgaggctgtgcccagggccacctgctgcccggacgtccagcctgaggaagccgaggaccatctctgaccaccctggcaccttaaataaggaagaggcccagattgtgaagacggacccatatatccctacctcccaccacctagtggccaaacaccccgccaggagttcaatgctgggagaggtccagagggttcctataaggaaaaactatttaatacatgacctaggggaggcctaaaacccttttggggataatgtcccagagtccccccactagacacaggtcactgccaagcatcagggccactcgggctcagaggtcactcagggtcaatactcagggtcagtgcaggttatgagatccttggggtccaccctagtctctgacacctgggacaggggtgcttttgctactttggttgtggtcactcccccacacctgcctgcctccttcacggactcgaagtgaccttcctggaggaggtgggcagctcagactccacatgctggtggtgcctgaggtctgatggcctctaataaactgtgtcctataaaaaaaaaaaaaaaa

SEQ ID NO: 4337 - DNA, 1283 bp, Homo Sapiens
  NM_016579
gtgcgcgtgcgcagggataagagagcggtctggacagcgcgtggccggcgccgctgtggggacagcatgagcggcggttggatggcgcaggttggagcgtggcgaacaggggctctgggcctggcgctgctgctgctgctcggcctcggactaggcctggaggccgccgcgagcccgctttccaccccgacctctgcccaggccgcaggccccagctcaggctcgtgcccacccaccaagttccagtgccgcaccagtggcttatgcgtgcccctcacctggcgctgcgacagggacttggactgcagcgatggcagcgatgaggaggagtgcaggattgagccatgtacccagaaagggcaatgcccaccgccccctggcctcccctgcccctgcaccggcgtcagtgactgctctgggggaactgacaagaaactgcgcaactgcagccgcctggcctgcctagcaggcgagctccgttgcacgctgagcgatgactgcattccactcacgtggcgctgcgacggccacccagactgtcccgactccagcgacgagctcggctgtggaaccaatgagatcctcccggaaggggatgccacaaccatggggccccctgtgaccctggagagtgtcacctctctcaggaatgccacaaccatggggccccctgtgaccctggagagtgtcccctctgtcgggaatgccacatcctcctctgccggagaccagtctggaagcccaactgcctatggggttattgcagctgctgcggtgctcagtgcaagcctggtcaccgccaccctcctccttttgtcctggctccgagcccaggagcgcctccgcccactggggttactggtggccatgaaggagtccctgctgctgtcagaacagaagacctcgctgccctgaggacaagcacttgccaccaccgtcactcagccctgggcgtagccggacaggaggagagcagtgatgcggatgggtacccgggcacaccagccctcagagacctgagctcttctggccacgtggaacctcgaacccgagctcctgcagaagtggccctggagattgagggtccctggacactccctatggagatccggggagctaggatggggaacctgccacagccagaactgaggggctggccccaggcagctcccagggggtagaacggccctgtgcttaagacactcctgctgccccgtctgagggtggcgattaaagttgcttcacatcctcaaaaaaaaaaaaaaaaaaaaaaaaaaaaaaaa

SEQ ID NO: 4338 - DNA, 1049 bp, Homo Sapiens
  NM_016584
aaaacaacaggaagcagcttacaaactcggtgaacaactgagggaaccaaaccagagacgcgctgaacagagagaatcaggctcaaagcaagtggaagtgggcagagattccaccaggactggtgcaaggcgcagagccagccagatttgagaagaaggcaaaaagatgctggggagcagagctgtaatgctgctgttgctgctgccctggacagctcagggcagagctgtgcctgggggcagcagccctgcctggactcagtgccagcagctttcacagaagctctgcacactggcctggagtgcacatccactagtgggacacatggatctaagagaagagggagatgaagagactacaaatgatgttccccatatccagtgtggagatggctgtgacccccaaggactcagggacaacagtcagttctgcttgcaaaggatccaccagggtctgattttttatgagaagctgctaggatcggatattttcacaggggagccttctctgctccctgatagccctgtgggccagcttcatgcctccctactgggcctcagccaactcctgcagcctgagggtcaccactgggagactcagcagattccaagcctcagtcccagccagccatggcagcgtctccttctccgcttcaaaatccttcgcagcctccaggcctttgtggctgtagccgcccgggtctttgcccatggagcagcaaccctgagtccctaaaggcagcagctcaaggatggcactcagatctccatggcccagcaaggccaagataaatctaccaccccaggcacctgtgagccaacaggttaattagtccattaattttagtgggacctgcatatgttgaaaattaccaatactgactgacatgtgatgctgacctatgataaggttgagtatttattagatgggaagggaaatttggggattatttatcctcctggggacagtttggggaggattatttattgtatttatattgaattatgtacttttttcaataaagtcttatttttgtggctaaaaaaaa

SEQ ID NO: 4339 - DNA, 1661 bp, Homo Sapiens
  NM_016586
tcgccaagcgactaaagctggaagggagggggcggggttgtgagcaaatcttggtggtggtggtggtggggcggcctgagaagatatcatggctgctgccacggagcttaatcgcccgagcagcggtgacaggaacctggagcgaagatgcagacccaacctctcccgagaggtgctctacgaaatctttcgctccctacacaccctggttggacagcttgacctcagagatgatgtggtgaaaattacaatcgattggaacaagctccagagcctctcggcattccagcctgcattgctctttagtgcacttgaacaacacattttatatttacagccttttttagcaaaacttcagtctccgattaaagaggagaatacaactgctgttgaagagataggaagaacagaaatggggaacaaaaatgaagtaaatgacaaattttccattggcgacctacaagaggaagaaaagcacaaagaaagtgatttaagagatgtgaaaaagacacagatccattttgatccagaagtagttcagataaaggctggaaaagcagaaattgacagacgaatatctgcatttattgaaagaaagcaagctgaaatcaatgaaaacaacgtcagggaattttgcaatgttattgattgtaatcaagaaaatagttgtgcaagaactgatgcgatttttaccccttaccccggatttaaaagtcacgtaaaagtttctagagttgtgaatacatacggaccacagactagacctgaaggaattccagggtcaggtcataaacctaacagcatgcttcgagactgtggtaatcaggctgtagaagaacgactacaaaatattgaggcccacttgcggttacagacaggtggtccagtgccaagagacatttatcagagaattaaaaaacttgaggataaaatccttgaattggaaggcatctctcctgaatattttcagtctgtaagcttttctggaaaaagaagaaaagttcaaccacctcaacagaactattcactggctgaacttgatgagaaaattagtgccctcaaacaagccctcctcagaaaatcaagagaagcagaatccatggcaacccaccaccttccatgaaaaactcctctcatccttgtcattttacttttttgtatacatatgtgtaacttacactgttattaattcaacggatatatatttatcaatgtagacttctctgtgaagtcaaggtttattttcacatgagtccagcttgcagcaagtaatcttcaaatattccagtaagttttgaaataatgaatgcattgaaaatagcattgttggaatttattcccttctgttttaaaggaggtattttggaaattgaaaaacttaatttacaagtgctggtacatcttttttcttttgtggaccacaggaaggaagatttattttgatattgatactttaaaaggactttatatttgtaacattgatgttaaccagtttattagtttaaatcagtactttgcatataataagcattcaacaaaaatttattgactgaaatgaattttaaatgcatgtgtatgaacttgtttttcttaatctttaagatgtcagtattcatgtaaataaacaatagatccagctttatcccttaaaaaaaaaaaaa

SEQ ID NO: 4340 - DNA, 1851 bp, Homo Sapiens
  NM_016587
tccccccggcggccccgcgcgcagctcccggctccctcccccttcggatgtggcttgagctgtaggcgcggagggccggagacgctgcagacccgcgacccggagcagctcggaggcggtgaataatagctcttcaagtctgcaataaaaaatggcctccaacaaaactacattgcaaaaaatgggaaaaaaacagaatggaaagagtaaaaaagttgaagaggcagagcctgaagaatttgtcgtggaaaaagtactagatcgacgtgtagtgaatgggaaagtggaatatttcctgaagtggaagggatttacagatgctgacaatacttgggaacctgaagaaaatttagattgtccagaattgattgaagcgtttcttaactctcagaaagctggcaaagaaaaagatggtacaaaaagaaaatctttatctgacagtgaatctgatgacagcaaatcaaagaagaaaagagatgctgctgacaaaccaagaggatttgccagaggtcttgatcctgaaagaataattggtgccacagacagcagtggagaattgatgtttctcatgaaatggaaagattcagatgaggcagacttggtgctggcgaaagaggcaaatatgaagtgtcctcaaattgtaattgctttttatgaagagagactaacttggcattcttgtccagaagatgaagctcaataattgttcacattgttcttttatatatatttatatatatatataaaaattgggtcttagattttgatttactagtgtgacaaaataactacatcctaatgaaaatcaagtttgatatgtttgttttgaaagtagcgttggaagagttgttgggggttttttgcatccatagcactggttactttgaacaaataaataaaagctttctgtagttgcttcctttatcagaaaagaacatttgataccatggtatatcatttcctcttcattaaagaacagcttttctaaatgttgggggaaatgtccatagtcattactcagtcaaaacttgtgttctcatgagcctaaggaccattctagatttattacgtgttttttgtgtgtgtgtgtgtgtgtgtgtgtgtgtgtatccataaaatgcatatgtaaatttttttttgtttttaagcattcacccaaacaaaaaaatcacaggtaaacccatgtttctgagatgccattattccaagcaaaataagagataatcccttcaagttaaattgaaaattttcctgaaaccatacatttcaagtgaaataagtaattctagataggacaatttaaattggataattttaaagtgtctataattgcagtggtttatttgcaaaattcctaaaaggaaaaattttatcactgccatcacagcaggtttcctcatccagatgaggaaactagacaaatgctagtgtgttttaactagctaaacaaaactaagttaaatgaacatttaaaagtttccctagcgggccattccttagcaaaatgttggaatccctgttgctacattgactaaaaggtcatgatgaatggaatatgtaagacttggctcatagaaacctaatcagatggttagaggtgttggcagtttaggacctgctgtcataaatgtgtgaacaaccttttgtaacctaacctattgacctgcatgttttttctttaccccaattcattacatggaggctcaatcttgagtttgctttactggttcagcaaaagccaggaagaacaactttgtagtaatcaaaatgttatccaactgtatattgtttactttattgtaaatactggtgaacagtggttaataaatagttttatattcctttatgcaa

SEQ ID NO: 4341 - DNA, 12714 bp, Homo Sapiens
  NM_016598
gcgtcatcaacctgcgcggcggccgctcctgcagccgcggccgccgccactgccgggagagctcgatgggcttctcctgcgcgccgcccggtgtctggccgagtccagagagccgcggcgcctcgttccgaggagccatcgccgaagcccgaggccgggtcccgggttggggactgcaggggaaggcagcggcggcggcggcgggagccccaccggggtctgggactggggaactgcctccggcttcacgatgccagtatggacagaatagcttatgatgcttatccccacccaccacttccgaaacattgagcggaaaccagaatacctccagccagagaagtgtgtcccacccccctaccctggtcctgtgggaaccatgtggtttatccgtgacggctgtggcatcgcctgtgccatcgttacctggtttctggtcctctatgcggagttcgtggtcctctttgtcatgctgattccatctcgagactacgtgtatagcatcatcaacggaattgtgttcaacctgctggccttcttggccctggcctcccactgccgggccatgctgacggaccccggggcagtgcccaaaggaaatgccactaaagaattcatcgagagtttacagttgaagcctgggcaggtggtgtacaagtgccccaaatgctgcagcatcaagcccgaccgagcccaccactgcagtgtttgtaagcggtgcattcggaagatggaccaccactgtccctgggtcaacaactgtgtaggcgagaacaaccagaagtacttcgtcctgtttacaatgtacatagctctcatttccttgcacgccctcatcatggtgggattccacttcctgcattgctttgaagaagattggacaacctatggactgaacagggaagaaatggcagagactggaatctctcttcatgaaaaaatgcagccccttaacttcagttcgacagagtgcagctccttctctccacccaccacagtgattctccttatcctgctgtgctttgagggcctgctcttcctcattttcacatcagtgatgtttgggacccaggtgcactccatctgcacagatgagacgggaatagaacaattgaaaaaggaagagagaagatgggctaaaaaaacaaaatggatgaacatgaaagccgtttttggccaccccttctctctaggctgggccagcccctttgccacgccagaccaagggaaggcagacccgtaccagtatgtggtctgaaggaccccgaccggcatggccactcagacacaagtccacaccacagcactaccgtcccatccgttctcatgaatgtttaaatcgaaaaagcaaaacaactactcttaaaactttttttatgtctcaagtaaaatggctgagcattgcagagaaaaaaaaaagtccccacattttattttttaaaaaccatcctttcgatttcttttggtgaccgaagctgctctcttttccttttaaaatcacttctctggcctctggtttctctctgctgtctgtctggcatgactaatgtagagggcgctgtctcgcgctgtgcccattctactaactgagtgagacatgacgctgtgcgtggatggaatagtctggacacctggtgggggatgcatgggaaagccaggagggccctgacctcccactgcccaggaggcagtggcgggctccccgatgggacataaaacctcaccgaagatggatgcttaccccttgaggcctgagaagggcaggatcagaagggaccttggcacagcgacctcatcccccaagtggacacggtttgcctgctaactcgcaaagcaattgcctgccttgtactttatgggcttggggtgtgtagaatgattttgcgggggagtggggagaaagatgaaagaggtcttatttgtattctgaatcagcaattatattccctgtgattatttggaagagtgtgtaggaaagacgtttttccagttcaaaatgccttatacaatcaagaggaaaaaaaattacacaatttcaggcaagctacgttttcctttgtttcatctgcttcctctctcaccaccccatctccctctcttccccagcaagatgtcaattaagcagtgtgaattctgactgcaataggcaccagtgcccaacacatacagccccaccatcatccccttctcattttataaacctcaaagtggattcactttctgatagttaacccccataaatgtgcacgtacctgtgtcttatctatattttaacctgggagactgttgtcctggcatggagatgaccatgatgctggggttacctcacagtccccaccctttcaaagttgacatatggccatcccattggccagaatccacagacacacctaagcctgtggcactgggacagaatagattttccatttgagaggcacttcctgtgtcagtcttgtttgaaggaggtggtgatggtggatagaggtgaaggaggtagggagtgccctccaagtgcaaaaataacaaatatgattattgaccatcggggaattctcacacattgatttgttttttaagcaattgccagaaacccccttttttagcttttgcttggggtgggggtaggagttaaggtttattcaatcctgtcctgggtagggcgaaagttaatctagccatgtgatttttcagaaaagtaagtggaacatgctgccacttttcaattctgtcagtgcttccacatggaaacaaaatgcaataaaatttttccaaaacctgttctgatttagctctctcttgaggtgttacccttagtgggaggccgactatccacaatctacttgagttttctctggttgggtgtttgtttcattgctctgtctcttgaatgaggatactttattttttttgttttaaaatgcatttatggtccctctcttgaaccagcttgccccaccaggcctctttcctttgctttctgcagcctgaatcaattcctttgtgctgatgggctctcctaagagctttcctgagtcagttaactttacctcgtgtctacggtgctattcatgcgatacgggcgaggctgagatgctaagattaaaaagaaaagaatgctgttttagatcaagttgatagcatttgttttccatatgcttttttaaaattttttcataacatacagctcagttaggtgtatgaaagaagtgttattgtattaaataactagagcagggctacagctctggccctcccctagggggaagagattggtaatactccatcttccagggcattttttaaagtgagccaggttagctcttttcccctggcatttctcaggaatgcagtagatagtgctgaagatgcactgacttttttttagtcctaaaaatagaaactcctcctttaaagctgtgcatactatgcttatctttccaatagagtggggttccttcagatatcctataggattctgcctctggttttgtataggccttggctagaaagagtcaatgtttctgagctctcaaaccagttgctctcagaagataggaataccccaaggttcctggcatttttcctatttcatttttgttcagactgatattttgccaagagcacaatgactgaggaatgtagccatcatttgcagggtagtgattggttcccagcctggcttccacacaggacaggaagggaaagcatccctgagctctcctcagtatttccggatgtaatgaaagaggacatctttctacacaaagtcagccccaacttttggcttggtcacaggagttctgatagtactgtttggtgcactcatgggaaattgaaccagtcgtagccacagtctttcagagcctgggctctggggagtggaagtgaaaaataaagatgtggcttgttggattgtgatccccagcttgctttccttctgtcaactctgtcaggtttgtgttcatagcaactagactgaatatgcaaaaggcttagatccaagcaaatctataatctatgcatatttgcatgggcttggtaatatcatgtacacaaaacacatttgggtagaagtgcatgtgctaaatctccttttagtcccaccattttgtcttcttcatactgtacttcctcttttttgtttgagacaaggtcttgctctgtcacccaggctggaatgcagtggcacaattagagctcactgcagccttgaactcctgggctcaagtgattcttgtgccttggcctcctgaatatccagggctacaggcacgtactaccatgcctggctaatttttttgttttttaatagagtcagggtctcactgtgttgccctagctagtctcaaatgcccggcctccagcaattttcctgccttagcctcccaaagtcctgggattacaggcgtgagccactgggcccagccctgtacttcttgaaaaagccccaagtattagcttttgctcatctggctaggccacttaaatagttagaatccaccgtcccctaatgcagaaaccgtttaggtgaggtaaattaacaaacattttaagccgggcgcggacacttctcactgtggacatccctcacgcctgtaatcccagcactttgggaggccgaggcgggcagatcacgaggtcaagagatcgagatcatcctggctaacacggtgaaaccctgtctctactaaaaatataaaaaaattagctgggcgtggtggcaggcgtctgtagtcccagctacttgggaggctgaggcaggagaatggcgtgaacccgggaagtggagcttgcagtgagccaagatcgcaccactgcactccagcctgggcgacagagtgagactccgtctcaaaaaaaaaaaacaaacattttaaacatgtatgtgaggttggcattacacagaaactcctctccgggtgggctgggatgggctttctcagccaggctaatgggttttaaatttctctcttttcaagacttgcagtgcatcagcttaaagggtgagccagccagtagaggggaaggcgccccacctagaaggtgcccttagatatcaaagaaatgtgaaaagagaaagattttgctagaatcctcctcaaaggtgttcttgaggttgccagaccagcaacgtcaacatcagcatcacctgagaacttgttagaaatgcacattctcggtccccaccccaggctaccgaaccagaaaccgagcggggcccagcagcccgtgtcttaacagccctccaggtgattctgactatcaagtttgagaatccagttggggctagcaggagtcccccctcaggtggtccctgatgcctgctggtgatatgggtcttgtgtgctgctgggctcagcatagtgcagttggggtgtgctgattgtgagacaggcacgtgttccctccgcggagaagccactgagactgccttccctcataagctgcggcctccccaacaaacaactgccaagacatcaaagaaagtctgtatgaagcagatccaaattattagcctgcccaccactccttgtgcatctcatcagtggaacccatctctagaccaagggccctttgggtgaagaagcagcccggaagggaaagagaaaagagtagaaccaagggacctccagatgggagcggcggccggtgagtagtctagagccaggggcattgtagcagcctggatacatgacctgaacacgtcttgacctttgctttctacgtgtgggtttcaacacccatgtggctttttcttgtattctttaaatatgtatctggcttaggatcacctcatagaagagaaagaattcacagtgaagcagaaacaagccactgaccagcgtactcccaacctgaaccttctttttctcaccctctccctcaagtaaacatcttgctgacttgagcagtgtgattgccgtagcaaagcagagtggcccccagggatcccgctctgttgggcccacaggaggagccgatgaagctgatccaaggagtgaggacaagcgctgcagagggacgttcgctaaaagccttctaggggccgcacatgctctaacacggacataaggatgccctgaatttctgcagctgaggccatatagtctggtgaccaagtatttgggtcctggcttcagtctttggttgaaatgtctgcttggctacttattaccgcacctactaccaaaatatgaccttgagcagtaacttctttaagcctcagttttttcatctgaaaacgggaatgataatctaaatcacaaagttaatggaaggattaaatgagggtgatgaataggaatgtatagcgtctggccctggtatggctttataaatgttagctgtgttggagctgtgcttttcaaaccattggtcacagccattcatggtttgcaaccagcatgtttttcaagaaaaatgtttaatgcattacatattgcaggataagtattgttttatgaagcttagggagttgtgtgtatatgtgttctggaatgcaacagaaaaatgtttcctcttgtgggttacaatatagaggtatgaaatctctgatgaggagagacagtgttatctggcccgctatgaagagacacatttgcataggctgctccctgaggctctggctttctacatctgatgatacagggagcagggaacagcctgttctcgttctgtggggctcagctgagtctgttctgcacagactcttccttcctcgggagccttagtcctaatacattcattttggagtgttggtgagtttgttcacagatcacagctcatgtgtcacccagactgacctgggccaaaaggcccatcacacaccctgcaagagcttctggtgtcgactatgacccccttaccaggcatcaaccatttttgttcgttctcttgagcctgaagctactattactgctcctctgcaaacctcaagcttaagaactttgcctgcaggatccctttaaatccacacaaaactcaaaattgagtcctaccaggaaaaagcagccctcagcccatttttatacatcggatttgtttgcaatattttctttctagactcaaaagtcaacactccctgaaagtttgtcgactttactgctgaagacctctggtagacaggccaggctctgtctggaatactttatgaggttggtgaggaggttgagtataatccaagagtgcctatctgggagcatgccacatgaatggcaaataatcatcctgtgggctcttggcttcattccccttctctctgactgagctcagcctgggcacagtggtgatttgcagtagaactggaaacctgttgggcagaaaaaaagacactagttctggttccagttctgatacataacaagctagatgagccttggccaccgtcatggcctcttggaacttctgtttcttccccatctgccaatcatcaatactcatacccacctcctcacaaggaggccataaaaacctatggtcatggctttgagtccaagtcagtgtggatgcagccagtctgtcatttttgggtgtttcctctgtagccgggtctgccatatggtgatgtcccagctctcgtgctatgaagttaaagcctctttctcaacaggctgcagatgatcacccaggaagagaatgcagaatgcccaaagcaaaccatctcagctggtcactgcttctgtgccaagaagggaggcctggcgaggggccagtcaggaagcagcatggcatcacatgctcatgacccacatgaaggtccctttagacttgtgtcaacaagatccattttctgaaacaactatttttgttctgattataaaagtaacattggctcattggtaaaacttggattgtgtgagaagtctacagaaataaatacaaatcctctagaattccatccccaaaagtaaccactcagacaaatgttctaatgtcatgtaaaaccatattaaaccatcttttctagctgcatagtgttatagaatcatttgcttaaccatcattattgggcatttctcatttccagctttgcattattataattcagtgttcaagtttgtattgcataaatctttgtctcagattattgattatttttaaactttttgtgaaatcagacttacaaaaatgtgacaaaaacagtacaaagagttcccatgtacctttcagtcagtctcaccaaaggtaaacattttatacaaccataatacaaatataaaaccctggacattggcaacaccatacccttaactaatgtatgtaccttattcacatttctccagttgtcccattaacacccttttctgttccaggatcccacactgcatcatttgcgatgtctccttagtctcctccagtttgtgacagttcctcagtcttcctttgtctttcatgaccttgaccctttttaaaaatcgaggtgaaattcctgtaacacaaaattagccattttaaagtgtacatttaatgcattcacaatgttttgtaaccaccaggtctgtctggttccaaaatcttttcatcaatctttgacccttttgaagattgtagggcaggtattctgtaggctgtccttcagattgtgtttttgatgtttttctcatgattagattgaggttaggcatttggggcaggagcactgctgaagcaatgtgtcctcgttgcaccgtatcaggaggcatatggtgttgatacgtttcattattgtgatgttaactttgatcattgggtgaaggtggtacgtgcaatgtttcttccctgctattaaggtactgtttttccctttgtaattgataagtatcttatgaggatatacttttgagatccaatttttttaacttagaatttattcaaaagtcaagaatcttaaatctctgaaatggcgtgggaagaaaaagtgctagatacacagagatctttcttgagtcatgtgaaggagcagtgcccaagcccagcaaacccacagcaaattcccttggcttccagaagagatggagaaagcagtgcccccagtggagggtcaaaggcctctgtgcagggtgttgtgggcctggagagctggcctggccatgtctttacctcctctgggcatctccccaccccaacaccctttctgtggcctggtggctgagttgcagccgacacccagaggcaggtgagttgacagcttggaagaggctgcagggtggatctgctgcatgagcaggcctgagcccagccttacctccccacagtggtcctgtgtgccctccggctgcctaatgcatgttggcacttgctgtacgagcacccgcttcttcacctcgcatgctgtttgtgtcctgcactccttccttaaccccatcgtccttctgctgtgtttgcagcccctatctaccctggtgggagtggccaaaaatatttaggaggggatcaccagtttgtagtggcctcagaggatgtgtggtcccccttatgcctcagccactcatcagcctagcccctgcccatcatctggcattgcacttgtggaaggaaagaaggggagggctgggtggtgggtggagaacacgtcagtccaccaggcgggccctgcttgctgtgttcctccacgctgctgtccacccacaccccagcagtcctctgagggacctcccgggggtgacctgggccacaacagactgcccactcagaccccatcttacccatgccgtggacaccccgcccccccccccgccactgctatgctatagctgggggtgtctatgtgagctgtacagcccagcaccacgctgacgatgttcttcatccccttctccctgcagggcatcgagcgcctcaaacgaaagaaccagcccagggagcacatggggagctggcagtcagtaaaggagacctttggtggggacttctccctgaactggttcaaccccttctccagaccgtgtcagccagagatccccagtgacaaagacatggtgcggcaggtgacatcgctgtcagacaccgaaacaatggaggatccatcagaggagacaaaggacgaggactctgtggaggtgacagatgaatagatgctgctgtggggagagaagcaaacactaaaaagtgctgtcaaccttcatcctggggttttggctaaaggggcttatgggcatggtgcgctcccagcacccccagtgcttcccttagccactcgcttggccttgccatttcccctccttcttctctccatgttgggccaggtctgggggtcgggagtaggctggggacatcagaggaggatgggggctttctcagagttcatctaagaagagtctgcactgagacggctcatcaagaaccgttctccaagactgggtggctttcacattctccgcccagcaaagggagcttttgaacagggcatcccaggggcagaaaagagcttgcctttggctttccccaggatttctgtcttctcttgggaaggctgggcccctggctcctggctttgagaagtaaggttgtgacagaaggaccgggcagggcttgccttggggacctgggttgggacactgacatcaggggagactagcctggaaagactgcagagctgccagctactccctggaaagggcttccccatgctgcctgccgaaattaggaggtagaggtggctgccacatctacctgcaagggccaggcatggttcaaagaggaccctgcattaagctctacacacacatgtgcaggacatgtccagcatggacagagccagagttaagacagtagcaccgaaaatgagcccccattccacagacactggagtcttcactgagcgagacagctgggagctgtcctgcctgtggctacatatctagccattcacagatgtggatatgggaaggacctctttggagctactggggactccctaaccactcgcatgagaacttaattgaatgttacctcttggagggagtctaataacacatgtaggtagaactgaccataaaccctgcctgtgtgtttgaaaaggccagttctcccaaattggtgcccatcttgtctctgaaaagatgggtgatggccagggtctgctgattgatgaatcagatgaatcaggaagatagacaaacacacacacacacacacacaccccaccaggatgagtctgccctctattcaccccatttgaagcctgtggtgtctgtgaccactgctgaaggtctgagcagcgttctggtgctcctaaaccccattccagtggttgctgaagcagcatcttctgcacaaagcccaacagaagggttcttatccccgtttggtataagaagtggattcaccacccactccctccacgtgcctttgttcctctctttggcccatttccccagcgtctactggcgtcaggattggcaggagcacaggcactcagcagagcatgcccctgcaagacctcagtgttagggccccccttccagctccaggcaaaagggcatgagtcctggccccaaggggcctgtggctgcagttcagaggagaagaaggtcagtgtttggaggtgcagcctcaggatgctgagaaaggaaactggcgaccgtgagaaagaaaagagccaagcagcatcctggttcttggacagcatctttggacactctgtgaagggcaacgatcctgccagagaccgtctctctacaactgatgacccactagggcctggggttaattgctcaaagggcccagtgttcacaaagccacctctgccctaacccttgccagagctctccaactatgacccacgagaggggtgatggtgggattctaacatcaacagagcaaccagaaagacattgggcctcccacactcaggctgcaggcccactttcttggtccttatcagctttaatatttattaatgacgacataggagcccgagtcagctgtaaaggccattaacttgcaatctggacaggaagttgacgctcaccactttgggtaagagctgctctgactgtagggccccctatttgttgtcctaacccagaagcagctctgggctgccaggatggtggatggaataccagagagttcacactagggaggaagcaatgcctgccccctggagtctcctagggggcagcagttagaataagggaagaggatttgctggtcactgtttgctgacatgggtttccatggtgagttcaggcctgaggacagcagtgtctgcaaaaccacatggcccttgagaaatgtccttgcacattgggcttcaaactcctcttctagggaatccatcttggcctgaaagcagaggtacaacaccagccccaaaggcaattctgttttcagattggttgctctggaaaggaaggctggggtgagggggcattttacttgcacagaggctgaccctgcctcccctcttcactgaccccatctccaaggtagacctcagccatgtcagtccctgttctgggaggtgctgggctgggccacagccagggttatgtaggtaattaacctgtccaaccctgagcctcgcctccccacaccagcaacacagtggtctctctgtggtgaccattcacagcataacattctgcttagcctcagactgaaagcattgcaactgatgtcaaaaccagatgagatcttacagggagagagattgggtgcaatttgcctctttctttgaataaaaagctctttgctcaccctcaaaaaaaaaaaaaaaaaaaaaaaaaaaaa

SEQ ID NO: 4342 - DNA, 6830 bp, Homo Sapiens
  NM_016604
gcggggcccaggctgcggctccgctcccggccacggggggcgctgcgctgcgccggtggttggtggtggctgttggggggggtgggggggaacggcggccgcgggtggtgcggagggaggccttgcgggcggatcgggcgcttggcggcggaggtggtgggaggcggcgggcgggagcgcgggtcaggccggccccggcgatggcggacgcggcggcctccccggtgggcaagcggctgctgctgctgttcgcggacactgcggcctcagcctcggcctcggctcccgcggcggcagcggcgagcggagatccggggcctgcgctgcgcactcgagcctggcgggccggcacggtgcgggccatgagcggggcggtgccccaggacctagcgatctttgtagaatttgatggctgtaactggaagcaacactcctgggtaaaagttcatgctgaggaagttatcgtgcttctgctggaagggtctcttgtatgggcgccccgtgaggacccagtccttctccagggcattcgagtctccattgcacaatggccagccctgacttttactccccttgtagataaactgggtttgggttctgtggttccagtggaatatcttctggatcgagagcttcggttcctgtcagatgccaatgggttgcatctgtttcagatgggaacagatagccaaaaccagattcttttggaacatgctgcactgagagaaacagttaatgctttgatcagtgaccaaaagctacaagagatattcagccgaggtccctacagtgttcaaggtcacagggtcaaaatatatcagccagagggggaagaagggtggctctatggtgttgtgagccatcaggactccatcactcgtcttatggaggtgtctgtaactgagagtggtgagatcaagtcggtagatcccagactaatccatgtgatgctgatggataattcaacgcctcaaagcgaggggggtacgttaaaagcagtaaaatcttccaaaggaaagaagaagagagaaagcatagaggggaaagatggccggaggaggaaaagtgcttcggactctgggtgtgaccctgcatcaaagaaattaaaaggagacaggggtgaagtagacagtaatgggagcgatggaggtgaggcaagccgagggccctggaaaggagggaatgccagtggagagccagggctggatcagagagccaagcagccaccgtctacatttgtcccccagataaaccgcaacattcgctttgccacttacaccaaagaaaacggcaggactctggtggtgcaggatgagcctgtaggtggggacacacctgcatctttcactccatattctacagccacaggtcagacacctttggccccagaggtgggtggagccgaaaacaaagaggcaggaaaaacactggaacaagttggccagggcatagtggcttccgcagctgtggtcactaccgccagctccaccccaaacacagtgaggatctcagacactggccttgcagcagggactgtgccagaaaaacagaaaggcagccggtcgcaggcctcgggagagaattcaagaaattctattctggcctcttctggatttggagcacctctccctagttcatcgcaacctttgacttttggaagtggaaggagccagtccaatggtgttctagccacagagaacaaacctttgggcttctcttttggctgtagctctgcacaagaggcacagaaagacactgatctctccaaaaacttgttttttcaatgcatgtcccaaactttacctaccagtaactacttcactactgtttcagagagtttggctgatgattcttctagtcgggactcattcaaacaaagccttgagagcctgagctcaggcctgtgtaaaggcagatccgttcttggaacagacactaagccaggctctaaggctggcagctctgtggaccggaaagtgcctgcagagtccatgcccaccctcactccagccttcccacggagcctcctaaatgcccgtaccccagagaatcatgaaaatctatttttacagccccccaaattgtcccgagaagagccttctaatcctttcctggcatttgtggagaaagttgaacacagccctttcagtagttttgcatctcaggcatcaggtagctcctcttctgctaccactgtcacctccaaggtggcacccagctggcccgagtctcactcctctgcagattcggcatctttagcaaagaagaaacccctcttcattacaactgactcctccaagctagtatctggtgttctgggctcagctcttaccagtgggggcccaagcctctctgccatggggaatggccgctccagctcgcccaccagcagcctcactcagcccattgagatgccaactctctcctctagccccacagaggagaggccaactgtggggcctgggcagcaggacaatcccctcctcaaaacctttagtaacgtctttggcaggcactcaggcggctttctgtcctccccggcagatttttcacaggagaacaaagctccttttgaagctgtgaaaaggttctcactggatgaacgaagcttggcttgcagacaagactcggactccagcaccaacagtgacctgtcagatttgagtgactctgaggagcagctgcaggctaagacaggcctgaagggaattccagagcacctgatggggaagctgggccccaatggggagcgcagtgctgagctgttgctgggcaaaagcaaagggaagcaggcccccaagggccggcctcggactgcccccctgaaagttggccagtcagtgctgaaagatgtaagcaaagtgaagaagctgaagcaatctggagagcccttcctgcaggatgggtcatgcatcaatgtggcacctcatctgcacaagtgtcgtgaatgccgcctggagcggtaccggaagtttaaggaacaggagcaagatgattctactgtagcctgccgtttctttcacttccggaggttgatcttcactcgaaaaggggtactccgtgtggaggggtttttaagcccccagcaaagtgaccctgatgccatgaacctgtggattccctcttcctccctagcagaagggatagatctagagacctcaaaatacatcctggccaatgttggggaccagttctgccagctcgtaatgtctgagaaggaggccatgatgatggtggagccacaccagaaagtggcatggaagcgagctgtgcgtggtgtacgggagatgtgtgatgtgtgtgaaacaactctcttcaacatccactgggtttgtcgcaaatgtggatttggggtctgccttgactgttaccggctcaggaaaagccggccacgcagtgagacagaagagatgggtgatgaagaagttttctcctggttgaagtgtgcaaagggacagtcccacgaaccagagaatctcatgcccacacaaattattcctggcacagctctttacaatattggagacatggtacatgctgcccggggcaagtggggaattaaagcaaactgcccttgtatcagtcgacagaacaaatctgtattgagacctgccgtcaccaatgggatgtcacagcttcctagcataaaccctagtgcctcttctggaaacgaaactaccttctctggtggaggaggaccggcaccagtaacaactccagagccggaccatgttcccaaagccgacagcactgacatcagatctgaagagcctctgaaaacagacagttcggcatcaaatagcaatagtgaactgaaagccatcaggcctccttgccctgacacggccccaccctcctccgccctgcactggttggcagatttagcaactcagaaggctaaagaagaaacaaaagaagcagggtccctgaggtcggtgctcaataaagagtctcattcaccctttgggctggactcgttcaactccactgcaaaggtctctccgctgactccaaagctttttaacagtctgttgctgggtcccactgcctccaacaacaaaaccgaagggtctagccttcgagacctccttcactccgggccgggaaaacttcctcaaacccccttggacacaggcataccctttcccccggtcttctctacatcctcagcaggagtgaagagcaaggccagcctacccaactttcttgaccacatcattgcctcagtggtagaaaataagaaaacctcagatgcttcaaagcgggcctgcaacttgactgatacccagaaggaagtgaaggagatggtgatggggttaaatgtgctagatccccatacttctcactcctggctttgtgatgggaggcttctgtgtctccatgaccccagcaacaaaaacaattggaagatcttccgggagtgttggaagcaaggtcagccagtgctggtttcgggggtacataaaaagctcaagtctgagctctggaagccagaagcctttagccaggaatttggagaccaggatgtagacttggtgaactgcaggaactgtgctataatttccgatgtgaaagttcgggatttctgggatggtttcgagatcatatgcaaacgactacggtcagaagatgggcagccaatggtgctcaaactcaaggactggcctcctggggaagattttcgagacatgatgccaaccaggtttgaagatctgatggagaaccttcctctgccagaatataccaaacgagatggcaggctcaatctggcctctaggctacctagctactttgtaaggcctgatctgggccccaagatgtacaacgcctatgggttgataacagcagaagatagaagagttggtacaacaaatcttcacttagatgtgtctgatgctgttaatgtgatggtgtatgttgggattcccatcggggagggtgctcatgatgaagaggtactcaagacaattgacgagggagatgccgatgaggtgacgaagcagaggattcatgatggaaaagagaagccaggtgctttatggcacatctatgcagccaaggatgcagagaagatccgggagctgctccgaaaggttggagaagaacaaggccaagagaacccccctgatcatgacccaattcatgaccaaagttggtacctggaccagaccctccgtaagcgactctatgaggagtatggcgtgcaaggctgggctattgtgcagttcctaggtgatgctgttttcatacctgctggagccccacaccaggttcacaatctatacagttgcataaaagtagcagaagactttgtatctccagaacatgtaaagcactgtttccgcctgactcaggaattcaggcatctctctaacactcatacaaatcatgaggataaactgcaggtgaagaacatcatttaccatgcagtgaaagatgcggttggcaccctcaaggctcatgaatccaaactggcaaggtcctaggcatggagaaactccaagctcctctgtgaagcaggtctttcactcacaacacttaacagggaacggcagggctctttgctggagcagaggcccttcacccagagccagtgtggtcagtattccaaactctccagccactctcttctacgctgcctcaacactgaaggttgacacaggaaagtcgtactgttcacacacacagtttgagactccaagccaagagtgccacatccctatcctgtggccttttggaaatccaaattgcctgaacatggcggggctttcctgcacattctcctgatttgagattcacgggcacacctttcttttcttttcctcttgtgcctagttaagtggaaatgtgtttggagataggggaaatcacataactggtacaagtatggggtaattgcttaaacatgcctggtggaagtctgatagcgtctctgcacgtgacctctgacaaagcccatcccaggagacggggtgaagctattccccacactctcctgtgaacactggagtcttgcaagacccagggagaacccactgcttttcccaggaggctccaggattaggaaatgtgtgtatttagtgaaaaataggtttgtagtgaaatagttactatttcatgaaagtagatatttttagaatttttgaaataccacagttgttttcctggattataaggaaaggcacattacatttagtcttcctttcgatataaaactctttgaagaaatatgatttttagaaatcagctacccattatagcacaaaatcagccaaagcagaatttttaaaaattggcttttttaggattctttttctccccctcccatcttagtcttaccttgagggaacagtcatatgagaaggaactttgtcacatctaagctgtggtgtgttccccatgtgtgtgtacaacactggtgactccaggaaccattttcacctattaccagtgttccctggggactcctcttaatgtttccaaatgggaaggacagttgatttccaacatgaggttttttgttttttatccagaaatattttcagcaaaactttccaactgagtggagtctgattaaggatttatttgaaaatggtgggattcattggcccataggtacattggaaaatgtatatctctccagctgtactgtagtgccctgcaggctgtttatatgttcacagttacttttttttttttttttaaataaaagtcatttaatgtagaatacttttaatttcactttctgtattttaattttgttgaagggctgattgggatttccatgttcttattaaaaatctaacaaatctgaaaaaaaaaaaaaaaaa

SEQ ID NO: 4343 - DNA, 4394 bp, Homo Sapiens
  NM_016605
actttctgcgatattttggagggggtgactcgttagtgaggaaaccacccccatccctaaatcaaagcgccaggctcgttcccaacagcgctgtccgagagacactttgagagagacacgacacggagctgcgccctccatgggtggcttggggggattctgcgagccggagctgtccccctactctcctcagggactcgttggttcgcgccagcgccttttaagggcaccgtggggcgaaccgagcgctcagagctgctccggccgcggccctgggagctggaggaaccgcgactcagcaggcatgactggagagggaagtcccaatggtgctagaatggtgctgcagtggcagaagacggctcacaagtgaggtctggaagaacaacagggaagacatccatcatttgctccaaagtgtgcaagtcaaatcctggggagaatcatgataaccctgatcactgagcagctacagaagcagactctggatgagctgaaatgcacacgcttcagcatcagtctgcctttgcctgatcatgcagacatctccaactgtgggaactctttccagcttgtgtctgaaggtgcttcctggaggggcctgccccactgttcctgtgctgagttccaggacagcctcaacttcagctaccatccctcaggcctgagcctgcacctcagaccacccagtcggggaaactcccccaaggagcagcccttctcccaagtcctaagacctgagcccccagatccagagaagcttcctgtgccccctgcccctccatccaagaggcactgccgctcactctcagtgcccgtggacctgtctcgctggcagccggtgtggcggcccgccccctccaagctgtggactcccataaagcaccggggcagtggtggagggggtgggccgcaggtgcctcaccagagccccccaaagcgggtctccagcctcaggttcctccaagctcccagtgcctcttctcaatgtgccccagctcacagaccctacagccctcctttcttcagcctggccctggcccaagattcctctcgaccctgcgccgcctcccctcaaagtggctcctgggagagtgatgctgagtccttgtcaccttgcccacctcagcgccgcttctccctgtcacccagtctgggcccgcaggcaagccgcttcttgccctctgcccggagctctcccgcatcctccccagagctgccctggcgacctcgaggtctccgcaaccttccccgaagccgctcacagccttgtgatctggatgcccgcaaaactggggtcaagcggcgccacgaggaagacccccggcgtctgcggccttcgttggactttgacaagatgaatcagaaaccatactcaggaggtctttgtctccaagaaacagcccgggaaggcagcagcatctctccaccatggttcatggcctgtagccccccacccctctctgcttcctgcagccccactgggggttcctcccaggtgctgagtgaaagcgaagaggaggaggagggggctgtgcggtggggtcggcaggcgctgagcaagcggacactgtgccagcgggactttggggacctggacttgaatttgattgaggaaaactaaaactgagaggctacttcctggggccacacagactgactctctcatggctactaacaagtgtcgagtccccaaggctgggggccgagcctgggaatgggggtgagtggagggctccgactcagggcagctggaaatcttctcgctccagcaagctcgaccatgccaagagactggccgggacaagataaacggagctggtggcgggagggacagccccagagcagacccttcctatggcggccctgagtgtgagtatccctgccaccaagagagcaatgggcagggaaggaaggggtctgccgaccccagctcggggaatttcactagcccctttgcttcaaagggcacttgtgtcttagaatttggccagggtggggggttgagtcagcctcctcagagaaactgcgtgagagtgtgtgcgtgcatgggagtgtacttgtggaaaggtgtgtttgcgtagccttagggaaggaaggcaattgctccttaacagcagagtatcatgatacccccaggatcttgagttttttacaggatgttgggtttgctcaaggagtcaagaggagggcaccaagttttccttttttctaaatagctctggaaccaggcttgtaatccatagcatcaccgactctgcaaaggatttcattttggggtacagcagggtgttttaagtgctgtgacttcagctaatgatcttttcttcagccccaccccctccccactagctcgatctagtatattggggaatgcaggtggggggtgtcaccatattttttctgagctggcctttttttctcatcagattgtccaggctatattccacctgcctcttttgccctcttgagtagagttgcacacagcacatgggcaactgaagcagggttgaggggctctctctctctctcctctgctgatgggacccttttcccctcaccctctgcccttctaagtcatagactaggtaggaaggccctatattggtccccagcatctactgaggcagacctgcaacagaagtggcattcagtccccagcagacatgggtgagctcaccccagcactgctgttgggaaggtgactgcaggaaaccaattcttacaagatccaggcccagcctttttgacctgcttgagagggaagaaggggtgtttagcatttaatagtttgcttgtcttccactcctgccaggaagtgtttatttgcctctaattgggcctgagagaccatagggaggttggggctcactgagggattggctgaggatgtataaagcaaaggctgtgagaagcagttgggagtttggttgtcattggattgaatttacttttttgtttctcacccgcaacttgagccaggacagctggtccaagtggccacagtgatgggtttaagtaccttggtagggctggcaccagtggaaacacatactgaagctgccaccacaatagcttgtgaggttttatccagctgtggttagaccctgcatgaccaaatttgacctgcccttgtttatggcaagaagggcatttttctcttcaatttccagggtttcctaggacccagttcctcatgtaagggaggaagaccaaggtctttgtgttttcttcctcatggaattgaacctgacattttctggatctcctgcatgtcaggagcatcagtgaggcttcagcctcctcgtctccactccagagaggaggtggctatgtcttcttaagcctctggccctcagaggctcctccctatctcctggctagttaccactaggctaccaggtctctaggggcctgagagaggccctctagagaatccagggaaactgtgagcccaggagttgcccatctatggtttcattcctcccctggctcttctccctcttcaggccataatttccctggtgccaatttcttttcctcctggggcatcctcatcccagggctctctgctgtagattggctgtgccagcttccaacaggttactggcaatgccagtgagtttctgtaggccctaagctgaagaagtgaggcagtgattctgcctccatcctggtttccccaaagccccagggcaccatccttaggggagaaggtctacagttatcattattttaattccattactttcagtctggaaaactaagctagtcagaactgtcatcttgcttcccaatctaagaacctgtggccctggaacacttttcaagaattggttcattttgctttacacagtagatctgttccaacagttctgtgtaaaccaaatgctatttttcaatgcatttggactgctgaccatttaaaagcagcctatgattgcttctttttgtaaagcaagcaacctccctccactttagctgttttgactatttgaattttcacatattgggcttacccagagtggagcacacctccagggcatgtggctgacactgggtcaatgtctgcatctgtgctgtgtgtgtagtgtggttggccagtaggtgagtatccctgtgtgtgtgagtgaagccactccccaggctggtgctctcctcctgtgcccagtgactgcccagtggcagctcagctgcccttcactcccacctgctgccaaagtccctgtgctaatgggattacaaatacaaaaagtggaaaaaaattttcgtaaactttgttttatattaaaagaaaaatccataagtctgtgtgtgttaaacatgaggttctgcctctgtggctgtgtttgaaaaaataaagttttattagaataatccattttcccaagcaa

SEQ ID NO: 4344 - DNA, 3468 bp, Homo Sapiens
  NM_016610
ctcctgcatagagggtaccattctgcgctgctgcaagttacggaatgaaaaattagaacaacagaaacatggttctcttgacacttcagtgttagggaacatcagcaagacccatcccaggagaccttgaaggaagcctttgaaagggagaatgaaggagtcatctttgcaaaatagctcctgcagcctgggaaaggagactaaaaaggaaaacatgttccttcagtcgtcaatgctgacctgcattttcctgctaatatctggttcctgtgagttatgcgccgaagaaaatttttctagaagctatccttgtgatgagaaaaagcaaaatgactcagttattgcagagtgcagcaatcgtcgactacaggaagttccccaaacggtgggcaaatatgtgacagaactagacctgtctgataatttcatcacacacataacgaatgaatcatttcaagggctgcaaaatctcactaaaataaatctaaaccacaaccccaatgtacagcaccagaacggaaatcccggtatacaatcaaatggcttgaatatcacagacggggcattcctcaacctaaaaaacctaagggagttactgcttgaagacaaccagttaccccaaataccctctggtttgccagagtctttgacagaacttagtctaattcaaaacaatatatacaacataactaaagagggcatttcaagacttataaacttgaaaaatctctatttggcctggaactgctattttaacaaagtttgcgagaaaactaacatagaagatggagtatttgaaacgctgacaaatttggagttgctatcactatctttcaattctctttcacacgtgccacccaaactgccaagctccctacgcaaactttttctgagcaacacccagatcaaatacattagtgaagaagatttcaagggattgataaatttaacattactagatttaagcgggaactgtccgaggtgcttcaatgccccatttccatgcgtgccttgtgatggtggtgcttcaattaatatagatcgttttgcttttcaaaacttgacccaacttcgatacctaaacctctctagcacttccctcaggaagattaatgctgcctggtttaaaaatatgcctcatctgaaggtgctggatcttgaattcaactatttagtgggagaaatagcctctggggcatttttaacgatgctgccccgcttagaaatacttgacttgtcttttaactatataaaggggagttatccacagcatattaatatttccagaaacttctctaaacttttgtctctacgggcattgcatttaagaggttatgtgttccaggaactcagagaagatgatttccagcccctgatgcagcttccaaacttatcgactatcaacttgggtattaattttattaagcaaatcgatttcaaacttttccaaaatttctccaatctggaaattatttacttgtcagaaaacagaatatcaccgttggtaaaagatacccggcagagttatgcaaatagttcctcttttcaacgtcatatccggaaacgacgctcaacagattttgagtttgacccacattcgaacttttatcatttcacccgtcctttaataaagccacaatgtgctgcttatggaaaagccttagatttaagcctcaacagtattttcttcattgggccaaaccaatttgaaaatcttcctgacattgcctgtttaaatctgtctgcaaatagcaatgctcaagtgttaagtggaactgaattttcagccattcctcatgtcaaatatttggatttgacaaacaatagactagactttgataatgctagtgctcttactgaattgtccgacttggaagttctagatctcagctataattcacactatttcagaatagcaggcgtaacacatcatctagaatttattcaaaatttcacaaatctaaaagttttaaacttgagccacaacaacatttatactttaacagataagtataacctggaaagcaagtccctggtagaattagttttcagtggcaatcgccttgacattttgtggaatgatgatgacaacaggtatatctccattttcaaaggtctcaagaatctgacacgtctggatttatcccttaataggctgaagcacatcccaaatgaagcattccttaatttgccagcgagtctcactgaactacatataaatgataatatgttaaagttttttaactggacattactccagcagtttcctcgtctcgagttgcttgacttacgtggaaacaaactactctttttaactgatagcctatctgactttacatcttcccttcggacactgctgctgagtcataacaggatttcccacctaccctctggctttctttctgaagtcagtagtctgaagcacctcgatttaagttccaatctgctaaaaacaatcaacaaatccgcacttgaaactaagaccaccaccaaattatctatgttggaactacacggaaacccctttgaatgcacctgtgacattggagatttccgaagatggatggatgaacatctgaatgtcaaaattcccagactggtagatgtcatttgtgccagtcctggggatcaaagagggaagagtattgtgagtctggagctaacaacttgtgtttcagatgtcactgcagtgatattatttttcttcacgttctttatcaccaccatggttatgttggctgccctggctcaccatttgttttactgggatgtttggtttatatataatgtgtgtttagctaaggtaaaaggctacaggtctctttccacatcccaaactttctatgatgcttacatttcttatgacaccaaagatgcctctgttactgactgggtgataaatgagctgcgctaccaccttgaagagagccgagacaaaaacgttctcctttgtctagaggagagggattgggatccgggattggccatcatcgacaacctcatgcagagcatcaaccaaagcaagaaaacagtatttgttttaaccaaaaaatatgcaaaaagctggaactttaaaacagctttttacttggctttgcagaggctaatggatgagaacatggatgtgattatatttatcctgctggagccagtgttacagcattctcagtatttgaggctacggcagcggatctgtaagagctccatcctccagtggcctgacaacccgaaggcagaaggcttgttttggcaaactctgagaaatgtggtcttgactgaaaatgattcacggtataacaatatgtatgtcgattccattaagcaatactaactgacgttaagtcatgatttcgcgccataataaagatgcaaaggaatgacatttctgtattagttatctattgctatgtaacaaattatcccaaaacttagtggtttaaaacaacacatttgctggcccacagtttt

SEQ ID NO: 4345 - DNA, 1865 bp, Homo Sapiens
  NM_016612
ggtgtctctggccgctgcgctccaccccagcccgccatggcgtcaggcgccgcggccccggggaggtggctcccactttaagaagtgaagttttgcgcccctccccctccctgcccacctcctgcagcctcctgcgccccgccgagctggcggatggagctgcgcagcgggagcgtgggcagccaggcggtggcgcggaggatggatggggacagccgagatggcggcggcggcaaggacgccaccgggtcggaggactacgagaacctgccgactagcgcctccgtgtccacccacatgacagcaggagcgatggccgggatcctggagcactcggtcatgtacccggtggactcggtgaagacacgaatgcagagtttgagtccagatcccaaagcccagtacacaagtatctacggagccctcaagaaaatcatgcggaccgaaggcttctggaggcccttgcgaggcgtcaacgtcatgatcatgggtgcagggccggcccatgccatgtattttgcctgctatgaaaacatgaaaaggactttaaatgacgttttccaccaccaaggaaacagccacctagccaacgggatagctgggagtatggccaccctgctccacgatgcggtaatgaatccagcagaagtggtgaagcagcgcttgcagatgtacaactcgcagcaccggtcagcaatcagctgcatccggacggtgtggaggaccgaggggttgggggccttctaccggagctacaccacgcagctgaccatgaacatccccttccagtccatccacttcatcacctatgagttcctgcaggagcaggtcaacccccaccggacctacaacccgcagtcccacatcatctcaggcgggctggccggggccctcgccgcggccgccacgacccccctggacgtctgtaagacccttctgaacactcaggagaacgtggccctctcgctggccaacatcagcggccggctgtcgggtatggccaatgccttccggacggtgtaccagctcaacggcctggccggctacttcaaaggcatccaggcgcgtgtcatctaccagatgccctccaccgccatttcttggtctgtctatgagttcttcaagtactttctcaccaagcgccagctggaaaatcgagctccatactaaaggaagggatcatagaatcttttcttaaagtcattctctgcctgcatccagccccttgccctctcctcacacgtagatcattttttttttgcagggtgctgcctatgggccctctgctccccaatgccttagagagaggaggggacggcacggccgctcaccggaaggctgtgtgcggggacatccgaggtggtggtggacaggaaggacttgggaaggggagcgagaaattgctttttctcttcctccctgggcagaatgtagcttttctgcttcactgtggcagcctcctccctggatccttagatcccagaggagggaagaaaatttgcagtgactgaaaacagtaaaaaaaaaaaaaaaaaaaaaaaaaaaaaaaaaaaaaaaaaaaaatttatgtatataaaagttgcattacacagtacaaaatagatggataatgtttatcctttatttttctatgtagaagtttttgaatttgtgtgtgtgcttgtgcgtgtctacacctagtattacggctgggactctccagctgtttttgttgttgttatgtttttaagagggttgaattcttccatcaggtgaacgaaaaaggcaacaaagtaataaatcagtgaatgtggccggcagctgtgtttagcccctccagatggaagtttcacttgaatgtaaaataataaagtttatattttgaa

SEQ ID NO: 4346 - DNA, 2327 bp, Homo Sapiens
  NM_016616
ggagtttggggatgaggcagctgaagaacagagtcttgtgatggtggaaccaggacttcgttgttccttcattgtgtgggcagaagaggtggaggattttaggcgccacctggtcttgtccccactgcccagacaggcagggaatccctcttcttccttttgctgaatcagctggagaagaaagcccagcaggaggcctgctagcctcagcctcgggccctaccagggtcctaggtactggaatggaacttcgccgaggtcaccgctcaaacggccacaacgagggagccgatttagatcctctgggcctgttccttccttttctttaaacgtcccagtctagcttagaggaggacctgttttgttagataaatggcaagcaaaaaacgagaagtccagttacagacagtcatcaataatcaaagcctgtgggatgagatgttgcagaacaaaggcttaacagtgattgatgtttaccaagcctggtgtggaccttgcagagcaatgcaacctttattcagaaaattgaaaaatgaactgaacgaagacgaaattctgcattttgctgtcgcagaagctgacaacattgtgactttgcagccatttagagataaatgtgaacctgtttttctctttagtgttaatggcaaaattatcgaaaagattcagggtgcaaatgcaccgcttgttaataaaaaagttattaatttgatcgatgaggagagaaaaattgcagcaggtgaaatggctcgacctcagtatcctgaaattccattagtagactcagattcagaagttagtgaagaatcaccatgtgaaagtgttcaggaattatacagtattgctattatcaaaccggatgctgtgattagtaaaaaagttctagaaattaaaagaaaaattaccaaagctggatttattatagaagcagagcataagacagtgctcactgaagaacaagttgtcaacttctatagtcgaatagcagaccagtgtgacttcgaagagtttgtctcttttatgacaagtggcttaagctatattctagttgtatctcaaggaagtaaacacaatcctccctctgaagaaaccgaaccacagactgacaccgaacctaacgaacgatctgaggatcaacctgaggtcgaagcccaggttacacctggaatgatgaagaacaaacaagacagtttacaagaatatctggaaagacaacatttagctcagctctgtgacattgaagaggatgcagctaatgttgctaagttcatggatgctttcttccccgattttaaaaaaatgaaaagcatgaaattagaaaagacattggcattacttcgaccaaatctctttcatgaaaggaaagatgatgttttgcgtattattaaagatgaagacttcaaaatactggagcaaagacaagtagtattatcggaaaaagaagcacaagcactgtgcaaggaatatgaaaatgaagactattttaataaacttatagaaaacatgaccagtggtccatctctagcccttgttttattgagagacaatggcttgcaatactggaaacaattactgggaccaagaactgttgaagaagccattgaatattttccagagagtttatgtgcacagtttgcgatggacagtttgccggtcaaccagttgtatggcagcgattcattagaaaccgctgaaagggaaatacagcatttctttcctcttcaaagcactttaggcttgattaaacctcatgcaacaagtgaacaaagagagcagatcctgaagatagttaaggaggctggatttgatctgacacaggtgaagaaaatgttcctaactcctgagcaaatagagaaaatttatccaaaagtaacaggaaaagacttttataaagatttattggaaatgttatctgtgggtccatctatggtcatgattctgaccaagtggaatgctgttgcagaatggagacgattgatgggcccaacagacccagaagaagcaaaattactttcccctgactccatccgagcccagtttggaataagtaaattgaaaaacattgtccatggagcatctaacgcctatgaagcaaaagaggttgttaatagactctttgaggatcctgaggaaaactaaagtatatactgtgaaaactttgagaagataatacatatgttcacgtcaatatacaaccatttggcacagcttcctgggaggaataataagaaaaacatgctttggaggaaaactcaagatacaaaaatgaatggctatgcataataacaataaaaatgtattccccaaacaaaaaaaaaaaaaaaaaa

SEQ ID NO: 4347 - DNA, 2618 bp, Homo Sapiens
  NM_016617
agattgcagagggagacgtggacgtgagtggagcggggcggtccccagcacactagaggaagtcgtgctacccccgcggagttgtcgtgtgttctggattcattccggcaccaccatgtcgaaggtttcctttaagatcacgctgacgtcggacccacggctgccgtacaaagtactcagtgttcctgaaagtacacctttcacagcagtcttaaagtttgcagcagaagaatttaaagttcctgctgcaacaagtgcaattattaccaatgatggaataggaataaatcctgcacagactgctggaaatgtttttctaaaacatggttcagaactgcggattattcctagagatcgtgttggaagttgttaatatctgctacttggaacatacgattgcctttcagaataaatattggtattttttgttgttgtaaaattgaaatcaggcatttaacatactatgaaaacaccaggagtcaatgattaatgaaaggtgactcatctgtccctttttgttgtccatactcttcctatgaagagggaatgcgtatgaattaaggctactactgtcacagaagatcatagtctttgatgctacctcacaacacaaacaggtagttcgttgggggcaaatgaattagccaactgttaactggaagcttttgataatttttttttttagaacaatttggaacattaaaatttactgaatcgtatatattcatctgagataaaaatataaaaagaattatggaccctggatggcaatttgcttgatagcatctgatttgcagactcataatttgatttttaattaaatatataggttatgatgaagtgaatagacatatcagtgaacagttaactatattaaatttttatcatttactttttttaagattcagacctcagttatataaatttcagtttaatatcaaccaaaaaattaaaattttaatctaacccttatgtgtataaattggtgtcccataccagcttttaatggtggacctatagaatccagtacttttaatggtgggaatttacagtagaagcatcctttgctgagttatacattcctttatcaatctcttttgatacaacatttaaaacaagtagcttcaagaaaccactggtgttttgaggatagtatttctaaatagcattcaggaacagagtattattgcacagatctgaagatcaaaaaaaagctcaaggaaatacagatcggaagtgctgatgagttatatttattgaaaacccaacttttaaggaagtgctaagatcagtcacccatgtgaataagaagccaggaaaggaaagatggggaagcccagatcaccaggcttctattaaggaggaaagcaacagaggaaacagtgaaggggaacagaagggggtagcaaagtgttacagaaaagcggactggatagacaaaactgcagaaggtgtatgttggggagaactgaaagggaaaacaaaatacttgacatagtcttaagtagaagaaggcagttagagaaaacaaagtatctactggccttgtcaacatacagacttcaaaataccccttatgagaatccaaagaatgatgtgtgtaagggaagattttatttgcccttccggaagaaatcagtatctatgcaaatcttgaaagacgaaatcaaagcccattaatgattcagaatcagtgcttgacctcctgtattctgaatggtgaactctggaagcagggattgtgtctggctctttttagagctggaaatgtagtggctttcattaaatacttgctgtaaagtctttctaagaccaattattatcttagcatgtttcagtatcttctctatcataggccctaagttcattgggggaaaaaaaataagaagattcaacagaatcagcatttgaagtgtaccattggtagttgtttatgaaattaccagatattcataaatgtgacaaatgaacagcaggattatgaattatcaaaggaaaaagtatttgctgaggtgaaaaaatctgatgtttgaggaagtttttatttttatttatttgttttgtttttttttttttgaggcagactctctgtcgccaggcttctcctgcctcagcctcacgagtagctgggactacaggcatgcaccaccacgcccagctaatttttgtatttttagcagagacagggaggaagtttttatttttataaacaaaatctgatgttcagaggccccgtttcttacaataaatgttgagtcttagttaagcaggaatttatgaacacccatttcctgactttttgctttaatttagatttttctccatcctgtttctagcacaaaaatttgcctgctgtgttacaaaaataaatttatgttgtcctgtgccataaagtgatatatttaatatttttattctttggttttgaacattgtaagttcctaaaaacattttattaaacaagtagacattttgttattaaaaaaatgtgatctgtaatttctttgtgcagaatgatttgaagtattgtattcagtttacatgcgttattggtttataattaatatctaatgaaaatacatgttgttatattgtaaaccaaaaaaaaaaaaaaaaaa

SEQ ID NO: 4348 - DNA, 1774 bp, Homo Sapiens
  NM_016618
tgttcctgcctctccgccacctccaccgcggcttatcccctggctggcggcgttggcggggcgggggacagtagttgtagacgcccgcccctgcctcagagaagataccacattgaatgaacaaagactgaactttgtttacagataccttttataaaagatgtctgtggagtagtgttacagttcaaataacaaaggattttgcattatgagatgagtgagagtggagaattggacaaaaattgatttttgatctctgaattgtggtttttagctcaccagttattgtgtagtctcactatttgaaaattcatgctgaaaaactgagtgaatatgatcagatttctccaccaaattctcagcctgataaggaaaatcccgttttgtcaacctaatgaagcattcaaagaagacatatgactcttttcaagatgaacttgaagattatattaaagtacagaaagccagaggcttagagccaaagacttgtttcagaaagatgaaaggggactatttggaaacctgtgggtacaaaggagaggttaattccagacccacgtatagaatgtttgaccagagactcccatctgaaaccatccagacctacccaagatcatgcaatattccacaaacagtggaaaatcggttgcctcagtggttaccagcccatgacagcagattgagactagactctctgagctactgtcagttcacgagggactgtttctcagaaaaaccagtacccctgaactttaatcaacaagaatatatttgtggctcacatggtgtagaacatagagtttacaagcacttctcctcagataacagtaccagtactcatcaagccagtcacaaacagatacatcagaagaggaaaaggcacccagaggaaggcagagaaaaatcagaggaggagcggtctaagcataagagaaaaaaaagctgcgaggaaattgacttagacaaacacaagagcatccaaagaaagaaaacagaggtggaaatagaaaccgtacatgtcagtacagaaaagcttaagaatcgaaaggagaaaaaaagccgagatgtagtctctaagaaagaggaacgtaagcgtacaaaaaagaaaaaggaacaaggccaagaaaggacagaggaggaaatgctttgggaccagtctattcttggattttgaagctttcaaagttggttctcccaaagttaaattgaaaaaataggtgagagcttggttttatgatatccgtgttcataccacttttcttatgtgaataggttctttaacttctaacaaaggcctagtaaacaaagtgtttagcatgcttgctctccaacacagaaattgcttttcctcattttctaaaagcattattacattttttgaacatatagtgtaatttcctttaatgaaagtgactctgcttttattcatcaaattgctttgatggtggaaatattttctgttgggaggttatttattttaaattggaggattaatgacctttgcacaatctgtttcttgattgggtttgttatagttttgagttgggtattttatgttcattggtttttctctgtgaagcaatttttttctcctttattagatctaacttgcagtgtattttctaggctggaaagtggaaaatgaaatatattatgatcttaggttacataaagtttctaaagtttcaaagagtcttgatacaaaatcagtttatattctgaaaatatttataataaagtattctaatttctaaaaaaaaaaaaaaaaaaaaaa

SEQ ID NO: 4349 - DNA, 1403 bp, Homo Sapiens
  NM_016619
agttacctctcccctttcacgtagttttcatttgtggtgagattctctcccaggccacaagacatttcctgctcggaaccttgtttactaatttccactgcttttaaggccctgcactgaaaatgcaagctcaggcgccggtggtcgttgtgacccaacctggagtcggtcccggtccggccccccagaactccaactggcagacaggcatgtgtgactgtttcagcgactgcggagtctgtctctgtggcacattttgtttcccgtgccttgggtgtcaagttgcagctgatatgaatgaatgctgtctgtgtggaacaagcgtcgcaatgaggactctctacaggacccgatatggcatccctggatctatttgtgatgactatatggcaactctttgctgtcctcattgtactctttgccaaatcaagagagatatcaacagaaggagagccatgcgtactttctaaaaactgatggtgaaaagctcttaccgaagcaacaaaattcagcagacacctcttcagcttgagttcttcaccatcttttgcaactgaaatatgatggatatgcttaagtacaactgatggcatgaaaaaaatcaaatttttgatttattataaatgaatgttgtccctgaacttagctaaatggtgcaacttagtttctccttgctttcatattatcgaattcgaatttcctggcttataaactttttaaattacatttgaaatataaaccaaatgaaatattttactgataagattcttcatgcttctttgctctccttaaaatgtctttttcactagttagttccaagggtcagtctcataattttgttcttatactttgatttcctttttctttttttttttttttaatagagttgggggatctttctttctttttttttttttttttttgagatagagtctcgctctgttgcccaggctggagtgcagtggcgtgatctcagctcactgcaacctccacctcctggatacaagcgattctgctgcctcagtctcccgagtagctgggattacaggttcccgccaccatgcccagctaatttttgtatttttagtagagacggggtttcaccatcttggtcaggctggtctcgaactcctgacctcgtgatccacctgcctcggcatcacaaaatgctgggattacaggcatgagccaccgcgtccagcctagagttgggggtctttctatgttgcccaggctggtcttgaactccgggcctctagcaagcctctcatctcagcctcccaaggtgctggaattacaggtgtgagccactgcaccatactttggtttcttagcaggagattttggttcacagtaacccagctctctttcatctaagaactttagatgagaaaaaaaaaaaa

SEQ ID NO: 4350 - DNA, 7194 bp, Homo Sapiens
  NM_016621
ggtgaatgggctggtggtgctcgctgctgctgctgagaggaggaggaggatgaagagttgggcttgtttgtctcctacagtttctctcctgctgctctgattcccccctcccgattccggcccggggcctgtgtgtgtccctcctggaggaggaggaggatccagttcctccccccaaccccctcctccccacccccccttgcctggggaagaggaggaaagaaacagcccagagagagagagagagagagagtgagtgagagagagaggagaggagaggaggaggaggaggagggagaagggaacaacctaccatcttaacacactaatatctaaaaagtgcgagaggcccagagcagcagcagaagcagcagcagcagctccagcttcttccctccctccccatgaagaagagttccctcctcctcctcctcctgcttctcctgctcagagttcctgcctccagctgccaggggggacagccagccagcagcaggaggggggctagagagctgaaggagagccagtttccccaaaattgctgcagtgagaagaggagtttgttactttaaacagaggctgaagaaactatagaattagcagagaaagtggagaaggtagaggatggagttgcagactctacaggaggctcttaaagtggaaattcaggttcaccagaaactggttgctcaaatgaagcaggatccacagaatgctgacttaaagaaacagcttcatgaactccaagccaaaatcacagctttgagtgagaaacagaaaagagtagttgaacagctacggaagaacctgatagtaaagcaagaacaaccggacaagttccaaatacagccattgccacaatctgaaaacaaactacaaacagcacagcagcaaccactacagcaactacaacaacagcagcagtaccaccaccaccacgcccagcagtcagctgcagcctctcccaacctgactgcttcacagaagactgtaactacagcttctatgattaccacaaagacactacctctcgtcttgaaagcagcaactgcgaccatgcctgcctctgtggtgggccagagacctaccattgctatggtgaccgccatcaacagtcagaaggctgtgctcagcactgatgtgcagaacacaccagtcaacctccagacgtctagtaaggtcactgggcctggggcagaggctgtccaaattgtggcaaaaaacacagtcactctgcaggttcaggcaacacctcctcagcccatcaaagtaccacagtttatcccccctcctagactcactccacgtccaaactttcttccacaggttcgacccaagcctgtggcccagaataacattcctattgccccagcaccacctcccatgctcgcagctcctcagcttatccagaggcccgtcatgctgaccaagttcacccccacaacccttcccacatcccagaattccatccaccccgtccgtgtcgtcaatgggcagactgcaaccatagccaaaacgttccccatggcccagctcaccagcattgtgatagctactccagggaccagactcgctggacctcaaactgtacagcttagcaagccaagtcttgaaaaacagacagttaaatctcacacagaaacagatgagaaacaaacagagagccgcaccatcaccccacctgctgcacccaaaccaaaacgggaggagaaccctcagaaacttgccttcatggtgtctctagggttggtaacacatgaccatctagaagaaatccaaagcaagaggcaagagcgaaaaagaagaacaacagcaaatccggtctacagtggagcagtctttgagccagagcgtaagaagagtgcagtgacatacctaaacagcacaatgcaccctgggacccggaagagagccaatgaggaacactggccaaagggtgatattcatgaggatttttgcagcgtttgcagaaaaagtggccagttactgatgtgcgacacatgttcccgtgtatatcatttggactgcttagacccccctctgaaaacaattcccaagggcatgtggatctgtcccagatgtcaggaccagatgctgaagaaggaagaagcaattccatggcctggaactttagcaattgttcattcctatattgcctacaaagcagcaaaagaagaagagaaacagaagttacttaaatggagttcagatttaaaacaagaacgagaacaactagagcaaaaggtgaaacagctcagcaattccataagtaaatgcatggaaatgaagaacaccatcctggcccggcagaaggagatgcacagctccctggagaaggtaaaacagctgattcgcctcatccacggcatcgacctctccaaacctgtagactctgaggccactgtgggggccatctccaatggcccggactgcaccccccctgccaatgccgccacctccacgccggccccttccccctcctcccagagctgcacagcgaactgtaaccagggggaagagactaaataacagagcccctctaggagaagccacgggatcccggcggcaaggagaacagaacactgaagactctagaaaagcaaagccggatttctggaaagtgcagaattcttttggttctttggttccagagagagagaagatgcttgtgccaggtggcaccagagtttgccaattgatccttcttattctgtgtgtacatgcaaagattggaccatgttacatgaaatagtgccagctggaggttctttgccagcaccatgccaagtgaaataatatatttactctctctattatacaccagtgtgtgcctgcagcagcctccacagccacgatgggtttgtttctgttttcttgggtggggagcagggacgggcggagggaggagagcaggtttcagatccttacttgccgagccgtttgtttaggtagagaagacaagtccaaagagtgtgtgggctttcctgtttctaaactttcgctactataaaaccaaaaaaaggaattgagatttcaccaaccccagtgcccagaagagggaaggggagtggctggagggagcagggggtgggacagtgtatcaaataagcagtatttaatcacctctggcgggggcctcgtgcaaggggagactgacaccaagaacagccagtaggttcttctcccctgcactctgctccctgcgcggtaaccccaccactcctgaagcctgcccagtctccttccttccctgcttggtgagtcgcgcatctccgtggttatcccgctgtctcctctccaagaacaagcagagcccgggccactggcccttgcccaaggcagggaagaaggatgtgtgtgtccaggaaggaaaaaaaggtggatcagtgattttacttgaaaacaagctccatcccttttctatatttataagaagagaagatcttgagtgaagcagcacgcgacccaggtgtgtgtgaattgaatggagacgtttcttttctctttctttaatttttgtttttgttctttttttctttaaggaaagttttattttactgttcattttactttcttggtaacaaaaactaaaataaggaatagaaaagctgtttttcaggctgacagtccaattaagggtagccaagaccttgcatggtagagtaggaatcatagtgtcagtgaggtcccgtgagtctttgtgagtccttgtgtcatcgttcgggcactgtttttttatgcaagggcaaaaatctttgtatctggggaaaaaaaacttttttttaaattaaaaaggaaaataaaagatattgaggtcttcctagtgttacttaaattaagatcaaggtaagaaacattgtaaaaaaaaattacaaaagtgctatttgtttcctaaaaacagtgatttctattaaaaaggtgtcagaactggagaaaatgccgtgtagttataattttttagcacagaccctgctgatcacgatgacattttgccgtgtgtgtgtctctagactggtgggccagtctccttgaaggacagaggcggagctccccacccttctctctcctcagaaaagaccgtgctctcttcttggtgcagggatcttgtctcctgttgtgaagcccaaatggaagcgtggatggtatcagggccctacccgtggtcttctcagattctgctagagcaaaaggctggtgcctaaataagatcccttcctttggtgctgcttttggtctttcagccaccagcattatgagtgcctgggggacacctccgagggaactggccagcggagctctgtggtgcgcacgcaccctggccgtgacaggagggtgcgggagtacaggctggctgcatcagcccttggtgcttagaacagaggaggagtgacatgttttgagggtacgtctctgagacagagccccagcgtggccttcgctctgtcttgcctttggggagaggtctgaagctcccactcctttctctgcctgttggctccaggcaccagaaatttactccactccacccacccacaagcctcctgggtgaccctgggctagaattgctgcgcttgcctcggcttggccggttgtggcctctccttgagaaaaccagggttgtgaaagactcagaccattctctcatcttgccttgtcagaagtaaattgtgtcagatttgtgctctcgctggagacctttgccccttgcgtgcccctggccgatgggagggcggtggaggctctgtaccctggccctgctggagcatctcccccaagcccactccaggccctgggaatggccagagtctaggagaggtagaaacgatcctatcagcttctctcccacccaattaggcccagagagacaaagacagatctgaaagcaaatgcaacagagaagagacacttcttagagtaaaatgtgtctcatctctatcagccatcgcctttcatcttcccaggggcctcagaagaaggaattaagttaggctgaacaggcctcagagttaggccctggctgcttgattggctgagggggaaagagttcccttttctcattcagaaaccaaggtgctgtgtctagtcagggagccttggagatgcctggactagttggaggaatcgttggcagaggatcagagaccagcagcaggctgtctgccctgtctagagctcttcccctcaacttgtctgggcccatctgggggttgccacacaacacctaacttaccttttcctgaaagaagttgggaaaccatcatcactagaggcctttgctcagagaggagctgccttaggagtcttgggtcggaggacggggctaggaattgaccagggctttgcctgccgccctcagcagtgtcgggtacattctgacctcgcctgcagctgggctgtggattcttcctgacattcagatgtgagctgttttgggagtcagctagtatggagtacgagatgcaacccagcccccaaacctacattctgcactcaaattccaaaacactgctttactgtaaagaagaggcccctggcacccaatctccctgtccttcactgtcccctcagacctgggcggggaggggggggggcctgtgaccacctgagacatacgctcgtgacactgccccaccccagccacctccacttgcttcctcctccttccctccgctgctctttccccacggcccagaatttagctgctctgacagccacttttgagaccagctggctttgtagtcacttcagagagctggagcggctgcccactgggccctgactgggagtcccctgccagctcctgatcaggcgctgcgccctggtggcagtgatgactgggagtcccctgccagctcctgtccaggcgctgcatcctggtaacagtgaggccatgttgctgtcatctccacctctgcattcttgctgcctgtgggtcctttttctttcatggagcctgctgggtcttgtctcacctgtgctgagctcctctggggttttgatttcttccttccttatcaggccctttggggtaagcctgctggttgtacctgacatagggaggcagttaggggcagtccctggtggggccgccctggcagcctccagctggcaccatcgtgtgcctggtttccctgcaacacctgcctctctgtccctgctgctgcttggctcaggcccaacaggcagcgtgcatggaggtggttacacacagctgtttccgtgagggtgaccgtgtctgcagcacgcttccgtctccgcatgcacggctgcctctccagccacctctgatacttctctcttggggccatcagagcctcccttgggctgtcacctcccagctcacacacactcttcagtggtttcctctcttcattctcttatagggcgtggtccttcttatttatctaaagggctgaatttaggagactttttacccaggggcaaaaggctcttagggtaatgagatggatggtggcccaggtgcattttccagggcctgggttctccagatcccgtggcttctgttgagtggaggcaactttgctctgtgtgaacctcgcccctgtccctctgccgggcacccctggcaggaagcaggactcccatcctcaccctgacttagactgtcctctgagtcagctcctctccaagacaggagtgggcagccctgggcagtcttctggccccttgctaaagtgaggggcaggaagctggggctgccctccagaaagccggggtaggaactctgaaaaatacctcctctaaacggaagcagggctctccagttccacttggcgccccctcccacaaggcccttcctccctgaggaccccacccccctaccccttccccagcagcctttggaccctcacctctctccggtgtccgtgggtcctcagcccagggtgagctgcagtcaggcgggatgggacgggcaggccagaggtcagccagctcctagcagagaagagccagccagaccccaaccctgtctcttgtccatgccctttgtgatttcagtcttggtagacttgtatttggagttttgtgcttcaaagtttttgtttttgtttgtttggtttttgttttgagggggtggggggggatacagagcagctgatcaatttgtatttatttattttaacattttactaaataaagccaaataaagcctctcaaaaaaaaaaaaaaaaa

SEQ ID NO: 4351 - DNA, 3323 bp, Homo Sapiens
  NM_016622
attctcttttgctcttgtgcttttaaacccaaagcggccgccgtaggcgaaggtgaagatggctgcctctgcctttgctggtgcagtgagagcagcttcaggaatcctacggcccctgaatattttggcatcttcaacctaccgcaactgtgtcaagaatgcctctcttatttctgcattgtccactggacgttttagtcatattcagacaccagttgtttcctccactcccagacttaccacatctgagagaaacctgacatgtgggcatacctcagtgatccttaatagaatggcccccgtgcttccaagtgtcctgaagctgccagtcagatctctaacatacttcagtgcaagaaaaggcaagagaaagaccgtgaaagctgtcatcgataggtttcttcgacttcattgtggcctttgggtgaggagaaaggctggctataagaaaaaattatggaaaaagacacctgcaaggaagaagcgattgagggaatttgtattctgcaataaaacccagagtaaactcttagataaaatgacgacgtccttctggaagaggcgaaactggtacgttgatgatccttatcagaagtatcatgatcgaacaaacctgaaagtatagatcagaagtttcacttgtttctcagttattggatatgtatctttgtgtacatatctttgcaaaaatggataagtacaaaacttgatgtaaattgtaccaatgaatacgtaaacatacagtgacaacattaaacttagaaaagttttaaaacttaatggatcagactttgccagatttggttagggaaacagaaatttagaatggtgcattatttttaacaaatggtattggcttaactagttgtttcagttatgctcttttagttgcaaggaatctcaagtgggacaaacataaaaagactcaaaagctacaagttagctcaagcaatgtgacattatttcaaggatatgtgccagggaattcaggaaccacctcaccaaccccatctcccactcagaaatcacctcccagcctcaggaagagtagaaattgggtggtgctcctcagcaggggaaggtggatgtttaggcttgggctctgcatgcatgtgacttgcttctttttgcattgttaactccattctctctattcaccaacttctctacacagcttttgcatacttacagtttctgttcctttgtaataactttaacttgcacctttgaggttcttttctacatgatgaccttcagctcctgctgctagtctccaattgccaagggaatttaactgggccagactacctttttatactaggtctggttgggtcattgtctagagtagggattggctgtccttaagtcaggagcccgctttgtattagcaggtttgcatgcagcaaaaaaacagttatgtgagcagtttcacttggaggttcacatggggtggcagcacacttaacatctaacacaccaggttcattgtgttcataacacttgtcatttactgtaacaacattttttcataggagagtaaatagcccttcagcatgctcattcatgaaacagaagaggctgtacaagtgaagacaagggctttttatgcaagttttgaaagataggtatttattttttctagagacaggagttttgctctgttgcccaggctggagtgcagtggtgcaatcatagctcattgaagcctcgcactcctgggctcaagtggtcctcctgcctcagcttactgagtaaggatatgtatttcttaaaagttagtttatccacttcagatttcatgttttcatttgtaaggataaacttttcccacaaattttcaacaatcattgtagaaactaagggggagaaagtaatctcagttgttttagaaacgaaaaagttaagcattgtttacttgaagtgggcagggaagcagcactgagtaaagttcaattgagtggttacagtctagggcagtggttcccaactctccgatcagaatcatctgggaagcattttcaaacagcaaagtactttgaaaaccattattaaatagaattatgcatgaattactgtttcagatcctttaatgtggtagttggtaataataagatgaaattcctctgttgttagtaaaattatgaaattgaagttctgcagcatgtcaggccaggattattagggagattcctcgaaactagtgtgtgtttattaaaaggagaaaggataacaatagaatgttctaaaaccagaagtccaagtgcgtgtctacttatgggaccaataaataaagaacagacatttgatttgaggtgaggtaaaagcctgaaacatggaatggcattctgttttgatggattttcatttcttcgcacttctgagacggcaaagccaaccacttagaagccttccacatctttgtcacctgcctggctcctgctctctgatgtacctctgggtagtgagatggaaatggtgcctgcagaagttggggagaaggatacttttgcacagcctccatgatgtctttattgcaaatatggatgacaagggtctctgttacaggggcctcagagcaccttcgtttctcctctagaccagggacaggtgtagagataaggactggcaaccagagcctcagcatccaaagatggactgaagtgggatggctgacaggcacataacttacgggaaagggaatttcatacatacgatttttgttttgtgggtaggagggcttatcatcaacactgattttataatctgacaataaatgtctttcattaaagagtttacctaaatgatgttcgattatatgtataatttataaaatatttatgtatagtttgtttattcaggtatatgtataatttattgaacacctactatgtcccagcatatctacaaaactgggtacatacatactgtctaactgctaatccacatttccagtcttacaaaggacataatgattagttaagccctaatttagatttgaggaaactgaagctgagagagggttaagtaaattacccaaagtacagctaataagacccagaatctcagtctcactccttgggatcctgtgtatttccctgagtcttctaacatatgaaaattcatatctaaatcaacaagtgactgtaatctggtactataaatactaaataaacacttcttcataacactgtaccaattcagcttttaaattttattactttgctttcctgtcctttgccaactcttaacctagttaatcctagttctgttgacattggaccaggctcagtaaataaacgaatggatttccaaaaaaaaaaaaa

SEQ ID NO: 4352 - DNA, 1647 bp, Homo Sapiens
  NM_016625
gctgagcttaaactgaagcaagttcggtggacgccggcggcgccctgatctaaagaaacgactcagggactgcggcgcttgcacgtcaacgggaggtgtgagcccaaagaaatgggacgtcggtcatcagatactgaagaagaaagcagaagcaagagaaaaaagaaacaccgtagacggtcctcctcgagcagttcttcagatagtagaacatacagccgaaagaaaggaggaaggaaatcaagatcaaagtcaagatcttggtccagagatcttcagcctcgttcacattcttatgatagaagacgcaggcatcgatcaagcagtagctcttcttatggctccagaaggaaacgaagtcgaagtcgttcaaggggtcgagggaaatcctatagagttcagaggtctaggtcaaaaagcagaacaagaaggtccaggtcaagacctcgtctccgttctcatagtcgtagcagtgaaaggtccagtcacagaagaacgcgtagtcggtctcgggatagagaacgacgtaagggcagagataaagagaaaagagaaaaggagaaggataaagggaaggacaaggaattacataacatcaaacgtggggaatctggaaacatcaaagctggattagaacatctgccaccagctgaacaggccaaagccagactacagctggttcttgaagctgctgcaaaagctgatgaagcattgaaagccaaagaaagaaatgaggaagaagcaaagagaagaaaggaggaagaccaagccaccctggtagaacaagtaaaaagagtaaaagaaattgaagctattgaaagtgattcttttgttcagcagacattcagatcaagtaaagaagtcaaaaagtcagtggaacctagtgaagtgaaacaagcaacttcaacatcaggaccagcatcagcagttgctgatccacccagtactgaaaaagaaatagatcctaccagcatccctactgctatcaagtaccaagatgacaattccctggcccatccaaatttatttatcgagaaagctgatgctgaggaaaaatggttcaagagattaattgctctccgacaagaaagactaatgggcagtcctgtggcctaagtaatatacatatagttggattggattgtcagcagtaacattggaaatttaggtttttaaatcccaatattaactttttactcttaaaaagaattttgctgattatatataaaggtagtctcatttcatttgtctctcatgtaggcttgaatatttgttaatttgaattaaatcaaacattgtaaaaattaaaacaaaatttaagattgcatgaaaatgttatactgttaataaagctaaacataaataagtctgttaaaatgaatggtagacactagtgtttcttagtgcaattcaaaaaatgtcaagatgtcatttaaagacacaattttgattaattatgcatacatgagaattgaattacatgctataaatatgagatttcatcttccgtatggtattcaaccatttttaaatattttatttcaccatattgcaaatttttaggcacaataaaaagcaccctaaacaatgtaagcagaatgtgcatgttaaagaacatatttatggaaaaaaaaaaaaaaaaaaaaa

SEQ ID NO: 4353 - DNA, 4158 bp, Homo Sapiens
  NM_016626
attcggagagcggcgtggggcgtagccgccgccgccgcgcgcgccgggggctggttaaggccatgaaacaaaagaaacactgagaggggagccgctgccacctccaccagcccgccccgccgccgtccccacccacccacctagttacctacctctgcctccttcccctgcccctccaccccgccctctccggtctccgggcggccctggcgctcctcggcccgggtccccagccccgccgcctccccagaggaaaggtgtttgcgagctgagcagggccctggccctgtccgccatggggctcgccgcctgccgcgcctgacccggccgccgccgccgccattgacagcgcgccgccgcgatgcccagcggcagctccgcggccctggccctggcggcggccccggcccccctgccgcagccgcccccgccgccgccgccgccaccgccgcctctgccgccgccctcgggcggcccggagctcgagggggacgggctcctgctgagggagcgcttggccgcgctaggcctcgacgaccccagcccggcggagcccggcgccccggcgcttcgggccccggcagcggcggcgcagggccaggcccggcgggcggcggagctgtctccagaggagcgggctccgcccggccggcccggggccccggaggcggccgagctggagctggaagaggacgaggaggagggggaggaagcggagctggacggagacctgctggaggaggaggagctggaggaagcagaggaggaggaccggtcgtcgctgctgctgctgtcgccgcccgcggccaccgcctctcagacccagcagatcccgggcgggtccctggggtctgtgctgctgccagccgccaggttcgatgcccgggaggcggcggccgcggcggcggcggcgggggtgctgtacggaggggacgatgcccagggcatgatggcggcgatgctgtcccacgcctacggccccggcggttgtggggcggcggcggccgccctgaacggggagcaggcggccctgctccggagaaagagcgtcaacaccaccgagtgcgtcccggtgcccagctccgagcacgtcgccgagatcgtcggccgccagggttgtaaaattaaagcactgagagccaagacaaacacgtatatcaagactcctgttcgtggtgaagagcccatttttgttgtcactggaaggaaagaagatgttgccatggccaaaagagagatcctctcagctgcagagcacttctccatgattcgtgcatctcgaaacaaaaatgggcctgccctgggaggattatcatgtagtcctaatctgcccggtcaaaccaccgtccaagtcagggtcccttatcgtgtggtaggattagtggttggacccaaaggagcaactattaaaagaattcagcagcagacccacacctacatagtaactccgagcagagataaggaacctgtctttgaagtgacagggatgcctgaaaatgttgaccgagcacgggaagaaatagaaatgcatattgccatgcgtacaggaaactatatagagctcaatgaagagaatgatttccattacaatggtaccgatgtaagctttgaaggtggcactcttggctctgcgtggctctcctccaatcctgttcctcctagccgcgcaagaatgatatccaattatcgaaatgatagttccagttctctaggaagtggctctacagattcctactttggaagcaataggctggctgactttagtccaacaagcccatttagcacaggaaacttctggtttggagatacactaccatctgtaggctcagaagacctagcagttgactctcctgcctttgactctttaccaacatctgctcaaactatctggactccatttgaaccagttaacccactctctggctttgggagtgatccttctggtaacatgaagactcagcgcagaggaagtcagccatctactcctcgtctgtctcctacatttcctgagagcatagaacatccacttgctcggagggttaggagcgacccacctagtacaggcaaccatgttggccttccaatatatatccctgctttttctaatggtaccaatagttactcctcttccaatggtggttccacctctagctcacctccagaatcaagacgaaagcacgactgtgtgatttgctttgagaatgaggttattgctgccctagttccatgtggccacaacctcttctgcatggaatgtgccaacaagatctgtgaaaagagaacgccatcatgtccagtttgccagacagctgttactcaggcaatccaaattcactcttaactatatatatatacataaatactatatctctatatggactcgtaaaggcatgggtataatggtaccccccagtaaacttcctaatgatttcttatgactgttatcaggctttattgggattaggctaaagttgttagtaaacttataaaaggctgctatggtaacactaaacctaagtggtctcttgtctattagtttggtttgaattattagtactatcctgtagacccagagacatagtttatataagaattgctaaagctgaagttcaacttggctgagtgaagataatcataggttgtgtgagcctatgaaaaagtgtatacgtctaagatttcaaaacaatgggtcccaaagcctaaccactttaagagtttatggagggtacttggcattacagacgattcatacacttccagtgctgccttctttacactgccagttttgacaaaacaggtttgttttttattttacaacaacatatgcctaattctgcaggattgcaagtaactttttaatgcattgtgattacttattggtaatgatagggctgatggcagtttactagatcactggttataatttgggacaaaaactgctacatcaactttcatctcgcccagagtgctcaaggctggtatgatcagtggatcaggaatgcaattgtgaattcctgcccattgcctctcttggtgaatgtggaaatggccacctgggttttcccatatcaggaagggctttgggatggcacctatattggctgataattgaggatgcaaacattccattcattagtgtgatcgagctgttaatttttagactatagatcaaaatgtgaaacattttatgttcaatccatatttgtcttgcacattataaatatatttttattttttagtaatttaggggagggaggagggagaaagggataatgatgcccttggcataattcacaaaagcagctgtgacaacctccaatcagtttacttcatttcaaaactatttccaatcacaaggaaagatttatttaaaatatactcgtacatttcacctgtggatgtctataacttcatcctcagtatgttcccaaatctgtgctggcattgaaaggacaaaacattatactagtgggtttttctactaattattttttgaagcattattttcccaacacaaaagagcttttttctcggtataatgaaaattgaaatcctatgtgtattcaatagtaaatagacaaattttattttttatttccacttgaagagttacatttcgtataaaagtttacaaataacggtttttattttgattttttcagtataaaaaaagttgccttgatggcatattatgatgtaatgctaattgcttgtaggatagtaaatggtcagtattgaaacctaatctctagctgccgtcttgtagatatgaacgaatgttcaccaagcatgtattttgtattttgttgcattgtacactgcaactaataagccaaggaatcgacatatattaggtgcgtgtactgtttctaaaaaccacaaactaagaatgataaattatcaatatagtttagtatttgctaattttactacactcttttgttatgtatatgtagggaagtcatagggattataaattcaatttgagtaaaatttaaaaccatatattttatgataaagggcctttaacttaagatggccaaagcactgatattatatatttgctgtaaagagaattataagagttttatttttctgatattaaaagttacttaataaagacttgtttccattaacttgaaaaaaaaaaaaaaaaaa

SEQ ID NO: 4354 - DNA, 4011 bp, Homo Sapiens
  NM_016631
ctctctctctttctccaagtattgagagcgcgtgggagcataggcgcatgcgcgctcgtggggtgcgcggtagcaacagaggactcgacccggctggagctccggagagcgcgcgtgcgccgtcacgagctcggcgctgccggggccgcggtgtggaagcgagtattcgaccgccgtgcgggccgcggggatgttccgaaaggcccggcgggtgaacgtgcgcaagcggaacgactccgaagaggaagagcgggaacgcgatgaggagcaggagccgccgccgttgttgccgccgccgggcacgggcgaagaggcgggccccggtggcggcgacagggcccctggcggggagtcgctgctgggcccggggccgtcgccgccttccgcgctgaccccgggcctcggggctgaggccgggggcggcttccccggcggcgcggagcccggcaacgggctgaagccgcgcaagaggcctcgcgagaacaaagaggtgccccgggccagcctgctcagcttccaggacgaggaggaagaaaatgaagaagttttcaaagtgaagaaatcaagttatagcaaaaagatagtaaaattgctcaagaaggaatataaagaagatcttgaaaaatcgaagattaagacagaactcaactcatcagctgaaagtgaacaacctttggacaaaacaggacatgttaaggatacaaatcaagaagatggagttatcatcagtgaacatggtgaagatgaaatggatatggaaagtgaaaaagaggaagaaaagccaaagactggtggagctttttcaaatgctttatcttcattgaatgttcttcgtccaggagaaattccagatgcagcttttatacatgctgcaaggaaaaagcgccaaatggcccgagaattgggagatttcactcctcatgataatgagcctggtaaaggccgccttgttagagaagatgagaatgatgccagtgatgatgaagatgacgatgagaaacgccggatagttttttctgtgaaagaaaagtcacaaagacaaaaaattgctgaggaaataggaattgaggggagtgatgatgatgctttagtaactggagaacaggatgaagagctcagccgatgggaacaggagcagataaggaaaggaattaatatccctcaggttcaagccagtcaacccgcagaagtgaatatgtactaccagaacacttaccagacaatgccttacggctcatcctatggcattccttatagttatacggcctatggatcatcagatgccaaatctcaaaaaacagataatacagtccctttcaaaactcccagtaatgagatgactcccgttactattgatttggtaaagaaacagcttaaagacaggttggactccatgaaagaattgcacaaaacaaatcgacagcagcatgagaaacatctgcaaagccgagtggactctaccagggctattgaaagattagaagggtcttctgggggtattggtgaacggtataaatttttgcaagaaatgcgagggtatgtccaagacttgcttgagtgtttcagtgaaaaggtgccactgattaatgaacttgaatcagcaatacatcagctgtacaaacagcgagcttcccgccttgtccaaagacgacaagatgatattaaagatgaatcttcggagttttcaagccattcaaacaaagctctgatggcaccaaatcttgactcctttggacgcgatcgggcactgtatcaagagcatgcaaaacgtcgcattgcagagcgggaggccaggaggactcgtcgtagacaagccagagaacaaaccggtaagatggcagatcaccttgaaggcctttccagtgatgatgaagaaacttctacagatattactaatttcaatctggaaaaagatcgaatttcaaaagaatccggcaaagtttttgaagatgtccttgaaagtttctattcaattgactgtattaaatcacagtttgaagcatggcgttcaaaatactacacatcctacaaagatgcttacattggcctttgtttgccaaaattattcaaccccctcatacgacttcagctcctcacttggactcctcttgaggcaaaatgtcgtgactttgagaatatgctgtggtttgaatctttgctgttttatggttgtgaagaacgagagcaagaaaaagatgatgtagatgttgccctactacctaccattgtggaaaaggtgattcttcctaaactaacagtgatagctgaaaatatgtgggaccctttttctacaacacagacttcaagaatggtgggaattacactaaaattaatcaatggatatccttcagtagtgaatgcagaaaataaaaatacacaggtatacctaaaggcacttttattgagaatgagaagaactttagatgatgatgtatttatgcccttatatcccaaaaatgtcttagaaaataaaaattctgggccttacttgttttttcaacgacagttttggtcttcagttaagctgttaggcaattttcttcagtggtatggcattttctcaaataaaactctgcaagagttatcaatagatggtttattaaatcgatatattctcatggcttttcagaattcagaatatggagatgacagcatcaaaaaagcccaaaatgtaatcaattgtttccccaaacaatggttcatgaatctgaaaggagaaaggactatttctcagttagaaaacttttgccgataccttgtacacttagcggatacaatttatagaaatagtatcgggtgttctgatgtggaaaaaagaaatgcaagggaaaacataaaacagatagtaaaactccttgcaagtgttcgagctttggatcatgctatgtctgttgcaagtgaccacaatgtgaaagaatttaagtctttgatcgaaggaaaatagatctatgagactgaaaaacctatttgcttgattaccattcccaatgtgtaaattttgtatatatgtaaagtttcttaaactgtaaaatagcaattcttgttttaatacaaaaaacattatattcaatactgtgtccttaaatgatatttcttcagaatgaaaggaattcagattatttctaggagtctatgaatgttttctttactgcctgtcatactttgtttactgaagtattttgtatggtcatttaaattaaccctctcagttaattgtcccctgtaaacgatgtgtgcagtgtaaattgtgtaattatgcatatatatatttataccaccatggacttactttcacactggaaatttgtggtgtttttccacagaggaagccttttaacagcagaaaattatccggtagcaaattgtcttagggaaattactacactgttgtaacaaaagggctggcaagtgactaaatgttcattaccttttggttagcgttgctatcactgtagctgtgctgccttaacattgagagttgagttgtggacttagtcattgagtgaatgttgaactttcttccttgaatcagcgttagagtcaaatgtgggtttaatgtgaatgctaaatgaatatgcaacatagtttcaaatggaacatagaaatttcacttttgaaaataataaacccacaacctaattgcatggttttgggctgaccgtcctgtctcattcatgattttactccctgcccagcttgcagatacatgcatttgaattttagtagtctgtcatatttaaaatcccacatatgtgagttaaatatgcaataaagaatacgccttgctgattagccacacccaggcaatttaatatccatggtcttctataatgtttataccacattgtaaatattcagagaacttgttttaaagtttatgctttctgattctgtgattttcaaaagaggaatttttttggaaattaaggactatcgtttgataattatatatgtaattaagatttagccaagcattaaattaatttttaaatataaaaaaaaaaaaaaaaa

SEQ ID NO: 4355 - DNA, 518 bp, Homo Sapiens
  NM_016633
ctacatctatagcttggcacagagagattcacgcaccctcaagagtgtgggtgagacatatacagcctgttagacctgaaggcagatggctcttcttaaggccaataaggatctcatttccgcaggattgaaggagttcagcgttctgctgaatcagcaggtcttcaatgatcctctcgtctctgaagaagacatggtgactgtggtggaggactggatgaacttctacatcaactattacaggcagcaggtgacaggggagccccaagagcgagacaaggctctgcaggagcttcggcaagagctgaacactctggccaaccctttcctggccaagtacagggacttcctgaagtctcatgagctcccgagtcacccaccgccctcctcctagctcagggacccagcccctcctctctgagaaactctgaccttcatgtccttaggctgtgctcctgccactctaccctgacacctcaataaagaccagtgctggttttgttggaaaaaaaaaaaaa

SEQ ID NO: 4356 - DNA, 1048 bp, Homo Sapiens
  NM_016639
aaggcgggggcgggggcggggcggcggccgtgggtccctgccggccggcggcgggcgcagacagcggcgggcgcaggacgtgcactatggctcggggctcgctgcgccggttgctgcggctcctcgtgctggggctctggctggcgttgctgcgctccgtggccggggagcaagcgccaggcaccgccccctgctcccgcggcagctcctggagcgcggacctggacaagtgcatggactgcgcgtcttgcagggcgcgaccgcacagcgacttctgcctgggctgcgctgcagcacctcctgcccccttccggctgctttggcccatccttgggggcgctctgagcctgaccttcgtgctggggctgctttctggctttttggtctggagacgatgccgcaggagagagaagttcaccacccccatagaggagaccggcggagagggctgcccagctgtggcgctgatccagtgacaatgtgccccctgccagccggggctcgcccactcatcattcattcatccattctagagccagtctctgcctcccagacgcggcgggagccaagctcctccaaccacaaggggggtggggggcggtgaatcacctctgaggcctgggcccagggttcaggggaaccttccaaggtgtctggttgccctgcctctggctccagaacagaaagggagcctcacgctggctcacacaaaacagctgacactgactaaggaactgcagcatttgcacaggggaggggggtgccctccttcctagaggccctgggggccaggctgacttggggggcagacttgacactaggccccactcactcagatgtcctgaaattccaccacgggggtcaccctggggggttagggacctatttttaacactagggggctggcccactaggagggctggccctaagatacagacccccccaactccccaaagcggggaggagatatttattttggggagagtttggaggggagggagaatttattaataaaagaatctttaactttaaaaaaaaaaaaaaaaaa

SEQ ID NO: 4357 - DNA, 1686 bp, Homo Sapiens
  NM_016640
gcttaagttgacctctgggtccggaatcgcgggcaaagatggcggcggccaggtgttggaggcctttgctacgcggtccgaggctttcattgcacaccgcggctaatgccgccgccacggctacagaaacgacctgccaagacgtcgcggcgacccccgtcgcgcggtacccgccgattgtggcctccatgacagccgacagcaaagctgcacggctgcggcggatcgagcgctggcaggcgacggtgcacgctgcggagtcggtagacgagaagctgcgaatcctcaccaagatgcagtttatgaagtacatggtttacccgcagaccttcgcgctgaatgccgaccgctggtaccagtacttcaccaagaccgtgttcctgtcgggtctgccgccgcccccagcggagcccgagcccgagcccgaacccgaacctgaacctgcgctggacctcgcggcgctgcgtgcggtcgcctgcgactgcctgctgcaggagcacttctacctgcggcgcaggcggcgcgtgcaccgttacgaggagagcgaggtcatatctttgcccttcctggatcagctggtgtcaaccctcgtgggcctcctcagcccacacaacccggccctggccgctgccgccctcgattatagatgcccagttcatttttactgggtgcgtggtgaagaaattattcctcgtggtcatcgaagaggtcgaattgatgacttgcgataccagatagatgataaaccaaacaaccagattcgaatatccaagcaactcgcagagtttgtgccattggattattctgttcctatagaaatccccactataaaatgtaaaccagacaaacttccattattcaaacggcagtatgaaaaccacatatttgttggctcaaaaactgcagatccttgctgttacggtcacacccagtttcatctgttacctgacaaattaagaagggaaaggcttttgagacaaaactgtgctgatcagatagaagttgtttttagagctaatgctattgcaagcctttttgcttggactggagcacaagctatgtatcaaggattctggagtgaagcagatgttactcgaccttttgtctcccaggctgtgatcacagatggaaaatacttttcctttttctgctaccagctaaatactttggcactgactacacaagctgatcaaaataaccctcgtaaaaatatatgttggggtacacaaagtaagcctctttatgaaacaattgaggataatgatgtgaaaggttttaatgatgatgttctacttcagatagttcactttctactgaatagaccaaaagaagaaaaatcacagctgttggaaaactgaaaaagcatatttgattgagaactgtgggaatatttaaattttactgaaggaacaataatgatgagatttgtaactgtcaactattaaatacattgatttttgagacaaatatttcttatgtcaacctgttattagatctcttactctgctcaaattcatcactgaaagatttaattttagttaccttttgttgatttaaaaataattgcatttgtatattgctaactgataagacaaattgagttattgagctattaaatgcacattttaatataaatgcagaaatcccaaataaaatgctaacatactgaaaaaaaaaaaaaaaaaa

SEQ ID NO: 4358 - DNA, 2960 bp, Homo Sapiens
  NM_016641
actccctctctggatgtgtctgctgccgccattgtgcggcgctggtcccctcagagggttcctgctgctgccggtgccttggaccctccccctcgcttctcgttctactgccccaggagcccggcgggtccgggactcccgtccgtgccggtgcgggcgccggcatgtggctgtgggaggaccagggcggcctcctgggccctttctccttcctgctgctagtgctgctgctggtgacgcggagcccggtcaatgcctgcctcctcaccggcagcctcttcgttctactgcgcgtcttcagctttgagccggtgccctcttgcagggccctgcaggtgctcaagccccgggaccgcatttctgccatcgcccaccgtggcggcagccacgacgcgcccgagaacacgctggcggccattcggcaggcagctaagaatggagcaacaggcgtggagttggacattgagtttacttctgacgggattcctgtcttaatgcacgataacacagtagataggacgactgatgggactgggcgattgtgtgatttgacatttgaacaaattaggaagctgaatcctgcagcaaaccacagactcaggaatgatttccctgatgaaaagatccctaccctaagggaagctgttgcagagtgcctaaaccataacctcacaatcttctttgatgtcaaaggccatgcacacaaggctactgaggctctaaagaaaatgtatatggaatttcctcaactgtataataatagtgtggtctgttctttcttgccagaagttatctacaagatgagacaaacagatcgggatgtaataacagcattaactcacagaccttggagcctaagccatacaggagatgggaaaccacgctatgatactttctggaaacattttatatttgttatgatggacattttgctcgattggagcatgcataatatcttgtggtacctgtgtggaatttcagctttcctcatgcaaaaggattttgtatccccggcctacttgaagaagtggtcagctaaaggaatccaggttgttggttggactgttaatacctttgatgaaaagagttactacgaatcccatcttggttccagctatatcactgacagcatggtagaagactgcgaacctcacttctagactttcacggtgggacgaaacgggttcagaaactgccaggggcctcatacagggatatcaaaataccctttgtgctagcccaggccctggggaatcaggtgactcacacaaatgcaatagttggtcactgcatttttacctgaaccaaagctaaacccggtgttgccaccatgcaccatggcatgccagagttcaacactgttgctcttgaaaatctgggtctgaaaaaacgcacaagagcccctgccctgccctagctgaggcacacagggagacccagtgaggataagcacagattgaattgtacagtttgcagatgcagatgtaaatgcatgggacatgcatgataactcagagttgacattttaaaacttgccacacttatttcaaatatttgtactcagctatgttaacatgtactgtagacatcaaacttgtggccatactaataaaattattaaaaggagcactaaaggaaaactgtgtgccaagcatcatatcctaaggcatacggaatttggggaagccaccatgcaatccagtgaggcttcagtgtacagcaaccaaaatggtagggaggtcttgaagccaatgagggatttatagcatcttgaatagagagctgcaaaccaccagggggcagagttgcatttttccaggctttttaggaagctctgcaacagatgtgatctgatcataggcaattagaactggaagaaacttccaaaaatatctaggtttgtcctcattttacaaatgaggaaactaaactctgtggaagggaaggggttgcctcaaaagtcacagcttagctgggcacagtggctcatgccgataatcccagcaattcagaaagctgaggcaggaggattacttgaggccagactgggcaatatagcaagaccccatctctaaaaaattaggcatggtggtgcatgcctgtattcccagctactcaggaggttgaggtgggaggatcacttgagcccagaagttcaaggctgcaatgagccatgattacaccacggcactacaaccttggtggcacagtgagaacctgactcttaaaaaaaaaaaaaaaaaaaaaaaaaaaaagataactagaacttctagaacatcttgtttacagttagccagaaactatacaagtggtttaacatgcattatcttactcaatccatacaaaagtcttatggaggtgttagcactctttctactgatgaagaactgaggtacttcataaaaccacttacccaaggtgtcttgagtctggtacaactggcattcaaatctaggtcagtctgcccccagagccactacccttacccctcactgaatctgcctttatattgttgagcccatgaccccaaactgctctttccaatttgaacttccagggattttattgtgaacttacatagcaacattaaaatgaagttgaattgtttttaatggcaacgccgtctgtctcctctagcttaccgcttctcacctttcaaccccatctgtggcctttgtccaggcccacagcttagccatggcttccctcctgcatccctgccgtgggttgctggcctcacacttgcagcagctggacagtgattttagaaggccaccagtccccatagctatgtgacaatgagaagcaaacttttttgtgacagattgtattggcataggcatgatagatggggattggtacgttttgaatcagcatttgcaaaaaaattgtcttgaattttaaaataaacaacaaagatttgttcattgagtgcaaaaaaaaaaaaaaaaaaaaaaaaa

SEQ ID NO: 4359 - DNA, 1798 bp, Homo Sapiens
  NM_016644
gccgcccggccgagcgcggagcgcagccactcgccgctgcccagggagcgcccaagatgtggggggaccggggcggcagcggccgtagcagcgccagggacgggggcacgcagcagcctccgctcgcccgcctgtcctgacctgcctcgcttgcccccaaagaatgtcagccaagtccaaggggaacccctcctcgtcctgtccagccgagggaccgccggcagcctccaaaaccaaggtgaaggaacagatcaagatcatcgtggaggatttggaattagtcctgggcgacctgaaggacgtggccaaggaacttaaggagatgaagtcccactctgttgcccaggctagagtgcaatggcacaatctgggctcactgcaacctctgcctcccaggttcaagctattctcctgcctcagcctgcctcagtgcgccactacgcctgggtggttgaccagattgacaccctgacctctgacctacagctggaggatgagatgactgacagctccaaaacggacacgctgaatagtagctcaagtggcacaacagcctccagcctagagaagatcaaagtgcaggctaatgcaccgcttattaaacccccagcacacccatctgctatcctcacggtcctgagaaagccaaaccctccaccacctcctccaaggttgacacctgtgaagtgtgaagaccccaaaagggtggttccaactgccaatcctgtaaaaaccaatggcacccttctacgaaatggaggcttaccaggtggacctaacaaaattccaaatggagatatctgctgcatacccaacagtaacttggacaaggctccagtccagcttctgatgcatagacctgaaaaagacagatgtccccaggcagggcctcgagaacgagttcggtttaatgaaaaagtacagtaccatggctattgtcctgactgtgatacccggtataacataaaaaacagggaggtccacttacacagtgaacctgtccacccaccgggaaagattcctcaccaaggccctcccctccctcctacaccccatctccctcctttcccactagaaaatgggggaatgggaataagccacagtaacagcttcccccctatcagacctgcaactgtgcctcctcccactgcaccaaaaccacagaagacgatcttgaggaagtcaaccactacaaccgtgtgatgtatgccattaaaaaaattgtttttttaattttctatattataaacataaaataagtaatgagcactttctactcaagcaataaaaagcccaaatatattaatcctgcattcagcaaagtggcataaaaatcacctggtaagtatgcagcacattgcttatatcctgggtatgcattattttaaatgttgtatcattaaaaacctcagaatgatgaaaaatatgaatgatgcattgtttttgcaattgacctatgacaaactgtgaacctgcagatttcacctattttgatttactataagagctgggatttgattcattttatttatgcctaagtcatctatgcattaacatgtcatattcttaactttgatctaatgctttttactaggaaattttaatactgaaggactattttattatttttttctaaagatgtttgtcactagtttttcattattaaatgctgaggccaataccaagaagtttattttctatattatacaattatgaattacatgctcagctatatatgtaataaaatactttggtctgtggaaaaaaaaaaaaaaaaaaaaaaaaaaaaaaaaaaaaa

SEQ ID NO: 4360 - DNA, 2264 bp, Homo Sapiens
  NM_016647
ctcggccgccctcgcgctgtggttcgctccgggcgcgctgcgctcgtgagttcccaggaggcctggcgggcaccgtaaccagcgccgcggacaccggcaccggcgccacggactccgcaggaccccgcgcccgccgccgccgctatgctggggctgctggtggcgttgctggccctggggctcgctgtctttgcgctgctggacgtctggtacctggtgcgccttccgtgcgccgtgctgcgcgcgcgcctgctgcagccgcgcgtccgtgacctgctagctgagcagcgcttcccgggccgcgtgctgccctcggacttggacctgctgctgcacatgaacaacgcgcgctacctgcgcgaggccgactttgcgcgcgtcgcgcacctgacccgctgcggggtgctcggggcgctgagggagttgcgggcgcacacggtgctggcggcctcgtgcgcgcgccaccgccgctcgctgcgcctgctggagcccttcgaggtgcgcacccgcctgctgggctgggacgaccgcgcgttctacctggaggcgcgctttgtcagcctgcgggacggcttcgtgtgcgcgctgctgcgcttccggcagcacctgctgggcacctcacccgagcgcgtcgtgcagcacctgtgccagcgcagggtggagccccctgagctgcccgctgatctgcagcactggatctcctacaacgaggccagcagccagctgctccgcatggagagtgggctcagtgatgtcaccaaggaccagtgaccgccaccttcacaccgtctgccctggccaccatcctgggcctgggggctgcccacagatgggcagtctcagccatactctgttccagctggagtagcctcctgaccagcctggcccaccctgctccacccactgggcccccccagttattgatacccctctgtgctgggctccacgctaggcagaaggaggagtggcattggcatcctgacccagctctgccctcaaggtggggatggatgggcaaaggagagtcctgcctggccctacgatgaggccactcatgtgggcctaggtaggggaggatggtgcctggagcagagggacccacaagtgcctcccgagcctagatcctggctcggaccactgcaagggccgaggcagggccagaccagagcatcctgggtacaggcctgggctctccagggcctgggcctgattcaggtgcagtgggcactcctgaagggtcagagcggcatctgccaggcagcccctctggcttccgctgaggtggttgcaggcctggggcagagcctgggtggtcagaggccggggctagaggcagatggaagggaggcatttgctgacagaggacggggcacccgggctccccactgcagtcggccttgcctcctcctcctcctctacctccagtcaggctggacgggagggtagccttgtggctgagaggggtcagactaggtggcacaggggctcctggaaagacagcaggcttcctgctgggcgttcccttgttggagggaatagagtgggggtgggactctgcaggggtgtccttgtccactcgcacccctcgccgcccaccagggccatgctctgtgacttgggctgatccccaccctttctgggcctacagcaccacaggccgctgtacccccttagagctgcccctctctggcctggccggcaggcgtcttcttaactcctctgtcctctatattcagcatgttccttgtcagctgctgggccggccctgccttgcgctagcagagcctctcctggcagcttctcaggtctccctaatggagacaccaggctactaggacactggctggggccaccccctcctgcctaatgcctcaccttacagctggggaaactgaggcctggaatggcccagagtcaccaaggcaaagttggggctggtcccagcctgaggctccagctgatgccctcagctcccagagagggggtgccccatctagctgggtgcaggggtcactgcttgtcagctcagggccctgtgcccgcttgcctgttcccctacatctgtgcctgcacatccagaactgcctccttgccgctgcctccaggaagcccaccttgagccagagtcaagggctgcagcactgcccgatagaacacgcccgccctcactgctgttcttgccttacagccaccatgggaaagctgcaacctttctgttttatttaaagaaagcccaacattaaagggttttcattgcaagcgtg

SEQ ID NO: 4361 - DNA, 3867 bp, Homo Sapiens
  NM_016653
actgtcttcctcattggcgccgtgcagagaggcggaatgttcaactcctaactgcggcggaaacgtgggagccgcgcgggccgctgtcgtcccaacccccgccgccctcgtcgcgcgcggggcctccgcgcccccggctgctgctcacgccccgcccgggagccagattttgtggaagtataatactttgtcattatgagatgtcgtctctcggtgcctcctttgtgcaaattaaatttgatgacttgcagttttttgaaaactgcggtggaggaagttttgggagtgtttatcgagccaaatggatatcacaggacaaggaggtggctgtaaagaagctcctcaaaatagagaaagaggcagaaatactcagtgtcctcagtcacagaaacatcatccagttttatggagtaattcttgaacctcccaactatggcattgtcacagaatatgcttctctgggatcactctatgattacattaacagtaacagaagtgaggagatggatatggatcacattatgacctgggccactgatgtagccaaaggaatgcattatttacatatggaggctcctgtcaaggtgattcacagagacctcaagtcaagaaacgttgttatagctgctgatggagtattgaagatctgtgactttggtgcctctcggttccataaccatacaacacacatgtccttggttggaactttcccatggatggctccagaagttatccagagtctccctgtgtcagaaacttgtgacacatattcctatggtgtggttctctgggagatgctaacaagggaggtcccctttaaaggtttggaaggattacaagtagcttggcttgtagtggaaaaaaacgagagattaaccattccaagcagttgccccagaagttttgctgaactgttacatcagtgttgggaagctgatgccaagaaacggccatcattcaagcaaatcatttcaatcctggagtccatgtcaaatgacacgagccttcctgacaagtgtaactcattcctacacaacaaggcggagtggaggtgcgaaattgaggcaactcttgagaggctaaagaaactagagcgtgatctcagctttaaggagcaggagcttaaagaacgagaaagacgtttaaagatgtgggagcaaaagctgacagagcagtccaacaccccgctgctgccttcctttgagattggtgcatggacggaagacgatgtgtattgttgggttcagcagctcgtcagaaaaggtgactcttcagcagagatgagtgtatatgcaagcttgtttaaagaaaacaacattacagggaagcggctgctgctgctggaggaagaagacctgaaagacatgggcattgtctccaaggggcatatcattcacttcaagtcagccattgagaaattaacccatgattacataaatttgtttcacttcccaccactaattaaggactcaggaggtgaacctgaagaaaatgaggaaaaaatagtgaacctggaactggtttttggttttcacttgaaaccaggaactggcccacaggattgtaagtggaaaatgtatatggagatggatggggatgaaattgcaataacctacataaaagatgtgacattcaacactaacctacctgatgcggagattttaaagatgacaaagccaccatttgtaatggagaagtggattgtaggaatagcaaaaagtcagactgtggagtgcactgtcacatatgagagtgatgttagaactccaaaaagcactaaacatgtccattcgattcagtggagtagaacaaaacctcaggatgaagtgaaagcagtccaacttgccattcagacattattcaccaattcagatggcaaccctggaagcaggtccgactcaagtgctgattgccagtggttagatactctgaggatgcggcagattgcatccaacacttctttacagcgttcccagagcaatcctattctggggtcaccgttcttctcacactttgatggccaggattcctacgctgctgctgtgagacggccccaggtgcccattaagtatcaacagattacacctgtgaaccagtccagaagctcgtctcctactcagtatggactgaccaaaaacttctcttccctacatctcaactctagggacagtggcttttccagtggcaatactgacacctcttcagagaggggtcgatactcagacagaagcaggaacaaatatggacgtggtagtatatcactcaattcttctcctagaggaagatacagtggaaagagtcagcattccactccttcaagaggaagataccctggaaagttctacagggtttctcagtcagcactcaatcctcaccagtcgcctgacttcaagagaagccccagggacctccaccaacccaacaccataccagggatgcctttgcaccctgagactgactcaagagccagtgaagaggacagcaaagtcagcgaagggggctggacaaaagtggaataccggaaaaagccccacaggccatctcccgccaaaaccaataaagagagagccagaggggaccaccgtggatggagaaacttttgatgaattgaactacatagcttttctaagcaggttaaaaaaaaaaaaaaaaagaaatgtaatggtttttgataatatgatcccttcagattgaattaacgaaaagacaacacttccagtttttggattgggaaataccttctaattgagactatagccaaaccagggccaaaattatggatattggtcacccagtgatcataactaggcttgaaaatcactacacatattttctgccttgagtgaacatttttagaggaaaggttatgccatctttttaccctaaccactgatattctggttagcagggccaggacaaggggaaggaaaatgaggtcaacaaaaaaatcaaatttttaggaaaagataagatgaatgttactgatttttccttttggctgaggctgcaatatggcctggcaaggcactgttactgatcttgtctttaacattttgatattttgttcatcataatttttgcatttatttttttaaatattgcattaaaatatcatttagcttgattatcgagttttttggtttgaggttttttgttgcttcttttttcttttctttctttccccctcttttttttggatgtccccttaaattttgtgcccaaggcaggtacctcactcatctcatccttggctcagccctgctggttagtatttagtatttattttagtaagatatttgtgtctgtatgatggtcagagttgaactgatctggcttgtcatttttcagtaataaaaaaagttactgaatttaatgttgaatatgatgcatatctcattcattacgatttatcagaaaccaaagatttaaattgcctagatttgtggttctttctcttcctaagttcccagcgactgctttcaaatactattttctaaatttcaccaaaggagcaaagaggataaaacaacactccataaaggcctcttgggatgtcagaaatctaaaatctaaaagaaaacagacacagagcaagacaataacatcacaagctaaaagccagagaaatttaaaattaccaacatccttgttggagtaagacagtaaatatcagccttgcagcaagacagctctgagcagctgtgggcaaagaggtaaaccagtgggggtgcaaggagactgtctgcagcttagggcagaaatggtgggatccaacttgtgaaatgcttcatgttttacaaaccaaaaagtcaggtagcaacaaacttattgtatgtcaaatcaataaatgttactttcaataaaaaa

SEQ ID NO: 4362 - DNA, 1622 bp, Homo Sapiens
  NM_016655
gctttctttgtgtggctgaagcgctagaaatggcatattttctttcccttcgttaaaaaatcagaccctctttcccctctctccccgcgggaacacagctagggagtgggtaggagcaggatctgccgacgagggcagaggcggaaaatcctcgggcgatgagctgaagagggccgggtccgggagggatgctgggagcttgactcactcgcacaccatgtgtccctccgcgcgcagcacgggggacttttcggtggggattttgggcgccgaccagacgcggcattttcggaaaatagcgccctgtgcagctgaagcgctttgtgtgtagcggggccgcgtcagcccggccgggtacgaggcgcctcgggtccccgcaccacctcctgctgccttcccgtcgccgctcccgaagcttttccagatgtccctggtagatttgggaaagaagcttttagaagcggcacgagcaggtcaagatgatgaagttcgtattttgatggcaaatggagctccctttactacagactggctgggaacttctccacttcatctagcagcacagtatggtcattattccaccacagaggtactgctgcgagctggtgtgagcagagatgccagaaccaaagtggaccgaacaccattacatatggcagcttctgagggccatgccagcatagtagaggttttacttaagcatggtgctgatgtcaatgcaaaggacatgttaaagatgacagctctccattgggccacagaacacaatcatcaagaggtggtggaacttttaatcaaatatggtgctgatgtacacacgcaaagtaaattttgtaaaactgcatttgatatttcaatagacaatggaaatgaagatttagcagagatattacagattgctatgcagaaccaaatcaacacaaacccagagagtcctgacactgtgacaatacatgctgcaacaccacagtttatcattggacctggaggggtggtgaacctaacagatgaaacgggtgtatctgctgttcagtttggaaactcttctacatcagtattagctacattagctgccttagctgaagcatctgctccattgtccaattcttcagaaactccagtagtggccacagaagaagtagttactgcagaatctgtggatggtgccattcagcaagtagttagttcagggggtcagcaagtcatcacaatagttacagatggaattcagcttggaaatttgcactctattccaaccagtggaattggtcagcccatcattgtgaccatgccagatggacaacaagtattaacagtaccagcaacagacattgctgaagaaactgttataagtgaagaaccaccagctaagagacaatgtatcgaaataattgaaaaccgggtggaatctgcagaaatagaagtaaggagtcttttacccggtgtgctttgccgcagtcatccaaaataaattcaattttttttgtcttttatatttattactgacagtattgttttgatacagaatgaaagtgcgtagtattttcattttgtttatttttgccttatacatatagcaagccctcaataaataaatattgaatgaatgaaaaaaaaaaaaa

SEQ ID NO: 4363 - DNA, 3848 bp, Homo Sapiens
  NM_016733
tgacagcagcgcttctttcttagctagtcaccggcccctgctcaagaatgccagtgtgtgtgtagcctccacagagaggtcgttttctcggagtccagaggggccgcctgagcttctgagaactagggaggagccatcccagccatgagcccctgtgggaatctgctgggggccaagtggcctggagtcctcaggctcccgcagctgctccggagggagaggtgagctcagggcagcctgcctgcagccagaggtgccgggagccccgggcctgtcatggtggccatctacagccggcctgaggcagtcacagacggatttgcagctgagcctgtctatctggtgtgggaagaagatggggagttacttgtcagtcccggcttacttcacctccagagacctgtttcggtgttcagaatgccaggattccctcaccaactggtactatgagaaggatgggaagctctactgccccaaggactactgggggaagtttggggagttctgtcatgggtgctccctgctgatgacagggccttttatggtggctggggagttcaagtaccacccagagtgctttgcctgtatgagctgcaaggtgatcattgaggatggggatgcatatgcactggtgcagcatgccaccctctactgtgggaagtgccacaatgaggtggtgctggcacccatgtttgagagactctccacagagtctgttcaggagcagctgccctactctgtcacgctcatctccatgccggccaccactgaaggcaggcggggcttctccgtgtccgtggagagtgcctgctccaactacgccaccactgtgcaagtgaaagaggtcaaccggatgcacatcagtcccaacaatcgaaacgccatccaccctggggaccgcatcctggagatcaatgggacccccgtccgcacacttcgagtggaggaggtggaggatgcaattagccagacgagccagacacttcagctgttgattgaacatgaccccgtctcccaacgcctggaccagctgcggctggaggcccggctcgctcctcacatgcagaatgccggacacccccacgccctcagcaccctggacaccaaggagaatctggaggggacactgaggagacgttccctaaggcgcagtaacagtatctccaagtcccctggccccagctccccaaaggagcccctgctgttcagccgtgacatcagccgctcagaatcccttcgttgttccagcagctattcacagcagatcttccggccctgtgacctaatccatggggaggtcctggggaagggcttctttgggcaggctatcaaggtgacacacaaagccacgggcaaagtgatggtcatgaaagagttaattcgatgtgatgaggagacccagaaaacttttctgactgaggtgaaagtgatgcgcagcctggaccaccccaatgtgctcaagttcattggtgtgctgtacaaggataagaagctgaacctcctgacagagtacattgaggggggcacactgaaggactttctgcgcagtatggatccgttcccctggcagcagaaggtcaggtttgccaaaggaatcgcctccggaatggcctatttgcactctatgtgcatcatccaccgggatctgaactcgcacaactgcctcatcaagttggacaagactgtggtggtggcagactttgggctgtcacggctcatagtggaagagaggaaaagggcccccatggagaaggccaccaccaagaaacgcaccttgcgcaagaacgaccgcaagaagcgctacacggtggtgggaaacccctactggatggcccctgagatgctgaacggaaagagctatgatgagacggtggatatcttctcctttgggatcgttctctgtgagatcattgggcaggtgtatgcagatcctgactgccttccccgaacactggactttggcctcaacgtgaagcttttctgggagaagtttgttcccacagattgtcccccggccttcttcccgctggccgccatctgctgcagactggagcctgagagcagaccagcattctcgaaattggaggactcctttgaggccctctccctgtacctgggggagctgggcatcccgctgcctgcagagctggaggagttggaccacactgtgagcatgcagtacggcctgacccgggactcacctccctagccctggcccagccccctgcaggggggtgttctacagccagcattgcccctctgtgccccattcctgctgtgagcagggccgtccgggcttcctgtggattggcggaatgtttagaagcagaacaagccattcctattacctccccaggaggcaagtgggcgcagcaccagggaaatgtatctccacaggttctggggcctagttactgtctgtaaatccaatacttgcctgaaagctgtgaagaagaaaaaaacccctggcctttgggccaggaggaatctgttactcgaatccacccaggaactccctggcagtggattgtgggaggctcttgcttacactaatcagcgtgacctggacctgctgggcaggatcccagggtgaacctgcctgtgaactctgaagtcactagtccagctgggtgcaggaggacttcaagtgtgtggacgaaagaaagactgatggctcaaagggtgtgaaaaagtcagtgatgctccccctttctactccagatcctgtccttcctggagcaaggttgagggagtaggttttgaagagtcccttaatatgtggtggaacaggccaggagttagagaaagggctggcttctgtttacctgctcactggctctagccagcccagggaccacatcaatgtgagaggaagcctccacctcatgttttcaaacttaatactggagactggctgagaacttacggacaacatcctttctgtctgaaacaaacagtcacaagcaaaggaagaggctgggggactagaaagaggccctgccctctagaaagctcagatcttggcttctgttactcatactcgggtgggctccttagtcagatgcctaaaacattttgcctaaagctcgatgggttctggaggacagtgtggcttgtcacaggcctagagtctgagggaggggagtgggagtctcagcaatctcttggtcttggcttcatggcaaccactgctcacccttcaacatgcctggtttaggcagcagcttgggctgggaagaggtggtggcagagtctcaaagctgagatgctgagagagatagctccctgagctgggccatctgacttctacctcccatgtttgctctcccaactcattagctcctgggcagcatcctcctgagccacatgtgcaggtactggaaaacctccatcttggctcccagagctctaggaactcttcatcacaactagatttgcctcttctaagtgtctatgagcttgcaccatatttaataaattgggaatgggtttggggtattaatgcaatgtgtggtggttgtattggagcagggggaattgataaaggagagtggttgctgttaatattatcttatctattgggtggtatgtgaaatattgtacatagacctgatgagttgtgggaccagatgtcatctctggtcagagtttacttgctatatagactgtacttatgtgtgaagtttgcaagcttgctttagggctgagccctggactcccagcagcagcacagttcagcattgtgtggctggttgtttcctggctgtccccagcaagtgtaggagtggtgggcctgaactgggccattgatcagactaaataaattaagcagttaacataactggcaa

SEQ ID NO: 4364 - DNA, 3539 bp, Homo Sapiens
  NM_016817
caagagttggtaagctcgctgcagtgggtggagagaggcctctagacttcagtttcagtttcctggctctgggcagcagcaagaattcctctgcctcccatcctaccattcactgtcttgccggcagccagctgagagcaatgggaaatggggagtcccagctgtcctcggtgcctgctcagaagctgggttggtttatccaggaatacctgaagccctacgaagaatgtcagacactgatcgacgagatggtgaacaccatctgtgacgtcctgcaggaacccgaacagttccccctggtgcagggagtggccataggtggctcctatggacggaaaacagtcttaagaggcaactccgatggtacccttgtcctcttcttcagtgacttaaaacaattccaggatcagaagagaagccaacgtgacatcctcgataaaactggggataagctgaagttctgtctgttcacgaagtggttgaaaaacaatttcgagatccagaagtcccttgatgggttcaccatccaggtgttcacaaaaaatcagagaatctctttcgaggtgctggccgccttcaacgctctgagcttaaatgataatcccagcccctggatctatcgagagctcaaaagatccttggataagacaaatgccagtcctggtgagtttgcagtctgcttcactgaactccagcagaagttttttgacaaccgtcctggaaaactaaaggatttgatcctcttgataaagcactggcatcaacagtgccagaaaaaaatcaaggatttaccctcgctgtctccgtatgccctggagctgcttacggtgtatgcctgggaacaggggtgcagaaaagacaactttgacattgctgaaggcgtcagaaccgtactggagctgatcaaatgccaggagaagctgtgtatctattggatggtcaactacaactttgaagatgagaccatcaggaacatcctgctgcaccagctccaatcagcgaggccagtaatcttggatccagttgacccaaccaataatgtgagtggagataaaatatgctggcaatggctgaaaaaagaagctcaaacctggttgacttctcccaacctggataatgagttacctgcaccatcttggaatgttctgcctgcaccactcttcacgaccccaggccaccttctggataagttcatcaaggagtttctccagcccaacaaatgcttcctagagcagattgacagtgctgttaacatcatccgtacattccttaaagaaaactgcttccgacaatcaacagccaagatccagattgtccggggaggatcaaccgccaaaggcacagctctgaagactggctctgatgccgatctcgtcgtgttccataactcacttaaaagctacacctcccaaaaaaacgagcggcacaaaatcgtcaaggaaatccatgaacagctgaaagccttttggagggagaaggaggaggagcttgaagtcagctttgagcctcccaagtggaaggctcccagggtgctgagcttctctctgaaatccaaagtcctcaacgaaagtgtcagctttgatgtgcttcctgcctttaatgcactgggtcagctgagttctggctccacacccagccccgaggtttatgcagggctcattgatctgtataaatcctcggacctcccgggaggagagttttctacctgtttcacagtcctgcagcgaaacttcattcgctcccggcccaccaaactaaaggatttaattcgcctggtgaagcactggtacaaagagtgtgaaaggaaactgaagccaaaggggtctttgcccccaaagtatgccttggagctgctcaccatctatgcctgggagcaggggagtggagtgccggattttgacactgcagaaggtttccggacagtcctggagctggtcacacaatatcagcagctctgcatcttctggaaggtcaattacaactttgaagatgagaccgtgaggaagtttctactgagccagttgcagaaaaccaggcctgtgatcttggacccagccgaacccacaggtgacgtgggtggaggggaccgttggtgttggcatcttctggcaaaagaagcaaaggaatggttatcctctccctgcttcaaggatgggactggaaacccaataccaccttggaaagtgccgacaatgcagacaccaggaagttgtggagctaggatccatcctattgtcaatgagatgttctcatccagaagccatagaatcctgaataataattctaaaagaaacttctagagatcatctggcaatcgcttttaaagactcggctcaccgtgagaaagagtcactcacatccattcttcccttgatggtccctattcctccttcccttgcttcttggacttcttgaaatcaatcaagactgcaaaccctttcataaagtcttgccttgctgaactccctctctgcaggcagcctgcctttaaaaatagttgctgtcatccactttatgtgcatcttatttctgtcaacttgtattttttttcttgtatttttccaattagctcctcctttttccttccagtctaaaaaaggaatcctctgtgtcttcaaagcaaagctctttactttccccttggttctcataactctgtgatcttgctctcggtgcttccaactcatccacgtcctgtctgtttcctctgtatacaaaaccctttctgcccctgctgacacagacatcctctatgccagcagccagccaaccctttcattagaacttcaagctctccaaaggctcagattataactgttgtcatatttatatgaggctgttgtcttttccttctgagcctgcctttctcccccccacccaggagtatcctcttgccaaatcaaaagactttttccttgggctttagccttaaagatacttgaaggtctaggtgctttaacctcacataccctcacttaaacttttatcactgttgcatataccagttgtgatacaataaagaatgtatctggattttgtgcctagttcctagcacacagcttcaaaaattctagagtttcctgataggagtgtcttttgtattcataacaagcccttttcacccatgcctgggtttatgctaacaaggttacccatggtgggcccttagtttcaaggaaggagttggccaagccagaaagaccaagcatgtggttaaagcattggaattttcagccccatcccacccccaatctccaaggaggtgatggggctggaaattgagttcaattttaacatggccagtgatttaagcaatgctgcctatgtaaagaaaccccaataaaaactctggacagtgaggcttggggagcttcctgattggcagacattccaatgtactaggaaggtagcgcatcttgattccacagggacaaaggctcctgagctctgggcccttccagtgcttgccaccctacatactctttgtctggctcttcatttgtattctttataataaaatggtgattgtaagtagagca

SEQ ID NO: 4365 - DNA, 2982 bp, Homo Sapiens
  NM_016818
cgcaccccgcgcagcggctgagccgggagccagcgcagcctcggccccgcagctcaagcctcgtccccgccgccgccgccgccgccgccgccgccgcccccggggcatggcctgtctgatggccgctttctcggtcggcaccgccatgaatgccagcagttactctgcagagatgacggagcccaagtcggtgtgtgtctcggtggatgaggtggtgtccagcaacatggaggccactgagacggacctgctgaatggacatctgaaaaaagtagataataacctcacggaagcccagcgcttctcctccttgcctcggagggcagctgtgaacattgaattcagggacctttcctattcggttcctgaaggaccctggtggaggaagaaaggatacaagaccctcctgaaaggaatttccgggaagttcaatagtggtgagttggtggccattatgggtccttccggggccgggaagtccacgctgatgaacatcctggctggatacagggagacgggcatgaagggggccgtcctcatcaacggcctgccccgggacctgcgctgcttccggaaggtgtcctgctacatcatgcaggatgacatgctgctgccgcatctcactgtgcaggaggccatgatggtgtcggcacatctgaagcttcaggagaaggatgaaggcagaagggaaatggtcaaggagatactgacagcgctgggcttgctgtcttgcgccaacacgcggaccgggagcctgtcaggtggtcagcgcaagcgcctggccatcgcgctggagctggtgaacaaccctccagtcatgttcttcgatgagcccaccagcggcctggacagcgcctcctgcttccaggtggtctcgctgatgaaagggctcgctcaagggggtcgctccatcatttgcaccatccaccagcccagcgccaaactcttcgagctgttcgaccagctttacgtcctgagtcaaggacaatgtgtgtaccggggaaaagtctgcaatcttgtgccatatttgagggatttgggtctgaactgcccaacctaccacaacccagcagattttgtcatggaggttgcatccggcgagtacggtgatcagaacagtcggctggtgagagcggttcgggagggcatgtgtgactcagaccacaagagagacctcgggggtgatgccgaggtgaacccttttctttggcaccggccctctgaagaggactcctcgtccatggaaggctgccacagcttctctgccagctgcctcacgcagttctgcatcctcttcaagaggaccttcctcagcatcatgagggactcggtcctgacacacctgcgcatcacctcgcacattgggatcggcctcctcattggcctgctgtacttggggatcgggaacgaagccaagaaggtcttgagcaactccggcttcctcttcttctccatgctgttcctcatgttcgcggccctcatgcctactgttctgacatttcccctggagatgggagtctttcttcgggaacacctgaactactggtacagcctgaaggcctactacctggccaagaccatggcagacgtgccctttcagatcatgttcccagtggcctactgcagcatcgtgtactggatgacgtcgcagccgtccgacgccgtgcgctttgtgctgtttgccgcgctgggcaccatgacctccctggtggcacagtccctgggcctgctgatcggagccgcctccacgtccctgcaggtggccactttcgtgggcccagtgacagccatcccggtgctcctgttctcggggttcttcgtcagcttcgacaccatccccacgtacctacagtggatgtcctacatctcctatgtcaggtatgggttcgaaggggtcatcctctccatctatggcttagaccgggaagatctgcactgtgacatcgacgagacgtgccacttccagaagtcggaggccatcctgcgggagctggacgtggaaaatgccaagctgtacctggacttcatcgtactcgggattttcttcatctccctccgcctcattgcctattttgtcctcaggtacaaaatccgggcagagaggtaaaacacctgaatgccaggaaacaggaagattagacactgtggccgagggcacgtctagaatcgaggaggcaagcctgtgcccgaccgacgacacagagactcttctgatccaacccctagaaccgcgttgggtttgtgggtgtctcgtgctcagccactctgcccagctgggttggatcttctctccattcccctttctagctttaactaggaagatgtaggcagattggtggtttttttttttttaacatacagaattttaaataccacaactggggcagaatttaaagctgcaacacagctggtgatgagaggcttcctcagtccagtcgctccttagcaccaggcaccgtgggtcctggatggggaactgcaagcagcctctcagctgatggctgcacagtcagatgtctggtggcagagagtccgagcatggagcgattccattttatgactgttgtttttcacattttcatctttctaaggtgtgtctcttttccaatgagaagtcatttttgcaagccaaaagtcgatcaatcgcattcattttaagaaattatacctttttagtacttgctgaagaatgattcagggtaaatcacatactttgtttagagaggcgaggggtttaaccgagtcacccagctggtctcatacatagacagcacttgtgaaggattgaatgcaggttccaggtggagggaagacgtggacaccatctccactgagccatgcagacatttttaaaagctatacaaaaaattgtgagaagacattggccaactctttcaaagtctttctttttccacgtgcttcttattttaagcgaaatatattgtttgtttcttcctaaaaaaaaaaaaaaaaaaaaaaaaa

SEQ ID NO: 4366 - DNA, 2158 bp, Homo Sapiens
  NM_016821
ctacttccggtggtgctgtggtctgcccctggagaacccagaagaacacagctgtgcgcgcccacaggctctgggggcgggagaagataagtcgcaaggagggggcgggacctacacctcaggaaagccggagaattggggcacgaagcggggctttgatgacccgcaaagggcgaggcatgcaggaggtggaggaattaagtgaaacagggaaggttgttaaacagcaccgtgtgggcgaggccttaagggtcgtggtccttgtctgggcggggtctttgggcgtcgacgaggcctggttctgggtaggcggggctactacggggcggtgcctgctgtggaaatgcctgcccgcgcgcttctgcccaggcgcatggggcatcgtactctagcctccactcctgccctgtgggcctccatcccgtgccctcgctctgagctgcgcctggacctggttctgccttctggacaatctttccggtggagggagcaaagtcctgcacactggagtggtgtactagcggatcaagtatggacactgactcagactgaggagcagctccactgcactgtgtaccgaggagacaagagccaggctagcaggcccacaccagacgagctggaggccgtgcgcaagtacttccagctagatgttaccctggctcaactgtatcaccactggggttccgtggactcccacttccaagaggtggctcagaaattccaaggtgtgcgactgctgcgacaagaccccatcgaatgccttttctcttttatctgttcctccaacaacaacatcgcccgcatcactggcatggtggagcggctgtgccaggcttttggacctcggctcatccagcttgatgatgtcacctaccatggcttccccagcctgcaggccctggctgggccagaggtggaggctcatctcaggaagctgggcctgggctatcgtgcccgttacgtgagtgccagtgcccgagccatcctggaagaacagggcgggctagcctggctgcagcagctacgagagtcctcatatgaggaggcccacaaggccctctgcatcctgcctggagtgggcaccaaggtggctgactgcatctgcctgatggccctagacaagccccaggctgtgcccgtggatgtccatatgtggcacattgcccaacgtgactacagctggcaccctaccacgtcccaggcgaagggaccgagcccccagaccaacaaggaactgggaaactttttccggagcctgtggggaccttatgctggctgggcccaagcgggcctccttggcaatgcatttgatggccaccagcttctgcgtcctcttatcttctgccaggatcacctccgagaaggcccccctatcgggagaggggattcacaaggtgaagaactggaaccccagcttccctccagcctctcctccattccctatgggttctgtgaccactgctggaccaaggacgtggatgaccctcccctagtcactcatccatcccctggctccagagatggtcacatgacccaggcctggccagtcaaagtagtctctcccctggccacagtaattggtcatgtgatgcaagccagcttactagcactttgagaatgagtctcctgttgagctggtaggatgtaagcctggagctaatggcgatcatctttgccaccacctggggagagcctgcttgggaatgaaattaacacaaaggaagtccaacctgagaaatggccaaatatatttcctgataacattatgtggccctctggatccagccatgcctgaggtctacccctgggcttttggattatgtgtacagttggttcatccctttttctgctaattcgagtcatggctaatttaacaccctttagaaccttaaagaaccatcagcatcacccgggaacttttttagaaatgcaaaatctctactgctttggatcctgggtcaaaaaaaagaaaaaaaaaagaaatgcaaaactttaggccctgccccagatttactaaatcaatctgcagtttaacaaaatcctcaggtgatttgtatgctcattgaactttaagaagcagtgttttagaacaggttcttaaaaaggaacaaataaactcatttaactaaagttaactgattaaagaggaaaaaaa

SEQ ID NO: 4367 - DNA, 4454 bp, Homo Sapiens
  NM_016824
gacgctcgaggggcgctcggctagtcccgccagagcgcgagccgccagcccgtaacggtcgccagtgtgaggggcgggagggaaagaagaggggtttaaattagattttttaaaacacagagcaagcgccagaggcgtcggcatcccaggtgtcgccgcttcctgctgcacagggctcggcgtacaggtccctccctcctcaagccccctccccttctcccgccctaccctctggggctctgcggcgcttaagaggcggccgcagcggcggatccggcggctgctgcagcccgggcggctgccgagaaggagggaggggaaacacaaagccggctacgcgctgcgagataacaagagtaatccacagacttaaaacatgagctcagatgccagccaaggcgtgattaccactcctcctcctcccagcatgcctcacaaagagagatattttgaccgcatcaatgaaaatgacccagaatacattagggagaggaacatgtctcctgatctacgacaagacttcaacatgatggagcagaggaaacgagttactcagatcctgcaaagtcctgcctttcgggaagacttggaatgccttattcaagaacagatgaagaaaggccacaacccaactggattactagcattacagcagattgcagattacatcatggccaattctttctcgggtttttcttcacctcctctcagtcttggcatggtcacacctatcaatgaccttcctggtgcagatacatcctcatatgtgaagggagaaaaacttactcgctgtaaacttgccagcctgtacagacttgtagacttgtttggatgggcacacctggcaaatacctatatctcagtaagaataagtaaggagcaagaccacattataataattcccagaggcctatctttttctgaagctacagcctccaatttggtgaaagtcaatataataggagaagtggttgaccagggaagtaccaatttgaaaattgaccatacaggattcagtccccatgctgcaatctattcaacacgtcctgatgttaagtgtgtgatacacatccatacccttgcaacagcagctgtatcctccatgaaatgtgggatccttccaatttctcaagagtctcttcttctgggagatgttgcctattatgactaccaagggtcacttgaagaacaggaggagagaattcaactgcagaaggttctgggaccaagttgtaaggtgctggtactcaggaatcatggtgtggttgcacttggagaaacattagaggaggcttttcattatatttttaatgtgcaactagcctgtgagattcaggtgcaggccctagcaggtgcaggtggagtagacaatctccatgtactggactttcagaagtataaagctttcacttacactgtagcagcgtctggtggaggaggtgtgaatatgggttcccatcaaaaatggaaggttggcgaaattgagtttgaagggcttatgaggactctggacaacttggggtatagaacaggctatgcttacaggcatcctctcattcgagagaagcctaggcacaagagtgatgtggaaatcccagcaactgtgactgctttttcctttgaagacgatacagtgccactctctcctctcaaatacatggcacagaggcaacagcgtgaaaaaacaagatggctgaactcaccaaatacttacatgaaagtgaatgtgcctgaggagtctcggaacggagaaaccagtccccgaaccaaaatcacgtggatgaaagcagaagactcatctaaagttagtggtggaacacctatcaaaattgaagatccaaatcagtttgttcctttaaacacaaacccgaatgaggtactagaaaagagaaataagattcgggaacaaaatcgatatgacttgaaaacagcaggaccacaatctcagttgcttgctggaattgttgtggataagccaccttctactatgcaatttgaagatgatgatcatggcccaccagctcctcctaacccatttagtcatctcacagaaggagaacttgaagagtataagaggacaatcgaacgtaaacaacaaggcctagaagatgctgagcaggaattactctcagatgacgcttcatctgtttcacaaattcagtctcaaactcagtcaccgcaaaatgtccctgaaaaattagaagaaaaccatgagctgttttccaagagcttcatctccatggaagtgcctgtcatggtagtaaatggcaaggatgatatgcatgatgttgaagatgagcttgctaagcgagtgagtaggttaagcacaagtacaaccatagaaaacatcgagattactattaagtctccagagaaaatcgaagaagtcctgtcacctgaaggctccccttcaaaatcgccatccaagaaaaagaagaaattccgcactccttcttttctgaaaaagaacaaaaaaaaggagaaagttgaggcctaaataaagtctttttataattattattataacaatgtgacattgcacatctaaataccacatttaagttgatcattaatatgcaatggtagatcagattgggggatgtagcaaactggactttaagaactggaaagaggttttacaaaagaaaaactttcagattcatctctcattttatatgtccagaaatggctttgaattttaagcaattactagttttaattagctctgccctcatgaagtattattataattcaccataaacagctatctgtctgaattacttcaggccttctccataatatctgttagaaagaaattgccagtgagcaagtgagaatttttatttctcaatacctgcttcacttgataatcatattataattttttatcatgattattgactatatttttggagtcccattgtttcagtgggcattaacagaatgctttaaaaacttctaagacaagaatctatagcattagtatacactggcacataattttttaaaaagttttaagaaaagattcatttggaattttattcacagtataaaatttcctcacctgaagtaactttgtttgccaaaaaagttgttttaataaactataatttttgaaaacttccttttttattagtttagaaagccccttatttttcaacaaaggggattttgtacacataacatgggttatttagtttaactctggcaaaaaaaaaaaaaaaaattttgtatgttgatgtttgtataccgttcagtataaaagtgtcctaagcatattagccaatcttttcacagtagagcatacttaaggctgcttggtactgagtatacttaaatataactccagaatccagggacttggtgttaaaacaggattagagcatgtaaaggtacatctagattcatatttgaatcttaaactgtatttttctcttagtattgctaatgagtaaagaaaagtctcataaggtagccaaatgaaaaagaatgaaagggaaagtgaaaaattaaggggacaaaagatgggatgtgaaaagaagaattctagtttgatggtgactcatattcacgataggatacaaagtgtgatttgttggaaacatgtcccaaatttctaaaattctgcttctctgccaaaagcaatgtctttcttggttgatatttgagttttaaaagggtcaaatctttctaattttttgtatctttagagggcagcactagaagaaatcagcaggtctaatcccaccagtaagaaaactaccacttcttgatttttacagatttaaaaaaatcttttcagtgacctttctttttaatgtaaatacaaatttaaacctaggcttaatataggcgtttcccctttcacccaagtgatgtcacagttcgatgcaaaatcaatgatccagaatgatcgtgggtaaaaataactcaaagtgtttcttaagggtgagttggcatgcaaaaaattacattgattacagtgtgttttggagctggctctgtttgtgtgcatatgataatgcagagttgagccagagcctggaaatgtcattctagatctcactaactactggaatcagtgttttaatctcttggtggaaactttcagttgcttaactctctattggaagatttttttaatgttctacatcatttatgttgtattacaatgtatgtagaaatagtaacctgtgaactatgcttttccataactttttaaaaatatatatatctaaatgaatgcaatgtgcataaatattttttaaacataacagtgaactattgcaccttttgctaatgcctctatttacttgctttggcataaagaatgagccaatgaacctctgtgtcctgtggaaaaatgtataaatgttatctgatattgctcttagatgtaatgctaattaatgttaaatcacaaataaacagtattttaaatataaaaaaaaaaa

SEQ ID NO: 4368 - DNA, 6203 bp, Homo Sapiens
  NM_016831
ggaaaagctcctcggagatgagcgtgaccccctggctcgtggtggccgcctgttctcactaacgccatggcggggaccggagtgagaaaccggtgtctgtcactgactgcaaagtgagcgagaagcaggctgcgggccgtcccagcacgacgtggagccccgcggagacctcgagatgccccgcggggaagctcctggccccgggagacggggggctaaggacgaggccctgggcgaagaatcgggggagcggtggagccccgagttccatctgcagaggaaattggcggacagcagccacagtgaacagcaagatcgaaacagagtttctgaagaacttatcatggttgtccaagaaatgaaaaaatacttcccctcggagagacgcaataaaccaagcactctagatgccctcaactatgctctccgctgtgtccacagcgttcaagcaaacagtgagtttttccagattctcagtcagaatggagcacctcaggcagatgtgagcatgtacagtcttgaggagctggccactatcgcttcagaacacacttccaaaaacacagatacctttgtggcagtattttcatttctgtctggaaggttagtgcacatttctgaacaggctgctttgatcctgaatcgtaagaaagatgtcctggcgtcttctcactttgttgacctgcttgcacctcaagacatgagggtattctacgcgcacactgccagagctcagcttcctttctggaacaactggacccaaagagctgcacggtatgaatgtgctccggtgaaaccttttttctgcaggatccgtggaggtgaagacagaaagcaagagaagtgtcactccccattccggatcatcccctatctgattcatgtacatcaccctgcccagccagaattggaatcggaaccttgctgtctcactgtggttgaaaagattcactctggttatgaagctcctcggatcccagtgaataaaagaatcttcaccaccacacacaccccagggtgtgtttttcttgaagtagatgaaaaagcagtgcctttgctgggttacctacctcaggacctgattggaacatcgatcctaagctacctgcaccctgaagatcgttctctgatggttgccatacaccaaaaagttttgaagtatgcagggcatcctccctttgaacattctcccattcgattttgtactcaaaacggagactacatcatactggattccagttggtccagctttgtgaatccctggagccggaagatttctttcatcattggtcggcataaagttcgaacgagcccactaaatgaggatgtttttgctaccaaaattaaaaagatgaacgataatgacaaagacataacagaattacaagaacaaatttacaaacttctcttacagccagttcacgtgagcgtgtccagcggctacgggagcctggggagcagcgggtcgcaggagcagcttgtcagcatcgcctcctccagtgaggccagtgggcaccgtgtggaggagacgaaggcggagcagatgaccttgcagcaggtctatgccagtgtgaacaaaattaaaaatctgggtcagcagctctacattgagtcaatgaccaaatcatcattcaagccagtgacggggacacgcacagaaccgaatggtggtggtgaatgtaagacctttacttccttccaccaaacactgaaaaacaatagtgtgtacactgagccctgtgaggatttgaggaacgatgagcacagcccatcctatcaacagatcaactgtatcgacagtgtcatcagatacctgaagagctacaacattccagctttgaaaagaaagtgtatctcctgtacaaatacaacttcttcctcctcagaagaagacaaacagaaccacaaggcagatgatgtccaagccttacaagctggtttgcaaatcccagccatacctaaatcagaaatgccaacaaatggacggtccatagacacaggaggaggagctccacagatcctgtccacggcgatgctgagcttggggtcgggcataagccaatgcggttacagcagcaccattgtccatgtcccacccccagagacagccagggatgctaccctcttctgtgagccctggaccctgaacatgcagccagcccctttgacctcggaagaatttaaacacgtggggctcacagcggctgttctgtcagcgcacacccagaaggaagagcagaattatgttgataaattccgagaaaagatcctgtcatcaccctacagctcctatcttcagcaagaaagcaggagcaaagctaaatattcatattttcaaggagattctacttccaagcagacgcggtcggccggctgcaggaaagggaagcacaagcggaagaagctgccggagccgccagacagcagcagctcgaacaccggctctggtccccgcaggggagcgcatcagaacgcacagccctgctgcccctccgcggcctcctctccgcacacctcgagcccgaccttcccacctgccgccatggtgcccagccaggccccttacctcgtcccagcttttcccctcccagccgcgacctcacccggaagagaatacgcagcccccggaactgcaccggaaggcctgcatgggctgcccttgtccgagggcttgcagccttacccagctttcccttttccttacttggatacttttatgaccgttttcctgcctgacccccctgtctgtcctctgttgtcgccatcgtttttgccatgtccattcctgggggcgacagcctcttctgcgatatcaccctcaatgtcgtcagcaatgagtccaactctggacccacccccttcagtcaccagccaaaggagagaggaggaaaagtgggaggcacaaagcgaggggcacccgttcattacttcgagaagcagctcacccttgcagttaaacttacttcaggaagagatgcccagaccctctgaatctccagatcagatgagaaggaacacgtgcccacaaactgagtattgtgttacaggcaacaatggcagtgagagcagtcctgctactaccggtgcactgtccacggggtcacctcccagggagaatccatcccatcctactgccagcgctctgtccacaggatcgcctcccatgaagaatccatcccatcctactgccagcgctctgtccacaggatcgcctcccatgaagaatccatcccatcctactgccagcacactgtccatgggattgcctcccagcaggactccatcccatcctactgccactgttctgtccacggggtcacctcccagcgaatccccatccagaactggttcagcagcatcaggaagcagcgacagcagtatataccttactagtagtgtttattcttctaaaatctcccaaaatgggcagcaatctcaggacgtacagaaaaaagaaacatttcctaatgtcgccgaagagcccatctggagaatgatacggcagacacctgagcgcattctcatgacataccaggtacctgagagggttaaagaagttgtactaaaagaagacctggaaaagctagaaagtatgaggcagcagcagccccagttttctcatgggcaaaaggaggagctggctaaggtgtataattggattcaaagccagactgtcactcaagaaatcgacattcaagcctgtgtcacttgtgaaaatgaagattcagctgatggtgcggccacatcctgtggtcaggttctggtagaagacagctgttgagtgactgtgaggatgaaccttcataccctttccaagacgtgttacacagacagacctttttaagtcctggacttttaaatgaccatgaagttatcattgaatgttaagattttttcttcttgattttttaatacacgtaatctttttgaagcagacattgtatacagaatcttacttctctttgttcctgatatattaaaatggccagttaggctctttttgtagttgaattgtcttctaaagagattggatggcctctaaagaggtatgtgtatctttatttcagatgtcacccagagtaaattataattagaagtatagctagaatgagccccaaaccttagcctcatttattttgttctgttacataagtcattttccccttagagtgcttgaagaaatgccacctacaggttgtgtacttttcataatggtttccatgaatgtagtacgttcatacaggcttcattcaacctggcgttcccctccataattaagatgaaacattccggttttctcacaacacattagcacatactgtccattagcatatctgggataaccaggttttgggggttgagttttggccttcatccttgtagatccctttcctattgatttcccaccttccagtgaaattctgaaagtcttatcttaaaaatcgatccgcttaccatgggcctattcttgtaagtttcagttagcatttgcatgtgtaatattaaaatgaaagagcttcttacccagtgctgttgcccttttgagtatttttgtttttaaaataatgattgtaaaatgttttacaagtaatgtaaaagctagtatcattcttacatacttctgtgtttaaattttcattcttaccaaaacagttaactctttctttccaatcaatttatacaaaagaggtcgctccagccctaccacaggtctgactggcactgccttttgtttgcccttgaacagggcagtgttgtggggactgcaaaagagaaaacgtccaggcgagcccagttgtcctcgcccacagggtcctgcaggctccatcagtcaccgctttctatggcgtttgtagttgtgtcttttaagaagtgagtgtgattgtttacttgataaatcagctcactctctggtgctttttagagaagtccctgattccttcttaaacttggaatgatagatgaaattcacacccctgcagatcagaaaaaacaaatagaagaaaatgagggttacagtaacctgttgtctttatataacttgcaacaaactaatttatttttttttcctttttttgtttttggttttttatggttttttaaggaaaatacttttctcctttgaagttttacagctttttgtaaatgcgtcctgataatgattaggaaaatcgaccttttcatccatgatgaccatcctcatagctcagatctcctttcaaagtagtggctttctggatggtaattccatcttaaggtgtcagaactattttcaaatgctgcctttgacagttcttggaattttctgatattaagcagttccatgcaaatattcgtgttttataaatagctctcatagtctgctccatcttgatagttaagtgatttctgaagcgtttgtgtgtgtgttgatcaggttgtgtgatatttttgcttgatagagaatcaaatttgaaacaattaaccagccagtagattgtctgtcagtgaccttctgtagtaataaagtttttgccactgtaaataaaaacagtatccgtagctatcaggatcattgcgcactcatatatgctaagccttctgttctctaatagaagcctttcttttccattgtttctggatatttgtattatccaaatgtgcttatttctttgccttagcacacgttttatggagtacttgttatactaggtttgatttgaaactggtgcttgtcgcagaactgtcagagcatgaggagcgctcctcctgtgggtggacgcattcacgcactcccaggttgcacctgctgctggcggtgagcagggggttcagcagcttgaccgatgccccccgagggggctctccccagcttaaactttgttgtttaaatttgttaactttttatattaatgactattgaaagtggtaataaaaatttatattataggcttcaatgttttcatgaatgttacccaaaaagctgtgttttctttggtcagaggtcaaaatttatgaaaaacaaaatgctgtatgaatggaaatcattttgcaattgagtgacacttcattgtaattcacagtgtaaatttaatccaaactgaaattttgtttcaactgaatttgtaattaactctgaatttgtttttaatcattagtaatatttcagttgggtatctttttaagtaaaaacaacaaataaactctgtacatgtaaaacgtga

SEQ ID NO: 4369 - DNA, 5723 bp, Homo Sapiens
  NM_016929
gctgacagtcgcggatcctgtgacacctccgggcagcccggcacttgttgctcccacgacctgttgtcattcccttaacccggctttccccgtggccccccgcctcctcccggcttcgctccttttcatgtgagcatctgggacactgatctctcagaccccgctgctcgggctggagaatagatggttttgtgaaaaattaaacaccgccctgaagaggagccccgctgggcagcggcaggagcgcagagtgctggcccaggtgctgcagaggtggcgcctccccggcccgggacggtagccccgggcgccaacggcatgacagactcggcgacagctaacggggacgacagggaccccgagatcgagctctttgtgaaggctggaatcgatggagaaagcatcggcaactgtcctttctctcagcgcctcttcatgatcctctggctgaaaggagtcgtgttcaatgtcaccactgtggatctgaaaagaaagccagctgacctgcacaacctagcccccggcacgcacccgcccttcctgaccttcaacggggacgtgaagacagacgtcaataagatcgaggagttcctggaggagaccttgacccctgaaaagtaccccaaactggctgcaaaacaccgggaatccaacacagcgggcatcgacatcttttccaagttttctgcctacatcaaaaataccaagcagcagaacaatgctgctcttgaaagaggcctaaccaaggctctaaagaaattggatgactacctgaacacccctctaccagaggagattgacgccaacacttgtggggaagacaaggggtcccggcgcaagttcctggatggggatgagctgaccctggctgactgcaatctgttgcccaagctccatgtggtcaagattgtggccaagaaataccgcaactatgatatcccggctgagatgacaggcctgtggcggtacctcaagaacgcctatgcccgtgatgagttcaccaacacctgtgcagctgacagtgagatcgagttggcctacgctgatgtcgccaaacgcctcagccgatcctgagcacagccattttgccccatccccgctgcagaaggactcaaccactcccctaagactccagcttcatagactcctctgtatcactgccttgaggcgcactttttataatcaagcctcatcttgctggtatcatgggaactccagcctgctatctttcatgaaggtcagcaccatccctggcctcctcacataggaatctagcagaaatgatagacacagtccacctttcggccggccagcctgatctgggctcagcatgtttggggtcagtcagtgttggagagcccacatatgggattgccactagcttcttctgccaatatcaaaataccttctcagatgctttagaaacatgcaacaccaactccttttctaccctcctctccgtccatacctacaaggccaaggacaaacgccatcttcatccttcttagaaagagatctattaccccattaggggagacagagagagtgaatggaggagtaccgagctggctatggacttgggtgtctggcaaacacagcttcagtctcactacttctgacactctggttattgggcactaagggccagactggaaagtcacttgagacacattctcagtttgttgcagtgccaggaatgctgcgctgctgctgctgcgcacctggcccatgctgtccctggcttccatgccgtccaggccctgccagaaaaggaaattggcatgcaattctaaactgcagtgactgggatgggaggggaggggagcagtgttgatgccaaaatacccacggggtctaccagccatggggtttgcttgcttaggagtagttgtttcagaggtgattacaggcctgggtttgactgtgcttaccaatgagtggtttttgagctatgagaaagtggatgggagtgggaggaggagagatgggtgaagacaaaagagttctttatgagcctcgatgttccctggtaaacttttaaaaaggccttctctcatgatctaagtcttggactggtggcatcatgtaactgctaaccttacagtaaaaacccaagaatgggtcaaaaatgtcttcccagtttctccaagctgcttctggaatgcaggtctgtcggctgggtgctctccagcagctgctcctgcctgattcaactgtagcctgtaatgggtaaaagccacatttaggaggtggtctgatcatagaacaccttaggaagaaagtccatgagactttctgactaggaaaccatgtggtttgaacttgaagaaaaatgtagacccatctgggttaattttcctacaatctgactcaactgccaggtgaaaaaaaaaaggaaaaatttttaagctaatatttcactcttttgtcattctccttaagtttcatctcctaaaaagcttacccagcctgagcttggggacctgtgcagaggaaactaagaaaaatgcactcatcaactccttctcccagtgaacgcccggtgagaaaatccatttgccacaggcccttaccttcaacaatcccccttctatagtgttcgctggtaaagggtgaggctcccaagtgctggaaagcccctggacttggctcatttctcagcaagggcaggatagcacgggtcctttccatagaaatatcaacaaattctaacccaagcaatccctggacctacctgcctccagggatctctgaagaaaaaaagtaacccattgatcaaatcagaggagaggaagcaggaggtctcctagagcccattgaggaagaggaactttctcagtaggacactttataagcctgagaaagctttgaaaaggcggaatgagttgattcatttccacctcaaaaggaacctttccaggtccccctggaaattgtgccctggagatgtttaacaaggagaactggtgaggaaagagtccttttttactgtagggaaaagccccaaactggcctcctgggggatgagggctgaaatgatcccgaaggccttttaattagtgtgaaatcctgctgtactcagaaatccttccccgaatttacagcacaggcaggatgacctaagaggcagtttacttccctgagacccacagttgggctgttctggaaacacatctgtgaatcatagccaattgccacagagaaaacagaaccaagcctccggtgaggccactccaccccagagaagtctgcagaattccaaggactcggattggatgttcagaattcagcaactggaaagtccttaaaaacaaacaggccaaaccaaatcaatattgctgtttctagatgtcccttctgtggttgagctagttttacagagataaatatattaagacaaggaggtgggggtgttatatgatcaatgatagccatttgaaagagagggaggagtacagaaggaaggcacttctgggtacttaattcagaaatttctttatatttcagcactggattatcatataatgcaagtgactatggactaagagttagttatggtgtcttatgactagatttattatggtatattaaagtaacaataatattaatattaccttcctttttttttttgtttcaaaagagatctttctccagatgcttcagcctgtctggccttcttatcatatgtgcagcacatcatgtctcagcaacagtgtggtgaggtccttaggtgtcccaagaacaactcagggagcacgggagggtctgcagttgggaccccacaactatacagctatagggtaggaggcttccttttcattggtcctgaatgaatacaaatcgctcagaaagcattttggtggcacagaaaggggatgtatttgtgttgagatcttattttattttgtatttatttatcttctttgacttgcacagcactattgggggtgggggaagcagggtagtgggagacgaaggcagaagcaagagtcaaactcagaatgactgagttgaattcactgtctagtcagcaatgcctgcttctgagtttggcccagagagaaggtattgagtaagattttaataactgtaaaaagtaagctggataagtaaaatcatgatggatccaaagcacagtttcttcatctcctgataaagaaagtcaaatgcttgataaattcagagtcacagatgtgagcatagctatattcttttaaacgagaggtagagtgacctagcactaagcaaatgagctgaaatgtcggaaacagagtccatcagcttatttggccacacgatcccaaactagttttatcttgggaaatggccctgtcctcagcattcccttcttgtgctggtggggccagtgaagtcttgatcttatcagaaaaaggccacaccaagtgcgagttttcccaggctgactttccaggcccttatcaaatgaaacaacagaagctcttcacagttctgtgccccatggccactccacagacagacaataccaagcatcttagaactgtcataagataggtcatgcctgaaatagatcttgaccatatgagagtcccagaaatcagcaaggcctggacaaatagaactaagagagaggcagaggcaggaagctgcgggtctatcttgtaaagagtttagcatcactgtgagagtgtgtgtctaaaattaaattaaactagaagcagcaggtgagtatttggtaagtacttctgtgactcgcctcaattcccactggccaggggccatctcaactgcacggtgaatcaagatgctggtgtcatcctccttggaaaaaggaaatgttaactcatggttaaaactaagtacaatgattcccaagggatcactttcttatttttttaaatgacattaaggagaatcttaagaaagcatcagagaaagacatgtgcatgtgaagcaccctgattctgatgttaggaaaacttaagcgaacaggacctgctgcacacagccccattgtcttctatccatttctctttatcattcaaatcaagcaacatgtgccctcctcatcaacacacattcttcccctttgtcagtatgcatctcccagcttagtgtcaggatactttcgattcataattatgtatgatccaaagtgtgcataatttcatttaacgttaaagaaatagatccaattcctttcttgcaaccaaaaataaataaaatacgttgcctcaatataaggtttgggctattctgtgtttctatagaagcaatctgtttttggtaaaatgtacttttaaggatccagtcatctgaagtattttatgtagagttagagatttcacaatattgactatacatatatttaaaatataaattatccagctgatgtttgaatttgtcttactttcctggccacctcgttgtcctattttataagctggggagttaactagcttaacaaaagatgcttagcttttgtaaaagaacaagtgtttcattttacaaagacactccaaatgatagttacttgattttctcgagacctttaactatggtgatgaataacaggacttgctttcaagccttaataaatgtaaaatgccttttaatgaagatacagctgagtgttttcctcatgaatctgaaccaattaccaatttgtgttccagtcttgattggtattgactgattcaaataaagttggtttattttcaaatattacaaaaaaaaaaaaaaaa

SEQ ID NO: 4370 - DNA, 5455 bp, Homo Sapiens
  NM_016937
gggagattcgggaccatggcacctgtgcacggcgacgactctctgtcagattcagggagttttgtatcttctcgagcccggcgagaaaaaaaatcaaagaaggggcgccaagaagccctagaaagactgaaaaaggctaaagctggtgagaagtataaatatgaagtcgaggacttcacaggtgtttatgaagaagttgatgaagaacagtattcgaagctggttcaggcacgccaggatgatgactggattgtggatgatgatggtattggctatgtggaagatggccgagagatttttgatgatgaccttgaagatgatgcccttgatgctgatgagaaaggaaaagatggtaaagcacgcaataaagacaagaggaatgtaaagaagctcgcagtgacaaaaccgaacaacattaagtcaatgttcattgcttgtgctggaaagaaaactgcagataaagctgtagacttgtccaaggatggtctgctaggtgacattctacaggatcttaacactgagacacctcaaataactccaccacctgtaatgatactgaagaagaaaagatccattggagcttcaccgaatcctttctctgtgcacaccgccacggcagttccttcaggaaaaattgcttcccctgtctccagaaaggagcctccattaactcctgttcctcttaaacgtgctgaatttgctggcgatgatgtacaggtcgagagtacagaagaagagcaggagtcaggggcaatggagtttgaagatggtgactttgatgagcccatggaagttgaagaggtggacctggagcctatggctgccaaggcttgggacaaagagagtgagccagcagaggaagtgaaacaagaggcggattctgggaaagggaccgtgtcctacttaggaagttttctcccggatgtctcttgttgggacattgatcaagaaggtgatagcagtttctcagtgcaagaagttcaagtggattccagtcacctcccattggtaaaaggggcagatgaggaacaagtattccacttttattggttggatgcttatgaggatcagtacaaccaaccaggtgtggtatttctgtttgggaaagtttggattgaatcagccgagacccatgtgagctgttgtgtcatggtgaaaaatatcgagcgaacgctttacttccttccccgtgaaatgaaaattgatctaaatacggggaaagaaacaggaactccaatttcaatgaaggatgtttatgaggaatttgatgagaaaatagcaacaaaatataaaattatgaagttcaagtctaagccagtggaaaagaactatgcttttgagatacctgatgttccagaaaaatctgagtacttggaagttaaatactcggctgaaatgccacagcttcctcaagatttgaaaggagaaactttttctcatgtatttgggaccaacacatctagcctggaactgttcttgatgaacagaaagatcaaaggaccttgttggcttgaagtaaaaagtccacagctcttgaatcagccagtcagttggtgtaaagttgaggcaatggctttgaaaccagacctggtgaatgtaattaaggatgtcagtccaccaccgcttgtcgtgatggctttcagcatgaagacaatgcagaatgcaaagaaccatcaaaatgagattattgctatggcagctttggtccatcacagttttgcattggataaagcagccccaaagcctccctttcagtcacacttctgtgttgtgtctaaaccaaaggactgtatttttccatatgctttcaaagaagtcattgagaaaaagaatgtgaaggttgaggttgctgcaacagaaagaacactgctaggttttttccttgcaaaagttcacaaaattgatcctgatatcattgtgggtcataatatttatgggtttgaactggaagtactactgcagagaattaatgtgtgcaaagctcctcactggtccaagataggtcgactgaagcgatccaacatgccaaagcttgggggccggagtggatttggtgaaagaaatgctacctgtggtcgaatgatctgtgatgtggaaatttcagcaaaggaattgattcgttgtaaaagctaccatctgtctgaacttgttcagcagattctaaaaactgaaagggttgtaatcccaatggaaaatatacaaaatatgtacagtgaatcttctcaactgttatacctgttggaacacacctggaaagatgccaagttcattttgcagatcatgtgtgagctaaatgttcttccattagcattgcagatcactaacatcgctgggaacattatgtccaggacgctgatgggtggacgatccgagcgtaacgagttcttgttgcttcatgcattttacgaaaacaactatattgtgcctgacaagcagattttcagaaagcctcagcaaaaactgggagatgaagatgaagaaattgatggagataccaataaatacaagaaaggacgtaagaaagcagcttatgctggaggcttggttttggaccccaaagttggtttttatgataagttcattttgcttctggacttcaacagtctatatccttccatcattcaggaatttaacatttgttttacaacagtacaaagagttgcttcagaggcacagaaagttacagaggatggagaacaagaacagatccctgagttgccagatccaagcttagaaatgggcattttgcccagagagatccggaaactggtagaacggagaaaacaagtcaaacagctaatgaaacagcaagacttaaatccagaccttattcttcagtatgacattcgacagaaggctttgaagctcacagcgaacagtatgtatggttgcctgggattttcctatagcagattttacgccaaaccactggctgccttggtgacatacaaaggaagggagattttgatgcatacgaaagagatggtacaaaagatgaatcttgaagttatttatggagatacagattcaattatgataaacaccaatagcaccaatctggaagaagtatttaagttgggaaacaaggtaaaaagtgaagtgaataagttgtacaaactgcttgaaatagacattgatggggttttcaagtctctgctactgctgaaaaaaaagaagtacgctgctctggttgttgagccaacgtcggatgggaattatgtcaccaaacaggagctcaaaggattagatatagttagaagagattggtgtgatcttgctaaagacactggaaactttgtgattggccagattctttctgatcaaagccgggacactatagtggaaaacattcagaagaggctgatagaaattggagaaaatgtgctaaatggcagtgtcccagtgagccagtttgaaattaacaaggcattgacaaaggatccccaggattaccctgataaaaaaagcctacctcatgtacatgttgccctctggataaattctcaaggaggcagaaaggtgaaagctggagatactgtgtcatatgtcatctgtcaggatggatcaaacctcactgcaagtcagagggcctatgcgcctgagcagctgcagaaacaggataatctaaccattgacacccagtactacctggcccagcagatccacccagtcgtggctcggatctgtgaaccaatagacggaattgatgctgtcctcattgcaacgtggttgggacttgaccccacccaatttagagttcatcattatcataaagatgaagagaatgatgctctacttggtggcccagcacagctcactgatgaagagaaatacagggactgtgaaagattcaaatgtccatgccctacatgtggaactgagaatatttatgataatgtctttgatggttcgggaacagatatggagcccagcttgtatcgttgcagtaacatcgattgtaaggcttcacctctgacctttacagtacaactgagcaacaaattgatcatggacattagacgtttcattaaaaagtactatgatggctggttgatatgtgaagagccaacctgtcgcaatcgaactcgtcaccttccccttcaattctcccgaactgggcctctttgcccagcctgcatgaaagctacacttcaaccagagtattctgacaagtccctgtacacccagctgtgcttttaccggtacatttttgatgcggagtgtgcactggagaaacttactaccgatcatgagaaagataaattgaagaagcaattttttacccccaaagttctgcaggactacagaaaactcaagaacacagcagagcaattcttgtcccgaagtggctactccgaagtgaatctgagcaaactcttcgctggttgtgccgtgaaatcctaagggaatcccaggagtaaccaaggagggggtagttgaaaaatcccagcttcctctgtgcctccactctggccctaaatgctcctccagcatctgtttctcccttgggactgtgtctcatgtttgtgtgaatgtagaccaggaaagggggctgcaaaaatgttgagtctaatgttcgtaagcatcatagaaattcctgtcttcatattaagatgtactgctttaaaacacaactccagagcccctccccaagctcccctccccaagctcctgaagacccggtttctgagggagggaaattgctacttggattgagagtagctggaatgtaagtgaccccaggctttgcctcagggcctttagcctatgtcccccccacataaagagagcttctcagagcctgactgaagagctgacgttttgctttttcatatgccaattaaacccggtctaaatccaaatgcttctccagccatccaggagtggctgtccttttcagtcttgtcttttatataggtagctgagggggaagatttagaagccttgcactcactaaatagattaaacagagcaggcttgtttgttgaattgctccaaagtccaacagacacacactgagcaggtgttttacactcacattccctttttgccccttaaatagaaagtgcaggtaaaggtttatacaacaagaaagcacattgaaaataatttgatactctaacaatccattaacatgtgtaggggttacggtgaggatcactgtgttgtattcagaaaaacggggagagggatgcttaattggccctggcgcttgctatttttttctcatttcttcacaataggaccgtctttggcagcagcaaaatgtatttcagtatggcagtctttcctctcttacattattggtaagattatactaacaaaatgtttccccttgtacaattatgctgtgtttttaaaaaacattgacctgtgtgtttttataaaagaaaaagtatgttgtgccttcttcttaagaataaagttttctaaagggaaaaaaaaaaaaaaaaaa

SEQ ID NO: 4371 - DNA, 2096 bp, Homo Sapiens
  NM_016938
gggcctgtggctggccgggggcggagaagcggggggtcggggtccctccccctggcgctggctcaggaatccgccgaagggcgggcggaggcgccggggtgggccgcgccgcggcaggcgggcgggcggggggcgcttcctggggccgcgcgtccagggagctgtgccgtccgcccgtccgtctgcccgcaggcattgcccgagccagccgagccgccagagccgcgggccgcgggggtgtcgcgggcccaaccccaggatgctcccctgcgcctcctgcctacccgggtctctactgctctgggcgctgctactgttgctcttgggatcagcttctcctcaggattctgaagagcccgacagctacacggaatgcacagatggctatgagtgggacccagacagccagcactgccgggatgtcaacgagtgtctgaccatccctgaggcctgcaagggggaaatgaagtgcatcaaccactacgggggctacttgtgcctgccccgctccgctgccgtcatcaacgacctacacggcgagggacccccgccaccagtgcctcccgctcaacaccccaacccctgcccaccaggctatgagcccgacgatcaggacagctgtgtggatgtggacgagtgtgcccaggccctgcacgactgtcgccccagccaggactgccataacttgcctggctcctatcagtgcacctgccctgatggttaccgcaagatcgggcccgagtgtgtggacatagacgagtgccgctaccgctactgccagcaccgctgcgtgaacctgcctggctccttccgctgccagtgcgagccgggcttccagctggggcctaacaaccgctcctgtgttgatgtgaacgagtgtgacatgggggccccatgcgagcagcgctgcttcaactcctatgggaccttcctgtgtcgctgccaccagggctatgagctgcatcgggatggcttctcctgcagtgatattgatgagtgtagctactccagctacctctgtcagtaccgctgcatcaacgagccaggccgtttctcctgccactgcccacagggttaccagctgctggccacacgcctctgccaagacattgatgagtgtgagtctggtgcgcaccagtgctccgaggcccaaacctgtgtcaacttccatgggggctaccgctgcgtggacaccaaccgctgcgtggagccctacatccaggtctctgagaaccgctgtctctgcccggcctccaaccctctatgtcgagagcagccttcatccattgtgcaccgctacatgaccatcacctcggagcggagcgtgcccgctgacgtgttccagatccaggcgacctccgtctaccccggtgcctacaatgcctttcagatccgtgctggaaactcgcagggggacttttacattaggcaaatcaacaacgtcagcgccatgctggtcctcgcccggccggtgacgggcccccgggagtacgtgctggacctggagatggtcaccatgaattccctcatgagctaccgggccagctctgtactgaggctcaccgtctttgtaggggcctacaccttctgaggagcaggagggagccaccctccctgcagctaccctagctgaggagcctgttgtgaggggcagaatgagaaaggcaataaagggagaaagaaagtcctggtggctgaggtgggcgggtcacactgcaggaagcctcaggctggggcagggtggcacttgggggggcaggccaagttcacctaaatgggggtctctatatgttcaggcccaggggcccccattgacaggagctgggagctctgcaccacgagcttcagtcaccccgagaggagaggaggtaacgaggagggcggactccaggccccggcccagagatttggacttggctggcttgcaggggtcctaagaaactccactctggacagcgccaggaggccctgggttccattcctaactctgcctcaaactgtacatttggataagccctagtagttccctgggcctgtttttctataaaacgaggcaactggactgttaaaaaaaaaaaaaaaaaaaaaaaaaaaaa

SEQ ID NO: 4372 - DNA, 711 bp, Homo Sapiens
  NM_016947
cttttttttttttttgcgaagtgggctcgtgggttggcagtatgagagttgtaatggcccgactgttgagtgagggggagcaggggatcccaacggcttgcgctgcctttgcgcagcagccggcgggcgagccacgtcgcggcctggctggggtaggagagggcggtccccagtgcagttgggtgaactaccgttgcacactggagtttctggtgtctttgcttggaactgacctagctcgtggcagggggaactcggctagcggccccacagcccctgctgactcaaaacaactaatgaactctggaagcccagccagggacaatgcaccttcacagagattctgcactaatctgagtgaaggtctaaggtttggaatctccccctcatggagagaagctttgtatggctgtcatgcttagacagtgattcctgcaacttgaccttcaggctgggagaggtggagagccatgcctgttctccttccttgctatggaatttgctgacacaatatcttccgcctggtgctgggcatatcctaagaacttacaactttcctgtattatcctgtgtgagcagctgtcaccttattgggggaaaaatgcctgaaaattagggggcacttcaagtagatagcttctatttcctatatttgtcttatatacaagtatttgcttttatcaaaataattccaataaagcattttaaagt

SEQ ID NO: 4373 - DNA, 1273 bp, Homo Sapiens
  NM_016948
gggcggggcggcgcgggcgggccggccgggctgtgcacctgcgcctcggcgggccgcctggggcaccgtccccggcccgcccggccccgccatggcccggccgcagaggactccggcgcgcagtcccgatagcatcgtcgaggtgaagagcaaatttgacgccgagttccgacgcttcgcgctgcctcgcgcttcggtgagcggcttccaggagttctcgcggttgctgcgggcggtgcaccagatcccgggcctggacgtgctacttggctatacggatgctcatggcgacctgctgcccctcaccaacgacgacagcctgcaccgggccctggccagcgggcccccgccactgcgcctactggtgcagaagcgggcagaagctgactccagcggcctggcttttgcctccaactctctgcagcggcgcaagaaagggctcttgctgcggccagtggcacccctgcgcacccggccacccttgctaatcagcctgccccaagatttccgccaggtttcctcagtcatagacgtggacctactgcctgagacccaccgacgggtgcggctgcacaagcatggttcagaccgccccctgggcttctacatccgagatggcatgagcgtgcgtgtggctccccagggcctggagcgggttccaggaatcttcatctcccgcctggtacgtgggggtctggctgagagtacagggctgctggcggtcagtgatgagatcctcgaggtcaatggcattgaagtagccgggaagaccttggaccaagtgacggacatgatggttgccaacagccataacctcattgtcactgtcaagcccgccaaccagcgcaataacgtggtgcgaggggcatctgggcgtttgacaggtcctccctctgcagggcctgggcctgctgagcctgatagtgacgatgacagcagtgacctggtcattgagaaccgccagcctcccagttccaatgggctgtctcaggggcccccgtgctgggacctgcaccctggctgccgacatcctggtacccgcagctctctgccctccctggatgaccaggagcaggccagttctggctgggggagtcgcattcgaggagatggtagtggcttcagcctctgacagtcaggatgaagccccatgccactccacactgctgggacatggcagggacttcacagtgggggtttttagctggctcacagggctccctcagcctggggaacattaaaggttttctacaaatacagtcaaaaaaaaaaa

SEQ ID NO: 4374 - DNA, 13804 bp, Homo Sapiens
  NM_017412
ggtgctcgcgaaagctcgctgtcgctgggaggcgcgcgccggcgttcctcggccgctccgggtacctgagggacgcgcggccgcccgcggcaggcggtgcagcccccccaccccttggagccaggcgccggggtctgaggatagcatttctcaagacctgacttatggagcacttgtaacctgagatatttcagttgaaggaagaaatagctcttctcctaagatggaatctgtggtttgggaatgtggttgatcaacttgatatgttggccaaatgtgccccatgtaataaaatgaaaagaagagacaagatgatgtcattttcccatattgtgaaaccaaaaacaaacgccttttgtgagaccaagctaacaaacctctgacggtgcgaagagtatttaactgtttgaagaatttaacagtaagatacagaagaagtaccttcgagctgagacctgcaggtgtataaatatctaaaatacatattgaataggcctgatcatctgaatctccttcagacccaggaaggatggctatgacttggattgtcttctctctttggcccttgactgtgttcatggggcatataggtgggcacagtttgttttcttgtgaacctattaccttgaggatgtgccaagatttgccttataatactaccttcatgcctaatcttctgaatcattatgaccaacagacagcagctttggcaatggagccattccaccctatggtgaatctggattgttctcgggatttccggccttttctttgtgcactctacgctcctatttgtatggaatatggacgtgtcacacttccctgtcgtaggctgtgtcagcgggcttacagtgagtgttcgaagctcatggagatgtttggtgttccttggcctgaagatatggaatgcagtaggttcccagattgtgatgagccatatcctcgacttgtggatctgaatttagctggagaaccaactgaaggagccccagtggcagtgcagagagactatggtttttggtgtccccgagagttaaaaattgatcctgatctgggttattcttttctgcatgtgcgtgattgttcacctccttgtccaaatatgtacttcagaagagaagaactgtcatttgctcgctatttcataggattgatttcaatcatttgcctctcggccacattgtttacttttttaacttttttgattgatgtcacaagattccgttatcctgaaaggcctattatattttatgcagtctgctacatgatggtatccttaattttcttcattggatttttgcttgaagatcgagtagcctgcaatgcatccatccctgcacaatataaggcttccacagtgacacaaggatctcataataaagcctgtaccatgctttttatgatactctatttttttactatggctggcagtgtatggtgggtaattcttaccatcacatggtttttagcagctgtgccaaagtggggtagtgaagctattgagaagaaagcattgctgtttcacgccagtgcatggggcatccccggaactctaaccatcatccttttagcgatgaataaaattgaaggtgacaatattagtggcgtgtgttttgttggcctctacgatgttgatgcattgagatattttgttcttgctcccctctgcctgtatgtggtagttggggtttctctcctcttagctggcattatatccctaaacagagttcgaattgagattccattagaaaaggagaaccaagataaattagtgaagtttatgatccggatcggtgttttcagcattctttatctcgtaccactcttggttgtaattggatgctacttttatgagcaagcttaccggggcatctgggaaacaacgtggatacaagaacgctgcagagaatatcacattccatgtccatatcaggttactcaaatgagtcgtccagacttgattctctttctgatgaaatacctgatggctctcatagttggcattccctctgtattttgggttggaagcaaaaagacatgctttgaatgggccagtttttttcatggtcgtaggaaaaaagagatagtgaatgagagccgacaggtactccaggaacctgattttgctcagtctctcctgagggatccaaatactcctatcataagaaagtcaaggggaacttccactcaaggaacatccacccatgcttcttcaactcagctggctatggtggatgatcaaagaagcaaagcaggaagcatccacagcaaagtgagcagctaccacggcagcctccacagatcacgtgatggcaggtacacgccctgcagttacagaggaatggaggagagactacctcatggcagcatgtcacgactaacagatcactccaggcatagtagttctcatcggctcaatgaacagtcacgacatagcagcatcagagatctcagtaataatcccatgactcatatcacacatggcaccagcatgaatcgggttattgaagaagatggaaccagtgcttaatttgtcttgtctaaggtggaaatcttgtgctgtttaaaaagcagattttattctttgccttttgcatgactgatagctgtaactcacagttaacatgctttcagtcaagtacagattgtgtccactggaaaggtaaatgattgcttttttatattgcatcaaacttggaacatcaaggcatccaaaacactaagaattctatcatcacaaaaataattcgtctttctaggttatgaagagataattatttgtctggtaagcatttttataaacccactcattttatatttagaaaaatcctaaatgtgtggtgactgctttgtagtgaactttcatatactataaactagttgtgagataacattctggtagctcagttaataaaacaatttcagaattaaagaaattttctatgcaaggtttacttctcagatgaacagtaggactttgtagttttatttccactaagtgaaaaaagaactgtgtttttaaactgtaggagaatttaataaatcagcaagggtattttagctaatagaataaaagtgcaacagaagaatttgattagtctatgaaaggttctcttaaaattctatcgaaataatcttcatgcagagatattcagggtttggattagcagtggaataaagagatgggcattgtttcccctataattgtgctgtttttataacttttgtaaatattactttttctggctgtgtttttataacttatccatatgcatgatggaaaaattttaatttgtagccatcttttcccatgtaatagtattgattcatagagaacttaatgttcaaaatttgctttgtggaggcatgtaataagataaacatcatacattataaggtaaccacaattacaaaatggcaaaacattttctctgtattcattgttgtatttttctacagtgagatgtgatcttgccaaagccaccagaccttggcttccaggccctcctgtagtgagttgattgtctgcacttgccttgcccaatagccagtaggctacagcttttgccccacacccttattttcagattctggatcattcttgtttacaactgaaatatatataacctcagtccaaagtggtgattgatttgagtatttgaaaattgttgtagctaaatgaagcatgattagtcttagtatgaatatcatttaatctttaaaaaatcaagtaaaaatgtttatctgataatgtttaaataatttacaatataaactgtaaaacttattaggcatgaaatcaatcagaagagaaagaaaaatgctggaacatgcttgatgtattatgtaaaaagcatatttaaacaagggtcctcaaccctgactgcagataagaatcacttgggttacttcagatgcctaacaccttcctctcatacaaataagaattggtagctttcttaaaaaaaaaaaaaaaaaaaaaaagcgctccaggtgattctaatctgcagcctggcttgaaactcactactttaacttgcccctgatgatctgtcggcatcatatatcacatgaacatccacatggattctgtctttcgcttttatatcattatctaatattcagttgttctgcacctgatgccaaattctgggctgtactcctagagagacttactcagtaaggccaaagtgataggactttaaaatctgtagttataaaaataccgcaggtgattcttacggaggtaatccaagaatcatactttgaagaattattctagactctgaagaggcctggctctgccttatgctattatagtttatgacctttaacaatttaactctccgagcctcagttcccttgtttgtaaatgaagatagaagataaatacgtactctacctacctcacaaagctgtcagattaagatcaagtgaaaaaaattatgtgaaagctctttgaaaactgtaaagcattatgaatgataagggattaggttattgtggatttaagaggtgtgaggactgctatagtacattccttgacgtgtgttgaattcatgtatactttctttcttaccctttaaaacaaactgccaagaaattaggtgttgaaaaagaatattctcatcaggcagcaaagtcagttttctgatagtaataatttgtctattatgttatatatttcaaagtacatgtatgataatatgacttattcttcatgagagatatttgaatatttggcccaaaatgtttttcatttttctctgtgttcattgcctttctccttggagctggagttaatgctcaaagcaggcaggtctgaattccctcataaccgacaattagtaaacattttctctgaaagccaaacatataacaacttatttatcaataattcatgaagcttttgtctgagaatctctcctgcaaacagcatgagagaactaaaacaaacattcacaaacaaaaataagttaaaatagaaggtaccagtttgggctcgaagatgttgtcatccattgccatctgcattatattatcaactgccaaaatgttaattggttttcttttacaagtgggccaagtatagacagttaagtgaacatcactatgaaaatcttaactttgtgcttctagatttttagataatcatttgtattttctctattaaattgtgggtatgtatgggaatactatattgacttttcagttactttcagtaagtatcttaattttgtcccacaaaatttatgtaatattaatccatggttttaaacaacagtattcagtttgggcagcagttttaagtctaactagcttaaaccaatctgaataagtctggacagttttcctaccatatgtttaactttgattggcatatgataatgtttagtgttttcttttttcagttgacaactgagaaaataatagttctctctaacatgttaatatattatcaaaaggttttcaaaaagtactttgatttcagcaactttttttattcaataactagacaaaagatctaagataatattaaactcaaaacagtttgtttcaaagaacaattggttaataactcagctggcacagggattcatacacagtttttcaataaatatttaaatgaacaattcatgtcacacaacttgcttttaccctagtactgagtctcacatcaaagaaatttgaaagatctataacctatgtgaaatgaagtctctgctttaccagaataatatgtggcaggtaataaatatgtaaagtacaccaaatgaaacatattttgcatagataacagtccatatcactattataattaaagaaatatatgtacagacatgtaccaatccttttaattaattttagaagatgaacagtgattcttagaagtgagtaattagactccttttagtcttatgctgttagatctttgtggaccagctgagtaaatgaatcttcaaatcaacctttctttttctgctgctcttagagcagatttataaaaatcctaagaatgtcttcaaattagaaaaatttactacattttaacctacctcatcagtttctttgtgataatagctgaaaataactcaaactgtacccatcttagttaggctatatctctgtgaaatgaaaggaaccacttaattttttttatataaattagtgaatcatttgctggagcttagaaaatattaacataccaaaatttcattatgatgatatttatattgctttttgacatgccaaaggtacatttacatattaccatatttggatgacttacatagtctggtgtaatgaaaattcccctgggattggaattttaagactcatgatgtcaactgggctggtcattttatttctctgagtctttgtttcttcaatgtaaaatgtggataaggtaatttttggttttagcctccctcactggatattgtaaggatcaaatgaaatagtatttattataatgctctgtaacccataaattattctacttaaaaaaattttttatagagacagggtcttgctctgtcacacaggctggagagcagtggcataatcatagttcattataaccttgaactcctaggctcaagcagtcctccagcttcagcctcccaagtagctaagactgtaggcatgcaccactacacctggctaattttaatttttttttctttttttgagacggagtctggctttgttgcccaggctggagtgcagtggcacaatctcagctcactgcaacctccacctcccaggttcaagtgattcttctgtctcagcctcccgagtaactgggactacaggtgcgtgccaccacatccagctagtttttgtatttttagtggagatggagttttgccatgttggtctcaaactcctgacctcaagtgatctgcccacctcagcctcccaaagtgctaggattacaggcatgagtcactgcacctggcttaattttaatttttttaattttttgtagagatgagtctcactatgttgaccaggctggtcttgaactcctggcctcctaaagcactgggattacaagcatgagccaccatgcctgatccataaattgttctactgataccatttggttttgttagaatttgggggggctatagaaaacaaggttacagtcttcattagtatttctttttagcaataacaacaaaataggcaattagaccagtgttcatttggtacagtctttaaatcggtcatccaattaacctttaaaaagtaggttatgctcttaaattgtattggttctttaatatgtgttataccagagtatgcctcaaattttatgtagttgaatttgtagaacaaatttggggatattcattttatttttccttttatatgaaattgtataagtacattagcttgacttaaattataaaaaaaaatatatatgaagaagaatgtagaccctataatgttttttgtctttgactttttggcttttatgtacctcattttttctgattgagaaaaagttttgaaaaagtgattcacttgttggttttcattgtggcaaaactttaaattttaagtcatcacactatgagaattgtttgtacacatttataatttttttaaagtatgtaaagtaaggattttttctccattcttcactcacaaaggatagcatttttatggaacctagatttacaaaggaacttgtgattcttttcaatgcttttgtgtcgttttacagctgattaagaaaaaatgtttacatttaattcagctgtatttcctagtagctgtataatcttacacattattcttatataattttgacctattttatatgaaaataattgtattggcatctcttcataatttaattctcttctctccttcttttgttccgattagatgaatttgggaaaggagtaggaagactaggtatcgcatgccttccgtctgattgtaatcagtctcctgggttttttactaatttaatcttaatcctgtgcttctttagtcatcaaattgatataggattacaattttctctcaggatccaagtcttctaagaatgaaaatgttgaagtctacccagaaccagccatccttgtagacatttctatttggttgatttataaagatttaatatataaagatttaatatgagttaaacatgtttcttattctgtgatctctaattagaaagtaaaattctgttgccataaatataaaagaaagttttcacttatattttagtcaaacaccaaaccactgcattacttacttcctataagacacagtagttcaatctgttgaaaggcattgaaggataatttccttcagattactttttaaatcatcatctgcctcaggaaattctttcttgaatttttttgttggtgtgaaagcgttgcttatactttatgctcattttattggtcactgtcaccagtttttcccgataaagattaaaaatgttttttaccttgaaataattcagattttgaagattcactgtttcattattttgctaattaccattaactagtaaagttagtttttaaagtttttttaaggttgatattttatcatattcctggagtaggatggattactttattattattgtagctttaaggttttttgttgtataagtcagcttgtttgtatatgctaaattgcagatatttctttgtgttgtgcttattggtttttttttttaacttagagcttaataatttctattttctatcctggagtctaaaattaaacaaaaaaatctattttctaaattggcaggatttttttaatgattagtaaaactgtattattttatttttaaaaatacaataggattttgagtcaggaaacttgacttctactcttgcctctcttttgcagttagctgtgtaactttggataaggcattttatctcgtggtgcctccatttttctcattctctagggaacaagagaattagtttaggtagcgtctaaaattccgcccagctctcatttggttctcatttgaccattttataatcattattttggtctcatttttattcttcttattcatcccatgaactagatcaacttgtattattttactagatcaacctgtattattaacgtcatttacatgtaaattgatgggattcagatattttatcaactgtttttccattagtgattttaagtaattttaaagaaggaaaattatattacagataataaaaatgaaagaaagttataaatattggacatggcttttttaaatgggaaagtcttcttaagcaccaatataagcaccttaaattgatacatagaaaagaatgacataacgttttgtggtctttgttctcttaaatatgaatatagctagttagcctaaaatttacacaaaatgtattcaagatcaaattagtgaacaaagcaatggttcgtatggctaatttaaaagcaattcaatttaccaatattaaaataattataaaatgtaaaagaaatttcagaggagttgattgaaaattttttgttcagtaattattcttaaactgcattcttaggtttattacataaatatagttgccagattgccatgggcaagtgaatgtcttcatttgaaatattattagagatcaatgtggcttgttatttttaatttttttctggctatacagaaaatgtttctggaaaaattccttaattgtcatctgatataatgtagagattgaggccagacgcagtggctcacgcctgtaatcccagcactttgggaggccaaggtgggcagatcacctgaggtcaggagttcgagaccagcctgatgaacatggcaaatccccttctgtactaaaaatacaaaaattagccaggcgcagtggctcacgcctgtaatcccaacactttgggaggccgaggcgggcggatcacgaggtcaggagatcaagaccgtcctggctaacatggtgagaccctgtctctactaaaaacaaaaaaattagttgggcatggtggcgggcacctgtagtcccagccactcgggaggctgaggcaggagaatggcgtgaacccgggaggcggagcttgcagtgagctgagatcgcaccgctgcactccagcctgggcaacggagcgagactctatctcaaaaaaaaaaaaagaaaaaaaaaaaagtagagattgcattagttccatatctccgcagagttctctggtagattaaatgttctctgtgcactaggccaaggaagttcctgttacctttgaaaatcattgtgtttgctctgattgtctacattagctcatatcagtcttttgaacactggttcaaatctgggtgttgggttaggatctgatgagtagagaatagtggaaagttgatataggaaggtatactggtttctggtgtgattctttagctacatttattccttgtcttatgtcatttcactggatcatgtaactgtcctggctttcagaaattatattagatgcccagcctttctcattcagagatgcctgtattattatgttatttcgattgcctaccaaaaaaaaaaaaaaaagaaaaggtttgtttttagttctctgcctctgcaagtctttgtgatcacatttgttaaattgaatctgagattcaaatatttcatttaatattttctgggttttgataatgggatattctgtaagataaagcaagtaatcctagagtgatttactttatgtttagccatccaccattttcctatttctctactcctcccattctccatttttaaaaggaaattaacaaatgtcttcctttatccctgcctcagataatttttccctgaactcatcttgtcagcagaaacatttaatgtgaaataattctgtatttctgagacaagatcaacacagtagttctttacattgagctgaggtgaatgtatacttaaaaatactctattttctttttatatgaacttaaaatttttaaaatcatatatgggactccccaatgtgaaaatattagtctggacattctcttgccatcaggtgctatttctaccttagctgtgagttagactaaatccaaatttcgtatcattcatctttttataatatttaacttccctagaatcaccccatttcatgtctttaaccccaacttccaacaacttttctgcttttattttcaaatgtcaaattgtatttttgtgttttattttctcattgaagtgtaaaagtatcacatatatgaaggaatggctggtttagacatttactttggcatagtaaagattgatattgataccacccaccatcctttcctctagccccagaaagaaaagtttgacaactcaaaaacgattaaattatcttatcttgttatttaatagaacaatggaagctgtttcgtcaaaattaaaatactttaccaaaaaaatacttttttgtattttaatctgatagtgaatttggggattatttatgtaaatgtatcataattaatagtaattatgagttatttcactctctgtaatttgtgatacccaagattcatatttatttaatgtgaggtgttttttgaggcttttttgttttatcttgttttcttaactttttacagtgttgttagattatcgcggtcatctcggcatgtggatcgctcctcctgtagatcagctgttctctcttagagtcaggacaaggaggtttttgctacatggtcgtagttggataatacagcattattctgaactatctgaaattgctggttttattggtcaaaaatgatcagatgctagcaatttcataatagatatattcaagaaggaaccaaactttaaaagatcttttagaataggtatgttaacttctcatcctaaccctatcaatatatcagaggctttatgaaggagactctacagataaccacaaatcttatcaagaaaattctccttaaaaaaagttatcctttattttgttgttaaatttcccagtttttaaaagtgttttatcaaaatgacttcataattgaagcaaataccttttggaagtatatatgttacataagactttcactaaatctgtgcgtaaagcttttataatctgagatattgttatgtattaggtttgtgcaaacctaatataaaagggttcatctgtaagtatcatttagaggcaaaataatttccccctcacatctaatgtggactcaaattttggcaactggaatgttatcctcttggtaggcattctaaattaatgaatactgctatgtggtgtagtaaacaaatttgccataaaatgccatttaaggattttctttttacctttatttcattataaaagtatatgagttgaagatcatataaaaaatatgaaactcctacacaggaaatccccaattttgtgatttaataggttgtaaaaagagttgttccaaattcagactacatctcatcatataaataatattatgaataataagggtaaaagattagccaacaaaagctaatctagtacaccccatagaggtactccaggtgtcttggttttggataaatttttatagtggagaaaggttactttgatctctcaataattgcttggtacacttcttcctaggcaatatgctcatgataccctcttcatgtgacctattcctcaaatgctgcattctccaaaacttccttacctgccttctatcccctagtcattcttatcaatacttccaaaatataacctatctcaagtgttagaaatttgctttaactaatttatattaaagtgttagtgactatagcccttttatctctcttaaagagaaatctgcattaaaagcaaacacattgctgttagctcaaattaatgtcagtgagtagaatcttaagctttaaaacaaaagtggaaataatttaaattagtgttgatgggactattttgaggcaagagataccattaagtgacctagcttggaaatctgccccctttgcccaaacccatgtgatgtctgaaactactgtatattttcaatgaccttgagaaagggagctagtcatttgtatttatgggccttatgaagtcagggcctgctgatcctgttttttaagttcaagcgcaatgcctgaagcatcctagatctccttcaccctcattctacctgacagacagctaggtctgtcttccagctctttctcattgatactacctttacatatgaatactatccatgcttgttaaaaaaaaaaaaagtctttccccattttactgttacaatttttcaagagctataaaggtagaaaaagtattccttttcattattctaaaaaatatgtcatttttaaatagctggcacttagcagtttagttttccaaactttattctgaatcaaattgctgaggtgattctaaatgtctaatgttgatttatcatataaacatctaattagaaagtgtttatgctaaagacttgtattttgtggcattagttcttcatgtttcttttttatatgtttattaaaattgttcacttccaaatgagtggaaaagttgctgttgttgggatgtacagggcaagtgcacttggttagagcatgaactgggaatttcacattctctgatgtgctttgcactctgctcttgtagatttattttgtttacagtagactgatgtcagtttttgtaaatgttttttcttagcactttaactgtgagtgtacaaactgattttaaatgtagtggttgtatattttggttataaattggagatttttaataaaattaaataattctcttttctgtcaaaaaaaaaaaaaaaaaa

SEQ ID NO: 4375 - DNA, 6806 bp, Homo Sapiens
  NM_017415
gattctttgcagcctagacagaggaggcaggagccccaggggcgggctaatcgcctgggctggggatgcctgggcagatgcagaggaagctggaaaggtggcagtgcacctgggtcgctggagctgccgccgttcctaggagaccaaggagcagcaagcctgcgggggagggggagcaagtgggttgctgcttttagcagctgaaagggctgcagggagctctgggtaagacattttctgttgctgctgcttttgcggtagaagctgctgcgagtaagtcagaggaaggaggattgagaagggaggaggcttcacttgcagccatgctgaatcactgttgctgatcagatttcccactggtctgctgggagaatcaagaacagaactaggatccccgagtgcatacacagttcagcagctaccaccctggctgggcctcacacaatggagggtgaaagtgtcaagctgagctcccagactctgatacaggctggggatgatgagaagaaccagaggacgatcactgtcaaccctgcccacatggggaaagcattcaaggttatgaatgaactgcggagtaaacagctgttgtgtgacgtgatgattgtggcagaagatgtcgagatagaagcccaccgtgtggtcctggcagcctgcagcccctacttctgtgcgatgttcacaggtgacatgtctgagagtaaagccaaaaagatagaaatcaaggacgtggatgggcagacgctgagtaagctgattgactacatctatactgctgaaatcgaggtgactgaagagaatgtccaggtgctgctcccggcagccagcttgctgcagctcatggatgttcggcagaactgctgtgacttcctgcagtctcagttgcatcccaccaattgcctgggcatccgtgcatttgcagatgtacacacctgcactgaccttctgcagcaggccaatgcctacgcagagcagcactttccagaggtgatgctaggagaagaatttcttagcctgagtctggaccaggtgtgcagcttgatatccagcgacaagctgaccgtttcttcagaagagaaggtgtttgaagctgtgatctcatggatcaattatgagaaagaaacccgtttagagcacatggcaaagctgatggaacatgtccgacttcctctcttacctagggactacctagtccaaacggttgaagaagaagctttgataaagaataacaacacctgtaaagacttcctcattgaggccatgaaataccatctcctccctctggatcagagactattgattaagaacccaaggaccaagcccaggactccagtcagccttcccaaggtcatgattgtggttggcggccaggcacccaaggcaatccgcagtgtggagtgctatgatttcgaggaggaccggtgggatcagattgctgagcttccttccagaagatgcagagcaggtgtggtgttcatggctggccacgtgtatgccgtgggagggtttaatggctcactgcgggtgcggacagtggatgtgtatgacggcgtgaaggaccagtggacgtccattgccagcatgcaggagcgccggagcacactgggcgcagcggtgctcaatgacttgctctacgcagtgggaggctttgatggcagtactggcctagcatcggtggaagcctacagctacaagaccaacgagtggttctttgtggccccgatgaacacgcggcggagcagtgtgggtgtgggcgttgtggaggggaagctatatgctgttgggggttatgatggagcttcccgccagtgtctgagcactgtggagcagtacaacccagcgaccaatgaatggatatacgtggcggacatgagcacccgccgcagtggcgcaggggttggagtgcttagcggacagctgtacgccacaggtgggcatgatgggcctttggtgaggaagagcgttgaggtttacgatcctggaacaaatacctggaagcaagtggcagacatgaacatgtgccggcgcaacgcaggggtctgtgcagtaaatgggctcctgtatgtggttggaggggatgatggatcctgcaacttggcttcggtggagtactacaatcctgtcactgacaaatggacgctgcttccaacgaacatgagcacggggcggagctatgcaggtgttgccgtgattcacaagtccttgtgacccaaactcctactgccaggaggtggaggaaggagcaggtgctgcctgtgactctgaacagcaggaccttggtgactggattcaacttgcttgggagggtctgtgctgctgtgagaaccgctctcctctgacttggcagactggtgttgttcatcgcagtgtggacaccattacccacccccgttcccctgaggtgctctggcctatgccctgagcaaggggggtcttgacatccccaggcagcacctttgggctttgttttggtgtttctacagggacaatacagaccctggagtgtgtgtgtgtgtgtgtgtgtgtgtagaccatggtgtttctctatgtttctctaagttggggggtgagcgtgtgtgacagtctactggatttctttactactgatcctttcgctgtgttaaaaatcaagtcacagagacctctcttctggatttgtcccatggggaccctgagactactaaagctgctttcttctgaaggtccagttggacagtctgggaatgtccagaaataaccagtgagaggggcagttctctggccacacccacttatgtactttaactactgtgactttgtctgcagaagagctggaaaattctcgaagctgcaccgtgtcctctgtgtgctagaataagggacaaatgggttccctgtgcttctcagctcactgtttttccttgagttctcctacaggaagcagatgagaactgcccagtcttcaggtttaggccattggtctttgatgtcatagattccaggcctgggaggtgttatgtctcttcagctgggaaaactagctcttcagagaagcctcgggtaacactgaaaaacaaaacaaaacaaaacaaaaacaggaaaaaaacaaaaaaccaaagtggtaaggattcagttcctgcctataatggtctcagagagggtcctacttttaggttttcccaggacaggacagtccccatttatacttattatcccagtttaattattcacagcaccccattttactcagaagtgttctggtctggaggataaataagaggtcaccctcctccagacccaaagatagatttgtgcctgtgttggatggggtcgtgtgtgattcagatggacattggatggcttcaaaggaatataccactagagctggcccttggcactttgtgacagtggtcaagtctgtctaatgtccttgtcttctttttcttgtgctttccccctattccagggtgtgcaccctctccccaacccccaagaaccccactactgctttccctgtgaggtaggagatatcagtgggccttggatttgaggcttcctaagatgtgcttgcattttaaaaagggagcttggtgagagctttgctaattcacaggtaaaaattattaacaatagaacttcaagcatcttgaggagcgggcatttgagggggcatggagtaatttgtatttaaaaaaccttaaagttgtgctgttcctaaactagcaaattgctcatgctgaaatttctggcataagcaggggaagtcttgtgtctggagaatagtctcataccttgcagtctgggacaccctccctactttgagaatccacctacaggaagccaaggaactttataaatcctgatgttggacttctgatacgactgggctacttccaagcaggtgctgcaggagattggcatcccccagcccctgcagttagaaaccccgaagtcttcccagccagtgagccactttgtgtatttactgtatatttattgtgccctaaatgtgcaactctcctaaagacaaaacttctctttctgatgttaagcacatgttacttcaacaagatgcttggagaacaacaaggtacccagaatttttagaagccttcagaagaggctaaaatatccagctttgggggacctggaagaaatgtctccaaaggaagcaaggcatgttttagttgagtgctctggtctcactatgaagtggggatgactgtggcttcataactctacctggctgtgggttggaagctgatggaatgagaaatgtcctttctccttctctgaggaaattttgagacttgtttcggtgtgtctgtgtgatggggatgaggctggggttgggatctgatgtatgccattcacagaagctctcaatttcagatgataggtgaattccctgcccctcccccaccactgagaagctagactttcatgcgggagaggctacttttatgtgtcgtcttccggggaagggtccctccactgaaagctagccagtcatgttttctgtttttggatttttgcaattggtttcacctcatgtctccctccctacaaagcactgcctctactgggcgtgctgccaaggccatgtgcactccatcctcatgtatcctttttcacggggaccagaacactggtacgtcatcaccaaagccaatctgctctagctgcccacagatgccaccaaaacctgctatctcttcatcaccaggtacgattctctttccacagtggacacagcaggctattttctagtttgtgctggtcacgtggtagatgaagcctcttactgccccacttagggtggccacggctgcttgtgaatgcagctttgccagtggcatatctgtcatctgattgcggtggtgaaatggaattgaggcccaaggttagaagcagccgagacgccacttggatactgatttgaacaatgtagaagtcagattctgaattccaaagttatttctcataagtacccaatggcatctctccatctacaaagttgcagtattatgcaaataaaactgacctcattttctgctatgcaataagaatacttaattctagttcccgacaagccagttgcaatatcccctaagatgctttttgagctgtcttactttgatatctgttgtgtaatgtttgtatatttctgagccagatcctttcaaagattgcctttttataaaattgaagctatagcttttaggctaaaattttaacgtagatatttttataagatatttttttcaagagtttgaatcgctttttattgtccatgataatgaaatgttgtgttctttgcatcattcactctcaaacgtagttcatgcctgtagctctcttccttttgtttctcacccttcagaaacatatttttcagtagctccaggtagatgagccttttttttttttttaaaaataccatattcaagggagtctgctgaattttaaaacgcagtcactggtgtttcttgaattgctagggactgatgttatgttcgactcagcacttgcccgtctgtattgattgtgtctttttttttttttttggagtctgctttctgtgggggtgaggccgggctgtctcgtggtggctcccactgacgggcactgagcctggtaccctgtggcatggagaagcctcagggaaaggcctgcccccccagcacatactcccatagtgtcctaggtccagccgaccattccttattctcttctatctccttgttgatctgaagcttccaatagcttgaggcctttgctgctggatgatgccctttttgggagcatcttgtctctaacctttaaaagaggggtcaatcctcatgatccctgtgtgttaagcatatgctttgcaggtgctcacactacacttacaacttgcttcttgagctatgtctctactccaggctctgttttgtgtatttatctgccatttgcatcatggtttttaaaatttattattattattattattgttgggacaggtgccatttaaattgcctccatgctccccatttgcacctagctggatcaagttgggaggctgagcaaactcatattccagttagttggagtttttaaaggctctgtttgcctggagaagcaaggaggttagaatgtaatttttttaagcgtttgcactatttagagtcctaagcccctcatgttcagctgtgctgtgtttctactgaccaagcaggagagccagcagcacttccagcatttgggaatggaagagatttcttctgtagtggataattacagcctcatagcccctgtgcagccttcgtcatgggactcagtgactcatggatatagcatcagccatggcaggaatgcacaggactgtggcatttgcagcatcaaatcaccctagtgccatgtttggttatgagattgtaaattattcgctcccccatcctcccctcccctcattttcagtggcaatagaggacccttgttgtacttcttgtttaatttgcatattatgtgtaaaatgctttcgttgaaagaaaactgaagacactgaatgtgtatgtctgtgtgggtgctctgtccctgtggttgtcatagccagtcagacttgatcactgacaccccgtacaacatattgcataggtaagatcctcgatctggtgttctctgcgtggctgttagggactgtatatcttgtaaaagaacacttgtcacatgcttgatcagttacagcaatagctgaagaaacatttcctcaaatgtattattttaacaggaatcatgttctaatttcccatcctttaattttaataaaagctgaactgtgtgaa

SEQ ID NO: 4376 - DNA, 3947 bp, Homo Sapiens
  NM_017424
ttgggaaacccctacctgtctgtacctgtaggtcttttctctggggtctggaagaagaatccttcaatatcttgccttctggtaatctgagagcagggcgagaaaaggaagatcagagttccacccttaaatctgtaggttttcactcccccactctcctttgcagtcccgtggagtctccatctgagccctttcctagtccaggcatcccgatgttggtggatggcccatctgagcggccagccctgtgcttcttgctgttggctgtggcaatgtctttcttcggctcagctctatccatagatgaaacacgggcgcatctgttgttgaaagaaaagatgatgcggctgggggggcggctggtgctgaataccaaggaggagctggccaatgagaggctcatgacgctcaaaatcgctgagatgaaggaggccatgaggaccctgatattcccacccagcatgcactttttccaggccaagcatctcattgagagaagtcaagtgtttaatattctaaggatgatgccaaaaggggctgccttgcacctccatgacattggcatcgtgactatggactggctggtgaggaatgtcacctacaggcctcactgccacatctgtttcaccccaagggggatcatgcagttcagatttgctcacccaactccccgtccatcagaaaaatgttccaagtggattctgctggaggattatcggaagcgggtgcagaacgtcactgagtttgatgacagcttgctgaggaatttcactctggtgacccagcacccggaggtgatttacacaaaccaaaatgttgtctggtcgaaatttgaaaccatcttcttcaccatctctggtctcatccattacgcaccagtgttcagagactatgtcttccggagcatgcaggagttctacgaggacaacgtgctctacatggagatcagagccaggctgctgccggtgtatgagctcagtggagagcaccatgacgaagagtggtcagtgaagacttaccaggaagtagctcagaagtttgtggaaactcaccctgagtttattggaatcaaaatcatttattcggatcacagatccaaagatgtggctgtcatcgcagaatccatccgaatggccatggggctccgaatcaagttccccacggtggtggcagggtttgacctggtggggcatgaggacactggccactccttgcatgactacaaggaagctctgatgatccccgccaaggatggcgttaagctgccttacttcttccacgccggagaaacagactggcagggtacttccatagacaggaacattctggatgctctgatgctgaacactaccagaatcggccatggatttgctttgagcaaacaccccgcagtcaggacttactcctggaaaaaggacatccccatagaagtctgtcccatctctaaccaggtgctgaaactggtgtctgacttgaggaaccaccctgtagccactctgatggccactgggcaccccatggtgatcagctctgatgacccagctatgtttggtgccaaaggcttgtcctatgatttctatgaggtcttcatgggcattggggggatgaaggctgacctgaggaccctcaaacagctggccatgaactctatcaagtacagtaccctgttggagagtgagaaaaatactttcatggaaatctggaagaagagatgggataagttcatagcagatgtggctacaaagtgaggagaagctagccagccctctacaagctgtcttcttgcacacgctgtcacttcctctcactcgttcttgaatcagctccatgtgcccatgaaatcaatggcctctgtatggagcgaccctgtgagaagcacttggctggctgagcaaattcatcctctggaaatattctctctcagccacagtgacattgaccctcttggttttctcctgtctctggccatttcttccagtttccctatttcagagtcttctcctctctctgatctctgtgctgtttcctcaggactcagtcctgggctctcttctattctggtctctttatttttttatttttgtattttttcgagatggagttttgctcttgttgcccaggctggagtacaatggtgcgatctcagctcagtgcaacctccgccacccgggttcaggcaattctcttgcatcagcctcgcgagtagttggaattataggcatgtgccaccacacccagctgatttttgcatttttagtagagacaggttttcaccatgttggcgaggctggtatccaactcttgacctcaggtgatccactcgccccttggctcccaaagtgctggaattacaggcattagccaccatgcctggcctattctggtctctttaactctctcctctttatttctcttctctctctgtacacttttcctgggtggtctcatccattcctttgctttttcataccatttatttgttaatgattcccacatttatttatgcacttggagagctcacaggaatctcagaaactgatgaggtacaattctgaaccctcagtctcttccctttaaacctttctttttctctactttaatttttctaaagagtgtcttgctatgttgcccaggctggtctccaactcaagtgatcctcctgccgcagtctcccgaagtgctgggattactgacatgagccaccacactcagccctttaaacctttccctggcctttcccatagctggtgaaggacacctccatccattccacgcagttgctcaaagcagaaattttcagtgcaagtcttgatgctgcgccgtcccccactccctacatcagaacgcatccctcatctggactccagcggtggcttcttgatgctgcgcggtcccccactccctacatcagaatgcatcccgcatccagactccagcggtggtgctctacctgcacgctgttgccaagtccaagctaccatactcctgcctgagctatgacaacagcctcctcactgatctcccctttcttccctttgcctcctccagctcatttttcacagtgtagaatgacattttgtttgtttgttttgttttgtttgagatggagtctcgctctgttgcccagggtggagtgcagcggtgcgatctcggctcactgcaacctccacctcccgggttcaagcggattctcgtgcctcagcctcctgagtagctgggattacaggcatgcaccaccatgcccggataatttttgtatttttagtagagatggggtttcactatgttggccaggctggtctcgaacacctgacctcgtggtccacccgcctcggcctcccaaagcactgggattacaggcgtgagccacccggcctggcctagaatgacttttaaaagatcaaattaaatcaggtcactcctttgcttacaacgcagtgcgtttagaggtacaccccatgtctccacagggcatacagcatccgatttaatctggatccattccggcgccttcctctcccagtcacccagagggccccaaccccggcggccctttcttcctcaaatgtcctcggctctataccgtgcctgggtcttttctctttctctctgcctggaagattccttctttccccttttgtcttgcccactcctgtttacccttcaagtttcaagttcatgtcactgtctcagagaggttttcctgtgctcgccctgtttctctcaggaagccttgctcttttccatcatgcctctaatcacagcttataatcggatatttatttctgtgtctacagtcttgccctgccagactgtatgccccatgtgggcaggcgctcatgattgtttctgattgtttcacgcatgctgctaacccagagcctgggcccaaagctagttagtactcaataaacaatgcattgaatgcattgaaaaaaaaaaaaaaa

SEQ ID NO: 4377 - DNA, 955 bp, Homo Sapiens
  NM_017425
tcgccccttctcggccgccgtagtttttttttttttttaaagaaaaaacggttacccagcaactagaaaaacaaccggaaccggcggcaccagctcggagagaaaggaggttccataggcagttcttaccaagaagatgtcgattccattctccaacacccactaccgaattccacaaggatttgggaatcttcttgaagggctgacacgcgagattctgagagagcaaccggacaatataccagcttttgcagcagcctattttgagagccttctagagaaaagagagaaaaccaactttgatccagcagaatgggggagtaaggtagaagaccgcttctataacaatcatgcattcgaggagcaagaaccacctgagaaaagtgatcctaaacaagaagagtctcagatatctgggaaggaggaagagacatcagtcaccatcttagactcttctgaggaagataaggaaaaagaagaggttgctgctgtcaaaatccaagctgccttccggggacacatagccagagaggaggcaaagaaaatgaaaacaaatagtcttcaaaatgaggaaaaagaggaaaacaagtgaggacactggttttacctccaggaaacatgaaaaataatccaaatccatcaaccttcttattaatgtcatttcttcctgaggaaggaagatttgatgttgtgaaataacattcgttactgttgtgaaaatctgtcatgagcatttgtttaataagcataccattgaaacatgccacttgaagatttctctgagatcatgagtttgtttacacttgtctcaagcctatctatagagacccttggatttagaattatagaactaaagtatctgagattacagagatctcagaggttatgtgttctaactattatcaaatgaataaatcctctctatcacatcccccaaaaaaaaaaaaaaaaaaaa

SEQ ID NO: 4378 - DNA, 2358 bp, Homo Sapiens
  NM_017426
ggcctcttaggctaggtcagaaaggaggcggaactcggtgatctgactggcggtttcccggccggactgagaaggggagcgcgctgcgcgtcgcaggagtaacctacttggtctcctgctttcgcgacatggccttcaattttggggctccctcgggcacctccggtaccgctgcagccaccgcggcccccgcgggtgggtttggaggatttgggacaacatctacaactgcaggttctgcattcagcttttctgccccaactaacacaggcactactggactctttggtggtactcagaacaaaggttttggatttggtactggttttggcacaacaacgggaactagtactggtttaggtactggtttgggaactggactgggatttggaggatttaatacacagcagcagcagcaaactacattaggtggtctcttcagtcagcctacacaagctcctacccagtccaaccagctgataaatactgcgagtgctctttctgctccaacgctgttgggagatgagagagatgctattttggcaaaatggaatcaactgcaggccttttggggaacaggaaaagggtatttcaacaataatattccgccagtggaattcacacaagaaaatcccttttgccgatttaaggcagtaggttatagttgcatgcccagtaataaagatgaagatgggctagtggttttagttttcaacaaaaaagaaacagagattcgaagccaacaacaacagttggtagaatcattgcataaagttttgggaggaaaccagacccttactgtaaatgtagagggcactaaaacattgccagatgatcagacagaagttgttatttatgttgttgagcgttcgccaaatggtacttcaagaagagttccagctacaacgctatatgcccattttgaacaagccaatataaaaacacaattgcagcaacttggtgtaaccctttctatgactagaacagaactttctcctgcacagatcaaacagcttttacagaatcctcctgctggtgttgatcctattatctgggaacaggccaaggtagataaccctgattctgaaaagttaattcctgtaccaatggtgggttttaaggaacttctccgaagactgaaggttcaagatcagatgactaagcagcatcaaaccagattagatatcatatctgaagatattagtgagctacaaaagaatcaaactacatctgtagccaaaattgcacaatacaagaggaaactcatggatctttcccatagaactttacaggtcctaatcaaacaggaaattcaaaggaagagtggttatgccattcaggctgatgaagagcagttgcgagttcagctggatacgattcagggtgaactaaatgcacctactcagttcaagggccgactaaatgaattgatgtctcaaatcaggatgcagaatcattttggagcagtcagatctgaagaaaggtattacatagatgcagatctgttacgagaaatcaagcagcatttgaaacaacaacaggaaggccttagccatttgattagcatcattaaagacgatctagaagatataaagctggtcgaacatggattgaatgaaaccatccacatcagaggtggtgtctttagttgacagttcacaaacttgtgtaaaggtttgtgaaatgcatcttcttactgcatcagaccttccttaagaatgaaaccgaccacatggagggaaaaagaaaacaattctttcttggattggttttttgagaagtttactgacaaattactgttcatcaaatctgaaatagtcacctcacagctcttcaaagaaaacctttgaaagatttatatctaaaagctgtatttactttaaaagaagtgcataattaccaaaattgtatgtactattgtacatttttacaacagcattttcttaaacataatctgtgtttaatgattattgtccattgagcctgtactctgctttccataccaagtaaatatgaaataatctactttgcacataacagaacaaactataattacttggctgttggagatttgtacttgagtataaatgtacaccagtttttgtatttgtgaactcatctgtgggaggagtaaagaaaatccaaaagcatttaatgttttgtttttgttctataaagatatgaaaatgtatttttatattattttacttatttggaatttacagagcacacctaagcaattaggatataacaaaactacttaaccatttttgcaaccattttgttttttaagcctttttatttctaaaaagatgaaaacttataaataaattcttaatttgtaattacttttaaaaa

SEQ ID NO: 4379 - DNA, 2288 bp, Homo Sapiens
  NM_017443
cctaaagggatccgccccgccgagtcagccacgccttcgtctcccacgcgctgcgcccggccgcgccgtcacccagcagcggcgcagggcaccatgggaaacggacggaagctccattgagccaaataagttggccacgtggggcggaacggaaacctcgcagggtcagaccgtagcgacgcgggaagtccggacgcagtagctccctgaagcggaggcgaaggggagtttaagccccagcggcggcaatggcggagaggcccgaggacctaaacctgcccaatgccgtgatcaccaggatcatcaaggaggcgctcccggacggtgtcaacatctccaaggaggcccggagcgccatctcccgcgccgccagcgtcttcgtgctgtacgccacatcctgtgctaacaactttgcaatgaaaggaaagcggaagacgctgaatgccagtgatgtgctctcagccatggaagagatggagttccagcggttcgttaccccattgaaagaagctctggaagcatataggcgggagcagaaaggcaagaaggaggcctcagagcaaaagaagaaggacaaagacaaaaaaacagactcggaagagcaagacaagagcagggatgaggacaatgatgaagacgaagaaaggctggaagaagaagaacagaatgaagaggaagaagtagacaactgaaaagggcgggagactgtggcaccttggaaggtaccacttgaaatgagacgtgctacgtgtttctgtgaagcttttccatgctgggcagagtagtctcaggcaaaagtgcctgaaaagatcagaataaaaactgactagaaataccgtcaaaaccagcacttaccaaactcagagcatctgagtagcagaatcctgttttgcttcatcaatctgaaggttatggccttttgacaagagggattctgaacgactaaattagtcagtttgctcgcttttgtttacttaaatgtatggttagatggtttttgatctgcagtcttccctagtcccccaaataagtaataataacttccatgctgcctgctgtgttccagatcacagaggcagccaaggctcaggaaaaactggggctttgcttatggtcagcctatgtttgattgcacagtctttgacaatagtagcttactaagactgctcagaatgagtaagctttaggaaactactaaaatgctgtgggagaataacaaaatccgttctctctcttcacttgacagaagcattaactgaattttgtttttcatagacccacttggcccaaaacctttctatattgcctgtagatgatcggcctgctggtgtggtagtaatctgatcacagatattcttaaatcagcagtgtggaatggtattagtcaaacatggtgccagtgtcttttacaaaaacagatggcatagtgtcagatgtaccttactctctgctactgtacagctttaggatttgtcatcacctcccggaaggtgtaaaaccccaggcttcctcttcttgtagtccatctcccagacttgtgactatggcttttcattcttcaattcatgacgagtgccaaacttgattttctctaggcacagctttctccctctgtgcctcctgcttcctttctctctcctgcctctcctctgctccccatcccactttctcatctgcctccttttctcacttctgtcagtctgtaagctttgataacctgcttaatactccaaagtgtgagttcctctgatctcttgattccttagttctaatctcacgttttgtttttaagagatggagtctctcactctgtggcccaggctggagtgcagtggcatgatcatagctcattgcatccttgaaatcctgggctcaggtgatcctcccgcctgagcctcctgagtatctgggactacagatgcgtgccaccaagcctggctaattttgtctcatgtcttctaaaaattattttgtgaagccccttcacaaaaaaccttaagggaaatctgatggtgctcaggaatctaactctccctaaaccatcctctttaactgcttctaaaatatctctgttggcctttcttagcctttttctgtttccattcagtgctccaagcgctttttgtttctaagttgagtgcttggggtttgacaggtagtgacgtgtagtttgacactgttaacttgttaaatacagtgaaaagtttgtgagtgaagaatgctgagaagattgtaatgctttgtacaaataaaagtcttgttaaaaaaaaaaaaaaaaaaaaaaaaaa

SEQ ID NO: 4380 - DNA, 2500 bp, Homo Sapiens
  NM_017444
gcagatcgggggcgcgaggcctcacggagctcgtagtttcccggacgggccgctcccggcctcgcggcctcgcctccccacactacaactcccacggggcagcgggcgcggctccccgtacccaccagctggccgggcagggcagccacttcgcggtcgggcccgccggctgcgggcacccgcgcgacgggcgggaagatggcggacgtggtcgtgggtaaagacaagggcggggagcagcggctcatctcgctgcctctatcccgcatccgggtcatcatgaagagctcccccgaggtgtccagcatcaaccaggaggcgttggtgctcacggccaaggccacggagctctttgttcaatgcctagccacctattcctacagacacggcagtggaaaggaaaagaaagtactgacttacagtgatttagcaaacactgcacagcaatcagaaacttttcagtttcttgcagatatattaccaaagaagattttagctagtaaatacctgaaaatgcttaaagaggaaaagagggaagaagatgaggagaatgacaatgataatgaaagtgaccatgatgaagctgactcctaaaccaaaagtgctttaaaaaccagcctggcgaggacagccctggacccactccactgtctctaagtaaacacagcactgcccgcttttagcgtcttcacttcttcacagagttccagtgtgtggtattctttcgaggtattctttccaggccgagattgagcacctcatgtacctacgccacagacagccagagggaaagcgacccagacagcagcccctcctcgacaggcccaccctgcagctcaggcaccaagaaaacagccgatactggcagccattgcagctccaaactgcagaggcaaggccaattttaacttttcaatttacagtcgattttgaagagcttctacatatcggttatgtaaattcatatatgtatattttggaatcagttcttataaacagctcgattcagttttagctaaatttatagtttaggtagtatgttacatttgaatttttgtcttaagaaaagttgactgttcagatatttttctactgtaaagaaatatacttttctattaaagatctgtacatatttttacagtaaaatgctttatggaactagttttagagccctctatggctttaaggccttgcttactgcctgcaaattttgagaaatttaaaaataagcattctaacacttttattcccacagaaaaattccaagtcaaattatcaaatcaaatacaaaaataagtcttacctcttgtataagcatgttgtactaaaaaaaaattttgaaacattttgtatattggagatctctctcatcttactgttctttgctttaaattcctggcacttctttttactgtctataagagaaaacctatcataagcccaattttttttttccacttagggtaaatgtttggctcctctcatttcattatctttttttttttttttttaaagacagattctcactcagttgcccaggctggattgcggtggcgctgtctcagctcactgcaacctccgcctcccaggttcaagtgattctcctgcctcatcctcctgagtagctgggattacaggcgtgtgccaccatgcccaacctatttttgtattttttagtagagacggggttcaccatgttggccaggcttgtctcaaactcctaacctcaactgatccacctgcctcagcctcccaaagtgccgccgggattacaggcgtgagccaccatgcctggccttcattatctcttttttaaaaatgaaaaagtttataatttacattcagtaaaatcaccctttttagtgtctagtctgtgaattttgacaaatgcatggttttgtaaccaatcgataggacagttctgccacccaggacattcccctctgttcctctgttcctctcttctcctgccccctagcaaccactggtgttttctgtccctcttgttcattgacatttattttaaaataaaatattttaaaatctactttttggtgtacagttctgagttttggcaaatgcagtcaagtcactaccaccaccacaattaacagctatatcaccctccagtaaattccctgtggtcagctccttccccaccttttaccgtggcaaccgtcaagctattctctgtccctataccaggtgtcatcaaatttttttctggaaagggccatgcagtaaatagttcaagctttgtgggcttttatagtctctgttgctgctgctgaactcagctgttgtagcacgaaagcagccaggtaattactagatgaaggaatgcaggtggctgtgtttcaatagagctttatttctgcaaactgaaacttgagttttgtgtaattttcatgtgtcatgaaatactgttttctccaaccatttaataatgtaaatacttgctagcttatgtgccattaaaaaatgacttgatttggcttac

SEQ ID NO: 4381 - DNA, 1082 bp, Homo Sapiens
  NM_017446
ttctcaccgctgctatggaggcgctggccatgggttcccgggcgctgcggctctggctggtcgcacccggtggcgggatcaaatggagatttatagcaacatcgccagcttctcagctgtcaccgacagaattgacagaaatgcggaatgatctctttaataaagagaaagccaggcagttatcattaactccccgaactgagaagatagaagttaagcatgttgggaaaactgaccccggtactgtcttcgtgatgaataaaaacatttcaactccctacagttgtgccatgcatttaagcgagtggtattgcaggaagtccattctggctctggtggatggacagccttgggacatgtataagcctttaacaaagtcctgtgaaattaaatttcttactttcaaagattgtgatccaggagaagtgaataaggcatattggcgttcctgtgctatgatgatgggctgtgtgatagagagggcattcaaagatgaatatatggtcaatttggtcagagctccagaagttcctgtaatttctggtgccttctgttatgacgtagttttggatagcaaacttgatgagtggatgccaacaaaagagaacttacgttccttcacaaaagatgctcatgctttaatttataaagatcttccatttgaaactctggaagttgaagcaaaagtggcattggaaatatttcaacacagcaagtacaaagtagatttcatagaagagaaggcatctcagaaccctgagagaatagtcaagctacacagaataggtgacttcattgatgtgagtgagggccctcttattccaagaacaagtatttgtttccagtatgaagtatcagcagttcacaatcttcaacccacccagccaagtctcatacgaagattccagggcgtgtctttacctgttcacttaagagcacattttacaatatgggataagctattggaaagatctcggaaaatggtaactgaagatcaaagtaaagcaacagaggaatgtacatctacctaataactttctaaaatttaaatatgtataataaaataaatgttttaaatataa

SEQ ID NO: 4382 - DNA, 5448 bp, Homo Sapiens
  NM_017447
gcggccgcctctgctgcggccggaaacaatagtggaggaacccgagccgcacggaacggcggtggtggcccgcggagccggacggggcactatgaacgaagaggagcagtttgtaaacattgatttgaatgatgacaacatttgcagtgtttgtaaactgggaacagacaaagaaacactctccttctgccacatttgttttgagctaaatattgagggggtaccaaagtctgatctcttgcacaccaaatcattaaggggccataaagactgctttgaaaaataccatttaattgcaaaccagggttgtcctcgatctaagctttcaaaaagtacttatgaagaagttaaaaccattttgagtaagaagataaactggattgtgcagtatgcacaaaataaggatctggattcagattctgaatgttctaaaaacccccagcatcatctgtttaatttcaggcataagccagaagaaaaattactcccacagtttgactcccaagtaccaaaatattctgcaaaatggatagatggaagtgcaggtggcatctctaactgtacacaaagaattttggagcagagggaaaatacagactttggactttctatgttacaagattcaggtgccactttatgtcgtaacagtgtattgtggcctcatagtcacaaccaggcacagaaaaaagaagagacaatctctagtccagaggctaatgtccagacccagcatccacattacagcagagaggaattgaattcgatgactcttggtgaggtagagcaactgaatgcaaagctcctacagcaaatccaggtttttgaagagttaactcaccaagtgcaagaaaaagattctttggcctcacagctccatgtccgccacgttgccatcgaacagcttctgaagaactgttctaagttaccatgtctgcaagtagggcgaacaggaatgaagtcgcacctacccataaacaactgacctaaacagacttacttcgtatgccctgccctttattggtctcccagacatgcaaactttgaagaagtttgaagaaagttgtggtccgtttttttatggtcattaaatttgccaaacataaggcagtatttaacatctttgtcaaataaagcagatcattatactctagtcttctagggctaatcattttggctcatttggggactcttttttcccagaattactaaacaaattttatcacatgtgactacttaaatatactgttacagtgtcattttattaaacattttaattcacctgtcaaaacaacagattaactccttagtgtaaactactagagataatttttaagagggaaatggaattcatatcacctcttatttattatgagcaatattttaatataaaaattttatatgtgaaaatgctattttaggtactttgccattctctttataaatgtgtatttgagtggttctgtatatttatttacattatcatgtgtgaatatgttcacccatatttcaggtcactgcattttattctcttaatacaatgttttcacaacggttaccttgctttccaaagataaatatattttggattagaaatctgagttgttttaatttctaatacctcttgtaaaagaagaattaataactttttaaagcagtattcaggtaaatacaatacattattttgttttctaacaaaagcagttcttagttcaggaagaaaagactaatctggcttctatgtcaatttgtctccatagaaatgaaagcctcctcttgcttctttcattattagcttcacaccagtgactgtgatgcattagaatttggacagagtaagtcaagcctcacttccaattcaaatataatgtctatcttcaaattgagtgtgctgtgaaattgttctgtctttgaaaaaaaaaagtaagattattttgtgtgccactttgggtaaagtttcaagaatacttaaactgtccaaattgtattatcaccatcattgaacttagtgctcaaagaaagcattgtgaggtatttttctaaactttagactctatagagaaatataggattgttctacagaagaaaagcaaaactcctaattaaaaaaaaataaacctatgtattaagagaatgttctcgtaagttgcctatgatgcttccaaagagtttttatctaacagattgtgccaaacagctagataaattttaataatgtattacagtaaaggctataaccaatgcagaattaaaatgggctctaaattctgtttttaactcatgtttagaatgtacttatgaggtagatccttgcttgaaagtatctgctgaaaagcccagtaacgtggcagcttcatgcataaagatataaatgacatttgccttaaatttggcagcctaccctggcttgggtcagattttgttgttgaacacaagaaagtatttaagcaaagaaacacttcagtttaattgaaaacaactttttgtaatgctgacgtgttaaattggcctgagggtattaattgatatctgttgattttgtttttctttgaagtataacattactttttggagggaatttttgaaagatgctttcgatttctctcaattctttaagtcatgcaaaatgaatttaaaatccagggagtatggatgcattgccttagttttgatgagctttaaattaaatgtgtgcaatatcaaaatattcaaacttacaagctgggtaaatacatttcctgattaatatcttagtgcttaattgttcccacattttcaaatttgactttactcttttttggcgtaattcagtaagattgttaccagccagtgtgtttgcacacatttgggtttgtgtttagatgagttagggacagtcataaaagttggggatatgttgcatttgatatcaatagtagcatatttccagaatatgagccataagttgcagtcctgaatacaacagtgttatccaaagaaaggagttttctgacaaatatacatagctttgctaatgagtacggaacaagtggatgaacgtgtgcatgtgctaaggtcttaagtgggactctgatttattccatttagatatttctacttaagctctaaaaaggagaggtgctcttaaaaaaaactttgtggtgctggtactcacactactttatttggatgagttcctagtaaaaaaaactttttgttgaagtattttgcacagcagtttatccaaatgtttggtaaacttataatttagtcctatgttagttttcttaatcaaatatgcaattactgtgtatgcaaatataagtatcaggtacagagttgagttctaacaagagaacatgaaatatcacaaatattgttttccacacttggctattctctacagttgttagtaatttttgagaatgttttgaagcatatctcatgtactactgtttaaaaagtggcaaaacagactgccagtcatccattactaaattttcagagcttatatgattaaggggagtgagataagacaaatctttttcacgttcagttttataatttgacacgttaaattgagttttaaaaattagaaaagtgtttttgaccacacaggttgttctctttaaagttcagccttataatgaagctaaaaatcaattatgttttactttgagattatcatcttatcctttgatcctcatattaatatctaaattagtcttttttaaaaggcatgcacttgagactccagtaatagatgattcaggcagcagaatagtgttttgttgtgtcgttgactatgcacaatggtggagcaaagacacattcttagtttttcaaaacacatgttcattttaccacaaagtgcccatttttatatacatttaaggattattttttcaatgtcaagttcatgttagtgatttcagaaatatagtcaaaatatatagtcaaatatatcttgacaggcatcttgagatttggtttttcattttactatatttatgactgaaaatggttttgtgttttctttatgttgtttatatattttttaccttagtgtttacactggtaaggcttgttagtccatttttgtagtttttttaaagtaagcttttagatctatttgtgttttaatgtttcccagtttgggttttgttttgttttggaagaatctgctttcattattaaattataaaatgtaaatgctctaaagtaggaatttttaaagagtaaattatttgtgtagcttattaggaggttcaggttagtgaccataaagtgggttacttgtacatgaaaatttgaaatggtaccatgtaaaattcttctattgtcaactttttctgatgtatgccagttcatttactgacaaatgttgttactaagtgcttattaagaagtgtaatacgctataaaaaagttaatactttttgttcagatgtaaggcaaagataattgatgccgtttcagtgtatgattgtatttttaacttttacgttggtgggagtaactatttgaggaaatttgtggtgagaattagtaagagataaaacccccaacagtttattcttaccaagtaaagttttgtggtcatggggcagggaagagtttatttaccagaatactagagccctcacacaaaataaaggtaacttggaggagggctataatgcttgcatctcagtattttcatttcacttcatcctttcataattgccttgattatggtgcagtctaacctattaagcaacttctggctatggtaacattgatatgaaccatattatatcaagtctccaaaacatctagtttgttaacatacactttccctgttctttttagtttgagtccacattactaatacattttaataatatttaattatttcacaattttaagtttaccaaagtaaacaaaaattcatgaagatgagtattgccctctcccaaaaaaggtttaaagattagttgaacttccctcaactacacctaaagcaaaggggaattttagtaagtgtgtgtaccttgtttctttcagacgcatctagaatgtttttctttcaccgtacctccaaaagaggcaatttagaaagtattaagtagtgacttttgttcagttccattttgtgtgtgtgtgtgtgtgtgtgtgtgtgtgtgtgaaccttgctttaaaacagtagcgtatactatggtcattgaacttaatctctctggtgttagaaatttactttacaaaattgtgttaagacttttggaaaaagaaaatgaaactgctgtggtaaaaaccaagtttgtttcaaaaaagtaggcaattatttggctgttatattttctttgaaaactgcaataatttatatatttgtattgctctgcttgggaactgtatatatgcttgtctactatttttaattttacaacaataaaataagtattttgttatctgctaaaaaaaaaaaaaaaaaaa

SEQ ID NO: 4383 - DNA, 3324 bp, Homo Sapiens
  NM_017454
acttcctgccgggctgcgggcgcctgagcggctcttcagcgtttgcgccggcggctgccgcgtctctctcggctcccgcttcctttgaccgcctcccccccccggcccggcggcgcccgcctcctccacggccactccgcctcttccctcccttcgtcccttcttcctctcccttttttccttcttccttcccctcctcgccgccaccgcccaggaccgccggccgggggacgagctcggagcagcagccagaaagcataacccctactgtagaactaaatgcactgtgcatgaaacttggaaaaaaaccaatgtataagcctgttgacccttactctcggatgcagtccacctataactacaacatgagaggaggtgcttatcccccgaggtacttttacccatttccagttccacctttactttatcaagtggaactttctgtgggaggacagcaatttaatggcaaaggaaagacaagacaggctgcgaaacacgatgctgctgccaaagcgttgaggatcctgcagaatgagcccctgccagagaggctggaggtgaatggaagagaatccgaagaagaaaatctcaataaatctgaaataagtcaagtgtttgagattgcacttaaacggaacttgcctgtgaatttcgaggtggcccgggagagtggcccaccccacatgaagaactttgtgaccaaggtttcggttggggagtttgtgggggaaggtgaagggaaaagcaagaagatttcaaagaaaaatgccgccatagctgttcttgaggagctgaagaagttaccgcccctgcctgcagttgaacgagtaaagcctagaatcaaaaagaaaacaaaacccatagtcaagccacagacaagcccagaatatggccaggggatcaatccgattagccgactggcccagatccagcaggcaaaaaaggagaaggagccagagtacacgctcctcacagagcgaggcctcccgcgccgcagggagtttgtgatgcaggtgaaggttggaaaccacactgcagaaggaacgggcaccaacaagaaggtggccaagcgcaatgcagccgagaacatgctggagatccttggtttcaaagtcccgcaggcgcagcccaccaaacccgcactcaagtcagaggagaagacacccataaagaaaccaggggatggaagaaaagtaaccttttttgaacctggctctggggatgaaaatgggactagtaataaagaggatgagttcaggatgccttatctaagtcatcagcagctgcctgctggaattcttcccatggtgcccgaggtcgcccaggctgtaggagttagtcaaggacatcacaccaaagattttaccagggcagctccgaatcctgccaaggccacggtaactgccatgatagcccgagagttgttgtatgggggcacctcgcccacagccgagaccattttaaagaataacatctcttcaggccacgtaccccatggacctctcacgagaccctctgagcaactggactatctttccagagtccagggattccaggttgaatacaaagacttccccaaaaacaacaagaacgaatttgtatctcttatcaattgctcctctcagccacctctgatcagccatggtatcggcaaggatgtggagtcctgccatgatatggctgcgctgaacatcttaaagttgctgtctgagttggaccaacaaagtacagagatgccaagaacaggaaacggaccaatgtctgtgtgtgggaggtgctgaaccttttctggccatgaaccattataaaatcccaacatatatactgaaaatactgaaactgctttgaaaatttggaatttctgatacctccagtgggccgagagacacggtgggtaaaggatgtgggcagcagcagggaagacaacagaaacacaaggaggcggctgtggccgggctggactgtgctggggtttgttgtgatggccactcggtgacctggcggtccctacgcaatagcagctgcctgtggggaagaagggctgcccagccagctggttctcccgggacaccagcagatccacaccctgggcacctccgtgtttggtcttttttttcccctgtgtgaaagaagaaacggcacgaccccttctcaagctggctcactcagacacattgggacaaaccctggacagccatgccagagagaggcctttgaccggccccagagctaaaagcaccagagaaaatcaaatgcttcctactcagcgtgacccaacttttctagtgtgccacggccccaccacctcctgcagtacccacaccatcaccactgctttctcttccaacagtgatctgtattcttagtttcattattttcttttgattgatatgacactatataaaattttcatttgagaatttctcaattgtatctagttaaatagcacagtttggaaacttgtctgagactgactttatcaataatctaaccgacaaagatcatatccatgtgtatgtggttagacatttttatttcattgactaacccaggacagtttcagtgatgcaaattgtgtgccctctggttcagctgaaacagtcctggactttcaaaaaccttgaataagtctcccacagttgtataaattggacaatttaggaattttaaactttagatgatcatttggttccatttttatttcatttttatttttgttaatgcaaacaggacttaaatgaactttgatctctgttttaaagattattaaaaaacattgtgtatctatacatatggctcttgaggacttagctttcactacactacaggatatgatctccatgtagtccatataaacctgcagagtgattttccagagtgctcgatactgttaattacatctccattagggctgaaaagaatgacctacgtttctgtatacagctgtgttgcttttgatgttgtgttactgtacacagaagtgtgtgcactgaggctctgcgtgtggtccgtatggaaagcctggtagccctgcgagttaagtactgcttccattcattgtttacgctggaatttttctccccatggaatgtaagtaaaacttaagtgtttgtcatcaataaatggtaatactaaatttttttgttaatttattctcaaatgccactactgctaggttggtcccctcccaacttgcccctatcctttttttatttttaagaaaaaaactttgtaatgcttgtgattccatctgggcaaaagtctgaagatctgaaataactttatatcaaaccattgatcaataaacagctactaatgaaaaaa

SEQ ID NO: 4384 - DNA, 3308 bp, Homo Sapiens
  NM_017456
gcgagcgggggcgcgggtggcgcggcgggacgcgagcggcgagccggagcgcggagcccggctcccgcaccatggaggaggacgacagctacgttcccagtgacctgacagcagaggagcgtcaagaactggagaacatccgacggagaaaacaggagctgctggctgacattcagaggctgaaggatgagatagcagaagtagctaatgaaattgaaaacctgggatccacagaggaaaggaaaaacatgcagaggaacaaacaggtagccatgggcaggaaaaaatttaatatggaccctaaaaaggggatccagttcttaatagagaacgacctcctgaagaacacttgtgaagacattgcccagttcttatataaaggcgaagggctcaacaagacagccatcggcgactacctaggggagagagatgagtttaatatccaggttcttcatgcatttgtggagctgcatgagttcactgatcttaatctcgtccaggcactacggcagttcctgtggagcttccggctacccggagaggcccagaagatcgaccggatgatggaggcgtttgcccagcgatattgtcagtgcaataatggcgtgttccagtccacggatacttgttacgtcctctcctttgccatcatcatgttgaacaccagtctgcacaaccccaatgtcaaagataagcccactgtggagaggttcattgccatgaaccgaggcatcaatgatgggggagacctgccggaggagctcctccggaatctctatgagagcataaaaaatgaaccctttaaaatcccagaagacgacgggaatgacctcactcacactttcttcaatccagaccgagaaggctggctattgaaactcggtggcagggtaaagacttggaagagacgctggttcattctgactgacaactgcctttactactttgagtataccacggataaggagccccgtggaatcatccctttagagaatctgagtatccgggaagtggaggactccaaaaaaccaaactgctttgagctttatatccccgacaataaagaccaagttatcaaggcctgcaagaccgaggctgacgggcgggtggtggaggggaaccacactgtttaccggatctcagctccgacgcccgaggagaaggaggagtggattaagtgcattaaagcagccatcagcagggaccctttctacgaaatgctcgcagcacggaaaaagaaggtctcctccacgaagcgacactgagcgtgcagccaagggcgttggtctgcgggggccttggagctcctgctcttctcccgcacctccatggatgcactgctgccgagcagagcgtcctctgccaggccccgccctggattcctagagactagcttcagcttttgctattttttttaagtgggagaagggtgggcagttatcactggggaagagaggaccggccacctgtccagcatgggctccagagccttcctctctcacagggcagagctcttgtcggcagggcagcctcctggccagtttctctgctcagtgttctggtagcagagctcagagccaactgtttacctcttggttgtccccgtgaagaagccttcaaaccctgcaccataaatacatgtgtccatatattattatatgttaagagaaaaaggtggaaaggaagagaagccacatactataaagatctatttttttttttttaagagagaacgtagggctgttcaggtgcattctgccctggctgcgctggggagcttctccctggagaagagcacctggggctgcggccaaggggcatcagcctgggcccgcggcagggcctggcctgcctctcctgtgctgtgggagctcgctgcctggtgcttgtctgggcgagatggacaggtgaggtcgaggacgcagagggcagaggcccagtggagcctcagacggcacagtcagagtcgggggcctgccctggccggggtcgcagtcggcagcagcgtgcagtccggcatctcccgcggatgcttttccatcccaagtgcctgcggagcgccgaggagaggagagagctgactggacgcttacgttattttcctccttcagaatccaagttcttgttgggctttaaagtagaaagtcagcattttccttgagctaaatacctaataaccaaaactgtgaggaaggttatcgggacagaggttccggataacctgtttcattttgggttttcttcctcttccccagactccagtcctcgttctagaggaaggagtaggacttccccgatccccgtagggcttcagctttttctgcctcaaaaccagccctaactggactactctggatgcattttgtggtgggccccctagaggggaagatgggcctttatctgctccgtggggtgcactggagtgaggggggtggccgggctgcctctcgcatctctgtcttcccctgcaggcgctgtgtgagctggccctgcccctcctcattacagtatgaagggagccgtgacacgcagcattttcctgccgttctctcagggactctcagggcagctcctgccactccgccagggccagcatgccagtccaggcagagcaggtggctggctgtctggccgtctcgccccgcccctccacaggaccctggaccagggcggtgcagggcgcagccctgaggaggcaggtggaggagctgcgggttttcacagggccgcgtcgccacggctcctctgatcctttagggttggcgagcatctctggaaatagcttttgcagaggagtggtgggaggaatagagggggacagtctgtcacctccctccccgccactttgtgtagatcctacctggagggaatggctttaggcacttttgtgccagagcttgtgagggtgacagaagagggtccaggctggaaacctgaactttctgggtgggagaaccaggtggtgcctgccgaggtctgggcgtgtttgggccggtgctggagcctgtccagctggcccgggccctggcctggttctcaagtgtttcctagacagagaggcacctgggtcagtattagtctatttatcagaggtgtaaataatctatgtatagtttttctccttttagattattttgtatttgtttaaaagaagttttgtcaaaatacaaaaatataaagaaatgactgaaagttgttgacagggtttttaagaaataattattctaattgtttttgtttgtttgtttttgccttgtaaactagcgccaaggaactgcagcaaataaactccaactctgcccaagcca

SEQ ID NO: 4385 - DNA, 2943 bp, Homo Sapiens
  NM_017458
aactcccaagccccacccctgggcttggcctgccttgccctgccgggaagtgatccccaaggcagggtgagagttccccatctgaggcgtttgttgcagctacctgcacttctagatgctccccaggttcatcctgtgtcgtctcccccacctaccagtcatcttcttgtgagccctgggcttaggagtcaccatggcaactgaagagttcatcatccgcatccccccataccactatatccatgtgctggaccagaacagcaacgtgtcccgtgtggaggtcgggccaaagacctacatccggcaggacaatgagagggtactgtttgcccccatgcgcatggtgaccgtccccccacgtcactactgcacagtggccaaccctgtgtctcgggatgcccagggcttggtgctgtttgatgtcacagggcaagttcggcttcgccacgctgacctcgagatccggctggcccaggaccccttccccctgtacccaggggaggtgctggaaaaggacatcacacccctgcaggtggttctgcccaacactgccctccatctaaaggcgctgcttgattttgaggataaagatggagacaaggtggtggcaggagatgagtggcttttcgagggacctggcacgtacatcccccggaaggaagtggaggtcgtggagatcattcaggccaccatcatcaggcagaaccaggctctgcggctcagggcccgcaaggagtgctgggaccgggacggcaaggagagggtgacaggggaagaatggctggtcaccacagtaggggcgtacctcccagcggtgtttgaggaggttctggatttggtggacgccgtcatccttacggaaaagacagccctgcacctccgggctcggcggaacttccgggacttcaggggagtgtcccgccgcactggggaggagtggctggtaacagtgcaggacacagaggcccacgtgccagatgtccacgaggaggtgctgggggttgtgcccatcaccaccctgggcccccacaactactgcgtgattctcgaccctgtcggaccggatggcaagaatcagctggggcagaagcgcgtggtcaagggagagaagtcttttttcctccagccaggagagcagctggaacaaggcatccaggatgtgtatgtgctgtcggagcagcaggggctgctgctgagggccctgcagcccctggaggagggggaggatgaggagaaggtctcacaccaggctggggaccactggctcatccgcggacccctggagtatgtgccatctgccaaagtggaggtggtggaggagcgccaggccatccctctagacgagaacgagggcatctatgtgcaggatgtcaagaccggaaaggtgcgcgctgtgattggaagcacctacatgctgacccaggacgaagtcctgtgggagaaagagctgcctcccggggtggaggagctgctgaacaaggggcaggaccctctggcagacaggggtgagaaggacacagctaagagcctccagcccttggcgccccggaacaagacccgtgtggtcagctaccgcgtgccccacaacgctgcggtgcaggtgtacgactaccgagagaagcgagcccgcgtggtcttcgggcctgagctggtgtcgctgggtcctgaggagcagttcacagtgttgtccctctcagctgggcggcccaagcgtccccatgcccgccgtgcgctctgcctgctgctggggcctgacttcttcacagacgtcatcaccatcgaaacggcggatcatgccaggctgcaactgcagctggcctacaactggcactttgaggtgaatgaccggaaggacccccaagagacggccaagctcttttcagtgccagactttgtaggtgatgcctgcaaagccatcgcatcccgggtgcggggggccgtggcctctgtcactttcgatgacttccataagaactcagcccgcatcattcgcactgctgtctttggctttgagacctcggaagcgaagggccccgatggcatggccctgcccaggccccgggaccaggctgtcttcccccaaaacgggctggtggtcagcagtgtggacgtgcagtcagtggagcctgtggatcagaggacccgggacgccctgcaacgcagcgtccagctggccatcgagatcaccaccaactcccaggaagcggcggccaagcatgaggctcagagactggagcaggaagcccgcggccggcttgagcggcagaagatcctggaccagtcagaagccgagaaagctcgcaaggaacttttggagctggaggctctgagcatggccgtggagagcaccgggactgccaaggcggaggccgagtcccgtgcggaggcagcccggattgagggagaagggtccgtgctgcaggccaagctaaaagcacaggccttggccattgaaacggaggctgagctccagagggtccagaaggtccgagagctggaactggtctatgcccgggcccagctggagctggaggtgagcaaggctcagcagctggctgaggtggaggtgaagaagttcaagcagatgacagaggccataggccccagcaccatcagggaccttgctgtggctgggcctgagatgcaggtaaaactgctccagtccctgggcctgaaatcaaccctcatcaccgatggctccactcccatcaacctcttcaacacagcctttgggctgctggggatggggcccgagggtcagcccctgggcagaagggtggccagtgggcccagccctggggaggggatatccccccagtctgctcaggcccctcaagctcctggagacaaccacgtggtgcctgtactgcgctaactcctgattaatacaatggaagtttctgggcatttacaatttcaacacttaaaaaaaaaaaaaaaaaa

SEQ ID NO: 4386 - DNA, 3160 bp, Homo Sapiens
  NM_017491
ccgcagccgccgagccgagcgcttgactatatatggtcaaagctgggggcgagccgcgcgcgggaccgcgcttccgggttcggggcgtccgcaaccacagcgcgcagggcaggcgcgagctggcctctgagccccggcctcggaccgcccactccactcccggcacgcccggtgccgccttccggctccagtccccgggctcggcctcggcgaggtgtaattcgcagcgcgggccggccccggaggctctcggcgagcgcggcgcggtaacaagtgggcgaggatgccgtacgagatcaagaaggtgttcgccagcctcccgcaggtggagaggggcgtctccaagatcatcggcggcgaccctaagggcaacaattttctgtacaccaatggaaagtgcgtcatcctaaggaacatcgacaacccagcccttgctgacatctacacagagcacgcccatcaggtggtggtggccaagtatgcgcccagcggattctacattgcctccggagatgtgtctgggaagctgaggatctgggataccacgcagaaggagcacctgttgaagtatgagtaccagcctttcgctgggaagatcaaagacattgcttggactgaagacagtaagaggatcgccgtggtcggggaaggaagggagaagtttggagcagtcttcctctgggatagtggctcttctgtgggcgagattacaggacacaacaaagtcatcaacagcgtggacatcaagcagagccggccataccggctggccacgggaagcgatgataactgcgcggcattctttgagggacccccattcaagttcaagttcacaattggcgaccacagccgctttgtcaactgtgtgcgattctctcctgatgggaacagatttgccacagccagtgctgacggccagatatacatctatgacgggaagactggggagaaggtgtgcgcgctgggcggaagcaaggcccacgacggtgggatttacgcaattagttggagtcccgacagcacccatttgctttctgcttctggggacaaaacttccaagatttgggacgtcagcgtgaactccgtggtcagcacatttcccatgggctccacggttctggaccagcagctgggctgcctatggcagaaggaccacctgctcagtgtctccctgtccgggtacatcaactatctggacagaaacaaccccagcaagcccctgcacgtcatcaagggtcacagtaaatcgatccagtgtctgacggtgcataaaaacggcggcaagtcctacatttactctgggagccacgacggacacattaattactgggattcagagacgggggagaacgactccttcgctgggaaaggccacacgaaccaggtgtccaggatgaccgtggatgagtcggggcagctcatcagctgcagcatggacgacaccgtgcggtacaccagcctcatgctgcgggactacagcggacaaggagttgtgaaactggacgttcagccaaagtgcgtagccgtcggccccgggggatacgccgtggtcgtgtgcattggacagattgtcctgctgaaggatcagaggaagtgcttcagcatcgacaaccccggctacgagcccgaagttgtggcagtgcaccccggcggggacacggtggcaattgggggtgtggacggcaacgtccgcctgtattccatcctgggcaccacgctgaaggatgagggcaagctcctagaggccaagggccccgtgaccgacgtggcctactcccacgacggcgccttcctcgcggtgtgcgacgccagcaaggtggtcacagtgttcagcgttgctgacggctactcggagaacaatgttttttatggacaccatgcaaaaatcgtctgcctggcctggtccccagacaatgaacactttgcctccggtggcatggacatgatggtgtatgtttggaccctgagtgacccggaaaccagagtcaagatccaagatgcacaccggctgcaccatgtcagcagcctggcctggctggacgagcacacgctggtcacgacctcccatgatgcctctgtcaaggagtggacaatcacctactgaggagccccacccccgcctctggatggaccgaatcagggactagagtttaactgcagcggaacatgtcatttctctatttctgtgacgcgcccccatgcccccaccccaccacaagaggcaggagggcccagtcatgaccctcgtctctgcagggtgtctgtacacgttcttctgaaagctttagacagtaacagtttgcacatgaaaaataaagcgagcacctaaacaatgtgtggagcataactaaaacccacagcccaaccaaaccttgagaatgcgaaacattccagaggcagtagcctccaaagcacacagagcccctggccccgccgcggctctcactatctgtcaggggaggttgtacaggtgaatgagccggggggctcatgttcctgcctgcagaacatttctgtactagtgagaagagggaatatgcattgcagttcagcaaagccggaattctgtgttgaacagatgtctgtctccctagtgtgtgactcacaccttgtggctgccttcagagcgccacctccagatcagatggggacacacaacccctggatatgtttcattgtcagattttgtgcttgattttaagaatggaattgtgggtatctttcctttttttttaatgtatcttaactgttgcctgtcagtgtttacaaactagtgcgttgacggcaccgtgtccaagtttttagaacccttgttagccagaccgaggtgtcctggtcaccgtttcaccatcatgctttgatgttcccctgtctttccctcttctgctctcaagagcaaaggttaatttaaggacaaagatgaagtcactgtaaactaatctgtcattgtttttaccttccttttctttttcagtgcagaaattaaaagtaagtataaagcaccgtgattgggagtgtttttgcgtgtgtcggaatcactggtaaatgttggctgagaacaatccctccccttgcacttgtgaaaacactttgagcgctttaagagattagcctgagaaataattaaatatcttttctcttcaaaaaaaaaaaaaaaaaa

SEQ ID NO: 4387 - DNA, 2401 bp, Homo Sapiens
  NM_017495
gcagcgccggtcgggagcgcagcgcggcgcagctcggcgcgcacggcgggagcggcgcgcgagtggtcgggcctggcggctggacgggcgcccctcgctgccccgcgcgctccccgccgccccccatgagcgcagccccgcgcggcccgggtccgtaggcggcggggcgccccccatgctgctgcagcccgcgccgtgcgccccgagcgcgggcttcccgcggcccctggccgcccccggcgccatgcacggctcgcagaaggacaccacgttcaccaagatcttcgtgggcggcctgccgtaccacactaccgacgcctcgctcaggaagtacttcgagggcttcggcgacatcgaggaggccgtggtcatcaccgaccgccagacgggcaagtcccgcggctacggcttcgtgaccatggccgaccgggcggcagctgagagggcttgcaaagacccgaaccccatcatcgacggccgcaaggccaacgtgaacctggcatatctgggcgccaagccgcggagcctccagacgggctttgccattggggtgcagcagctgcaccccaccttgatccagcggacttacgggctgaccccgcactacatctacccaccagccatcgtgcagcccagcgtggtgatcccagccgcccctgtcccgtcgctgtcctcgccctacattgagtacacgccggccagcccggcctacgcccagtacccaccggccacctatgaccagtacccatacgccgcctcgcctgccacggctgccagcttcgtgggctacagctaccctgccgccgtgccccaggccctctcagccgcagcacccgcgggcaccactttcgtgcagtaccaggcgccgcagctgcagcctgacaggatgcagtgaggggcgttcctgccccgaggactgtggcattgtcaccttcacagcagacagagctgccaggccatgatgggctggcgacagcccggctgagcttcagtgaggtgccaccagcacccgtgcctccgaagaccgctcgggcattccgcctgcgccctgggacagcggagagacggcttctctttaatctaggtcccattgtgtcttgagggaggactttaagaatgactgagaactatttaaagacgcaatcccaggttccttgcacaccatggcagcctctccttgcaccttctcctgcctctccacactccaggttccctcaggcttgtgtccccactgctgcatcgtggcggggtgtcacagaccctctgcagcccctggctgccctggactgtgcagagatgcctgactccagggaaacctgaaagcaagaagttaatggactgtttattgtaacttgatcctcccgagctgtgagcgcagtctgaggtgtgaggacacggcctcctgttggagtcccattttctccatcagggcacgtgggcggcttcctcaagcccggaggagctcccaggcgcacaggggccgccggtaacaggggccgccggccaaaggcccctttccagtcatagcactgaagttgcaacttttttcttgtaattgttttgctactaagataatttcagaagttcagtctattttttcagcggatactgccgccaccaagaatccaaaacctatttttgacttggagagacttgcttttgttggttccgcccgtggagacgacgatagtgtttctgtataataaagtgtctgccggctcgcgggccaggatcctctcggtgggatgggcaccacagacaggaggcccctcaggcccgtgcgggccactgtctgctgccgcctgccggggtggcagagtgagttgtctcaggaccccgtcactgcgacgttgacactcctctcccttcccttcctccccaactccccaaacactgtggaaggggagaaggaagtgatccacagcattcaggccacttggggtctagaccatggtggtgccagcctggggggggcagtggccctcagctctgcccgctggagcggttgagtgcagaagggtgcgcctcttccctctacccccgcaccacctgctgtgtgccagcctgagacggttcctgcctgtcttgggggttggtggagggtggaggcagttctgccagccgtggcagggctgctatggggcatccagggctgtgggggtctggaggaggggacatgaggtgagaggtatcctggccgagggcggggggcagcggggggtctccctccggacctacctcagggagctgagcgtgcaggcgctccagggcaggcctgggacagagtcaaggctcagagaataaaggtagctaatctcatcataatatttttattagaatgttctgatgataaaaataaaacttgttttctttaaagaaaaaaaaaaaaaaaaaaaaaaaa

SEQ ID NO: 4388 - DNA, 844 bp, Homo Sapiens
  NM_017503
aggttctgcgagcggcttccgccgggctgctccgcgggcgcgtcggccatgagcgagttgccgggcgacgtgcgggcgtttctgcgggagcacccgagcctgcggctccagacggacgcccgcaaggtgaggtgcatcctgacaggtcacgagctgccctgccgcctgccggagctccaggtctacacccgcggcaaaaagtaccagcggctggtccgcgcctccccggccttcgactatgcagagttcgagccgcacatcgtgcccagcaccaagaacccgcaccagttgttctgcaaactcaccctgcggcacatcaacaagtgcccagaacacgtgctgaggcacacccagggccggcggtaccagcgagctctgtgtaaatatgaagaatgtcagaagcaaggggtggagtacgtgcctgcctgcctggtgcaccggaggaggaggagggaggaccagatggacggtgacgggcctcgcccgcgggaagccttctgggagcccacatccagtgatgaggggggagctgcaagtgatgacagcatgacagacctgtacccacctgagctattcaccagaaaggaccttggaagcacggaggatggggatggcactgatgactttttgacagacaaagaggatgagaaggcaaagcccccaagagagaaggccactgatgagagcaggagagagacgaccgtgtaccgagggctggtccagaagcgcgggaagaagcagttgggctcgttgaaaaagaagttcaagagtcatcaccgcaaacccaagagcttcagctcctgtaaacagccaggttaataaaagcacatgccgtgaagtttcg

SEQ ID NO: 4389 - DNA, 5406 bp, Homo Sapiens
  NM_017512
cgccctcccgccgcgcgctcgggatcccgaccagtcctgaccgcacgggggccgcggccacggggcgcaggggccatggtgcgcggcaggatctcccggctctcggtccgggacgtgcgcttccccacgtcgcttgggggccacggcgcggacgccatgcacacggaccctgactactcggctgcctatgtcgtcatagaaactgatgcagaagatggaatcaaggggtgtggaattaccttcactctgggaaaaggcactgaagttgttgtctgtgctgtgaatgccctcgcccaccatgtgctcaacaaggacctcaaggacattgttggtgacttcagaggcttctataggcagctcacaagtgatgggcagctcagatggattggtccagaaaagggcgtggtgcacctggcgacagcggccgtcctaaacgcggtgtgggacttgtgggccaagcaggagggaaagcctgtctggaagttacttgtggacatggatcccaggatgctggtatcctgcatagatttcaggtacatcactgatgtcctgactgaggaggatgccctagaaatactgcagaaaggtcaaattggtaaaaaagaaagagagaagcaaatgctggcacaaggataccctgcttacacgacatcgtgcgcctggctggggtactcagatgacacgttgaagcagctctgtgcccaggcgctgaaggatggctggaccaggtttaaagtaaaggtgggtgctgatctccaggatgacatgcgaagatgccaaatcatccgagacatgattggaccggaaaagactttgatgatggatgccaaccagcgctgggatgtgcctgaggcggtggagtggatgtccaagctggccaagttcaagccattgtggattgaggagccaacctcccctgatgacattctggggcacgccaccatttccaaggcactggtcccattaggaattggcattgccacaggagaacagtgccacaatagagtgatatttaagcaactcctacaggcgaaggccctgcagttcctccagattgacagttgcagactgggcagtgtcaatgagaacctctcagtattgctgatggccaaaaagtttgaaattcctgtttgcccccatgctggtggagttggcctctgtgaactggtgcagcacctgattatatttgactacatatcagtttctgcaagccttgaaaatagggtgtgtgagtatgttgaccacctgcatgagcatttcaagtatcccgtgatgatccagcgggcttcctacatgcctcccaaggatcccggctactcaacagaaatgaaggaggaatctgtaaagaaacaccagtatccagatggtgaagtttggaagaaactccttcctgctcaagaaaattaagtgctcagccccaacaacttttttctttctgaagtgaaagggcttaaaatttcttggaaatagttttacaaaaatggatttaaaaaatcctaccgatcaagatgagttcagctagaagtcataccaccctcaggaatcagctaagtaattattacttgattcttttagcaaatcaatgcacgttatcctacttaatccttaaataagtttagatttaactaacccaaagtccaggaggatgttcttacaaaaatagctatatcaagggctggcacctagacattaaactgtaatttgaaaataagcaacatgttgcataacttgttggaataattccttgttctgtttaacacttgtcataaattagcagaataaaaatagtcgtgcaacaccgggggtatctggtatgcaacgaagggaaaaatatttcactgattaaccccgaagtggttttgcatcttttccttgcttaatctaagcatattattagagaagtcacaccatgctgaagctaatgagggcaaaatggtagtccatagattattttaaaataaccctttaaggttataaaagtttaaaaaaaaaaaaaaaaaactctatcctaaatggtcattatattttgaggataagatgcagttaaaatgagaaaaatagggcaaaatatattcactattatttctaaaatatactcttttaagtagcatccaaaccagaatacagcacatgtttacttaaggagagttctttaatctattttaggaaggaactgagcagataagtggcagtacagaatgaacaaagcgtggacgaatgcagaacacttctttattatagcaacatataaaacaactataactttaaagttcataaccacactctacatcatgatcgatggtgttactcagctccctcagatttgagggaatagcttgtgaaattcttaaaatattctaaaaatattccaaaaatagcttgtgaaattcaccaaccttctttataagtacgtgggattgaaatgcacatacatgtttttgctaagagcacatacatttcattctcctcactttgttcataacctcagcattgtcagataccctcagtgagttaactcaaagccttttattatggaaagaactggcacagttacatttgccagtggcaacatccttaaaaattaataactgataggtcacggacagatttttgacctagttcctttttcttttagagcaaaaagaacttttacctcggcatccagcccaacccctaaagactgacaatatccttcgagctcctttgaaagcaccctaaacagccatttccattttaatagttggatgcggattgtacccttcaatctgaaagtcttcagctttgaagtcatcaattttctcaacttttcgaagaatcctgagctttgggaaaggtctgggttctcgctgaagctaaaaacaaaataaggccattattttgccataattgtacgacctgttgtaattgctcctcatgtccgtgaaacaagtacacaggatgtgatcaacaaagttctattttacaggagtatgatcctgtcgataccttgccgtaggttatgtaacatgattggagcgcaaccagctgttctcttgcacagatcgagagtgaggggtattttgtgacattacacagcatcaggagcctggtgcctcatcaggtgtaagttcttataaccactcttggcaaatttattaaagacaggaacacagtcaatctgtaactcatagtagctctacgtttacttgaattccacaatccctaacccatctgtccctggcagaaagaaggaaagatgacatgcatggacagtgaacagaaagggatgaaagccaggattcctgggatgaacagacagtggcaattaggatgtgaagacaggtcacaacctattactatgtctaaaaacgaccagagcagagagccagagagaataagcctgaagtcacctccactcaaaagcagccaaactccctcaaaggagtaacttttaaaacctggatctaacctggaaggggctaaaaagtgtctggttctgagtttttttccttaaggctcatgaagcagatgaacttacatttttattgccatttcatatcaattgttggctgctataacttagggatttcaacagacttttgaagtttggacctaaatattgtacttaatgtaaaattaacaaaaaatatttatggccagggtggtggcttatgcctgtaattccagaattttcggaggctgaggcaggtggatcacttgaagtcaggagtttgagactagcctggccaacatgatgaaaccccatctctactaataatacaaaaattagctgggtgtggtggcatgtgcctgtaatcccagctacctgggaggctgaggcagaagaattgcttgaacccgggaggtggaggttgcagtgagctgagatcgcaccacggcacactccagcctggccgacagagaaagactccatctcaaaaaaaaaagaaaaggaaaaacatttgcacttcaattctccttcaagttaaaatgagttaaaatgcccccttttggacaatcccctggcttgaatgtggctcttccctctctggtactggtgcttagtacctcacagcacctgacatgttaagtgcccatggttgctgaggcagatgcctgccttgtcctgcccacctgcccaccacttctccctaaactgaagccccacatttggagcagtcatctttatcttggacacagcattgagcagatgcctgttccacagtcaaccttttatcaagagaaggtaccaaacccaaaagtataacatctaattcttacctgaattttcagtggctcgatgtgattcaggtaaatatgtgcatctcccaaagtgtgtataaagtcacctggctataaacccgggggagaaagcagaacagtatgttagtttcaattctttaaaacatcatttaaaaacattagaatatgcagacaccgcaaggctttttttaaaaaaataatttagtgtagcttttccatttttttgtagcaacagcatcttgttatgttgcccaggctggtattgaactccagacctcaagcaattgctcctgtctcagtctcccaaagtgctgggattacaggcatgagccaccatacccaacctcagcatagcttttgagaaaatccatagaagctgtatcacaaacaacctgtatagatctgttagtgcgtataccacagggccagaaaaccttccagaagaggaaggtttcaaagtaaaagctggttcatttcttacttacacatatcaaatttaaaagctaatcagagactaaactctgcaatttgttttcccatattaaagaactgaagagctcagtgtggtaggctggcaagtcacccttcccgagacagcccaccttcaggcccgtgatgtgcgcaatcatgtacgtgagcagggcgtagctggcgatgttgaaaggcacaccgaggcccatgtctcccgatctctggtacagctggcaggacagctcactgttcaccacatagaactggcagagggcatggcatggaggcagcgccatcagaggaagatctgaggaaccagcagaggaagataaggagggatggtggtttgaaagaccacagctaaaggcaaagtaaaacaggagagaaacagaagccaactcatatggtggagaccaggagagagagccactgggctgcagtgatgtccataacagcctctgcagcgatggcacggagctgagggagactatccatcggtgcaaggtttctgcaggtgtccatttacggctgaagcaatgctcttccatcagagctgaagggatctgggctacctcgtggcaccagattacaaatacagcaggaataattctgtttgccacaggaaactggtgcttctggtacaccctcctatattaaaagtctctattacatggcaaaaaaaaaaaaaaaaaa

SEQ ID NO: 4390 - DNA, 6763 bp, Homo Sapiens
  NM_017514
tgtgtgggcggcggcggcggcggctgcgcgcttggggcccggggcgcggggcgaggccgtggggacgtgcgagcggggccgcggtggggctcgggggcgcgtccacgtggccagagggcggccacccggagccagcggagggacaggcctgtccccaggcgcggctgccggccatgccctctgtctgcctcctcctgctgctcttccttgccgtggggggggccctgggcaacaggcccttccgtgccttcgtggtgacagacaccacgcttacccacctggctgtgcaccgggtgactggggaggtgttcgtgggcgcagtgaaccgagtctttaagctggcccccaacctgactgagctgcgggcccatgtcacggggcccgtcgaggacaacgctcgctgctacccgccccccagcatgcgcgtgtgtgcccaccgcctggcccccgtggacaacatcaacaagctgctgctcatagactatgcggcccgccgcctggtggcctgcggcagcatctggcagggcatctgccagttcctgcgtctggacgacctcttcaagctgggtgagccgcaccaccgcaaggagcactacctgtcgggggcccaggagcccgactccatggctggtgtcattgtggagcagggccaggggcccagcaagctgtttgtgggcactgctgtcgacggcaagtcggagtacttccccaccttgagctcccgcaagctcatcagtgatgaagacagcgcggacatgttcagtctcgtgtaccaggatgagtttgtgtcctcccagatcaagatcccctcagacacgctgtccttgtaccctgcctttgacatctactacatctacggcttcgtcagcgcctccttcgtgtacttcctgacgctgcagctggacacccagcagacgctgttggacacagcgggcgagaaatttttcacgtccaagatcgtgcgcatgtgcgcgggagactcagagttctactcatacgtggaattccccatcggctgctcctggcgcggcgtggagtaccgcttggtgcagagcgcccacctggccaagcctggcctgctgctggcccaggccctgggcgtgccggctgatgaggacgtcctcttcaccatcttctctcagggccagaagaaccgggccagcccaccccggcagaccatcctctgcctcttcaccctcagcaacatcaatgcccacatccggcgccgcatccagtcctgctatcgtggggagggcactctggctctgccctggctgctgaacaaggagctgccctgcatcaacacccccatgcagatcaacggcaacttctgtgggctggtgttgaaccagcctctgggaggcctgcatgtgatcgaggggctgcccctgctggccgacagcaccgacggcatggccagcgtggccgcctacacctaccgccagcactctgtggtcttcattggcacgcgcagcggcagcttgaagaaggtgcgggtcgatggcttccaggatgcccacctgtatgagacagtccccgtggtggatggcagccccatcctccgagacctgctcttcagcccggaccaccggcacatctatctcctgagtgagaagcaggtgagccagctcccggtggagacctgtgagcagtaccagagctgcgcagcctgcctgggctccggggacccgcactgtggttggtgtgtgctgcgacacaggtgctgccgcgaaggggcctgtctgggcgcctctgccccacacggctttgctgaggagctgagcaagtgtgtccaggtgcgggtccggcccaacaatgtgtcagtgacgtcacctggggtgcagctgaccgtcaccctgcacaacgtgccagacctcagtgcgggcgtgagctgcgccttcgaggcggcggcggagaacgaggcggtcctgctgccctccggtgaactgctctgcccctcaccctccctccaggagctccgagctcttaccagggggcatggggccacccgcactgtgcggctgcagcttctctccaaggagacaggcgtgaggtttgccggtgctgactttgtcttctacaactgcagcgtcctccagtcgtgcatgtcctgtgttggcagcccttacccctgccactggtgtaagtaccgccacacgtgtaccagccgcccccacgagtgctccttccaggagggcagggtccacagccctgagggctgccctgagatcctgcccagtggggacctcctgatccccgttggggtcatgcagcctcttaccttgcgggctaagaacctacctcagccgcagtcgggccagaagaactatgagtgcgtggtgcgggtgcaggggcggcagcagcgggtgcctgccgtgcgcttcaacagcagcagtgtgcagtgccagaacgcctcgtactcctatgaaggtgatgagcatggtgacaccgagctggacttctccgtggtctgggatggagacttccccatagacaagcctcccagcttccgagccctcctgtacaagtgctgggcgcagcggcccagctgtggcctctgcctcaaggctgatccccgcttcaactgtggctggtgcatctcagagcacaggtgccagctgcggacccactgcccggccccgaagaccaactggatgcacctgagccagaagggcacccggtgcagccacccccgcatcacgcagatccaccctctcgtggggcccaaggaaggaggcacccgggtcaccatcgtgggtgacaacctgggcctcttgtcccgagaggtgggcctgcgggtggctggcgtgcgttgcaactccattccggccgagtacatcagtgctgagaggatcgtgtgtgagatggaggagtcgctggtgcccagcccgccgccggggcccgtggagctgtgtgtgggtgactgttcagccgacttccgcacgcagtcggagcaggtctacagctttgtgaccccaacgtttgaccaagtgagtcccagccgtggcccggcgtccgggggcacacggcttaccatctcaggcagctctctggatgctggcagcagggtcacagtgactgtgagggacagcgagtgccagtttgtaaggagagatgccaaggcgatcgtgtgcatctcacctctctccaccctgggccccagccaggcccccatcacacttgccattgaccgggctaacatctccagccccgggctcatctacacctacactcaggaccccaccgtcacccgccttgagcccacctggagcatcatcaatggaagcactgccatcactgtgagtgggacccacctgctgacggtccaggagccccgggtccgtgccaagtaccgcggcattgagaccaccaatacatgccaagtgatcaacgacactgccatgctgtgtaaggcccccggcatctttcttgggcggccccagcctcgggcgcaaggcgagcaccctgatgagtttggcttcctgctggaccacgtgcaaacggcccgctccctcaaccgctcctcctttacctactaccctgatcccagctttgagccgctggggccctctggcgtgctggacgtcaaaccgggctcccacgtggtgctgaagggcaagaacctgattcccgcggcagccggcagctcccgcctcaactacactgtgctgataggaggccagccgtgttcgctcactgtctcggacacacaactcctgtgcgactcacccagccagactggccggcagcctgtcatggtgctggtgggtggcctggagttctggctgggcaccctgcacatctcggcagagcgggcgctgaccctaccggccatgatggggctggcggcggggggtgggctcctgctgctggccatcacagccgtgctggtggcgtacaagcgcaagactcaggacgcggaccgtaccctcaagcgtctgcagctgcagatggacaacctggagtcccgtgtggccctggagtgcaaggaagcttttgcagagctgcagacggacatcaatgagctgactaaccacatggacgaggtgcagatccccttcctggactaccggacttacgccgtgcgcgtgctcttcccgggcatcgaggcccacccggtgctcaaggagctggatacgccacccaacgtggagaaggccctgcgcctcttcgggcagctgctgcacagccgcgcgttcgtgcttaccttcatccacacgctggaggcccagagcagcttctccatgcgcgaccgcggcaccgtggcctcgctcaccatggtggccctgcagagccggctcgactatgccacggggctgctcaagcaactgctggccgacctcatcgagaagaacctcgagagcaagaaccaccccaagctgctgctacgcaggacagagtcagtggctgagaagatgcttaccaactggttcacgttcctgctgcataagtttctgaaggagtgtgctggggagcctctcttcctgctttactgtgccatcaagcagcagatggagaagggccccattgatgccatcacgggcgaggcacgatactccctgagcgaggacaagctcatccgtcagcagatcgactacaagacactgacccttcactgcgtgtgtccggagaacgagggcagcgcccaggtcccagtgaaggttctcaactgtgacagcatcacccaggccaaagataagctgctggacactgtgtacaagggcattccgtactcccagcgtcccaaagctgaggacatggacctggagtggcgccagggccgcatgactcgcatcatcctccaggatgaggatgtcaccaccaagatcgagtgtgactggaagaggctcaactcactggcccactaccaggtgacagacggttccttggtggcattggtgcccaaacaagtgtctgcctataacatggccaactccttcaccttcacccgctccctcagccgctacgagagcttgctccgcacggccagcagccctgatagcctccgctcacgggcacccatgattacgcctgaccaggagacaggcaccaaattgtggcacctggtgaaaaaccacgaccatgccgaccatcgcgagggggaccgtggcagcaagatggtctccgagatctacctgacacggctgctggccaccaagggcacactgcagaagttcgtggatgacctctttgagacagtgttcagcacagcccaccggggctcggccctgcccctggccatcaagtacatgttcgacttcctggatgagcaggcggaccagcgccagatcagcgaccccgatgtgcgccacacctggaagagcaactgcctgccgctgcgcttctgggtgaatgtgatcaagaacccgcagttcgtgttcgacatccacaagaacagcatcacggatgcctgcctgtcggtggtagcccagaccttcatggactcctgctctacatccgagcaccgcctggggaaggactcgccctccaacaaactgctctacgccaaggacatccccaactacaagagctgggtggagaggtattatcgagacattgcaaagatggcatccatcagcgaccaggacatggatgcctacctggtggagcagtcccgcctccacgccagcgacttcagcgtcctgagtgcgctcaacgagctgtatttctatgtcaccaagtaccgccaggagattctcacggctctggaccgagatgcctcttgtcggaagcataagttgcggcagaaactggaacagatcatcagcctcgtgtccagcgacagctaaggtggtggaatcggtgaggagggggcttctcagtcctgtgccgtcctcccatccaggggagtggctggctcaagcctgggtccccgggctgagccctggattgggtatcgtggggcaggtcaccctggccacgatgcccccggcacacccaggcccccttcattagtgccttgctttgggccctgcagggggaggggtgacagggcgagcccccaccccagcagcagcaatacccccaccctcctgccctgtgcccaggtgttgggacagtcccaccctccctgctatttatatccctctgcctatttattgaatcgaacttcgcctctgtctccatctgtaaatatgtgtccccccaccggatgtcgccaccctcactcacctgcctcttcttgagctgtcctgggccctgccacccgtctgggctcctttgtgtagcattatcagcctcggtctggcctctggcacctcacccttgccatggctgaccccacccattccaaggcggggtcacggtaccagcagcacttggggtgaggcctccaaagcttcctcagaattgtggctgtgccacgctggaccacagggtccccctcaagcatctcggggccctattctctctgagcacctggagggctggactcaggcttgtgccagggcctgacttgggcctgggggccctagaacactcctcctcctgagcctactgccaaacgtcctcagtgttgtctgcacctgctccgactccttcagccgccccattcagcgcccgctccgtccagtgcccgccctgtggggccaaggcggccgtgccttactactctgtgtcttctgcctcctctgaggaatctggccctgtctgacagtcccagaccccccgttctctcctctttagttgcatgagtttttctttgttcatggaatgttttttcctgattaaatgttggggaaatgccaaaaaaaaaaaaaaaaaa

SEQ ID NO: 4391 - DNA, 3184 bp, Homo Sapiens
  NM_017515
actgcttctaactcactgctcactcaccgcttcttagcttaggaatcacctacaataacctcgtgtcactgtatcttgtgatttcaaacaaggaaccctaaaaacctgaaggcacactgggtgccgctcaacaataaggctcggctgccaagacgaaaaaaaaattgccctttctcctcctgccaccctggaggtgccaggttgtaatctgcaaatgtattgtctggcccttagggcttgacagttaatgattggtcgctgaaggagccgagcggaggagcgagagggacgcgagcaagcgagcgagggagggagcgcagggccagagcggagccccagccggccgcacaggcaccgcctcccgtcttccgggacccggcacttcgggggttttgggcgccggagacgcgcaagggcgccgatggaggcagactcgccagcgggccccggcgccccagagcccctcgcggagggagcggcggccgagttctccagcctgctgcgcaggataaaaggcaaactcttcacctggaatattttgaaaacaattgccctgggtcagatgttgtccttgtgtatatgtgggacagccatcaccagccagtatttggcagaaagatacaaagtgaacacccccatgcttcagagctttatcaattattgcttgctgttcctaatttatacagtgatgctggcatttcgatcaggcagtgataaccttttagtaatcttgaaaagaaaatggtggaagtacatcctgctgggactagcagatgtggaagctaattatgtgatcgtcagagcctaccagtacacaactctaaccagtgtccagcttttggattgctttgggattcctgtgttgatggctctgtcatggtttattcttcatgcaagatacagagtgatccacttcatcgccgtggctgtctgtctgttgggtgtaggaaccatggttggtgcagacatactagcagggagggaagacaattcagggagtgatgtattgattggtgacatcttggtccttcttggggcttccctctatgccatttcaaatgtttgtgaggaatacatcgtgaagaagctgagcagacaggagtttttaggaatggtgggcctgtttggaacaattatcagtggtatacagctattgattgtggaatataaggatattgccagcattcattgggactggaaaattgccctgctgttcgtggcatttgccctgtgtatgttttgcctgtacagcttcatgccattggtgattaaagtcactagtgccacttccgtcaacctgggcatcctgacagcggacctctacagcctttttgttggactctttctgtttggctataagttttcaggactctacatcctgtccttcactgtcatcatggtggggtttatcctgtactgctccacccctactcgcacggccgagccggctgaaagcagcgtgcctccagtcaccagcattgggattgacaacctggggctgaagctggaggagaacctccaggagacccactctgctgtcttgtagctggagaagatggcgcacccatcccccaccaggataaagcagagcctgctgcctgctgaggggacacttggggaaatagcagactcagaatggacactctacaaccctgggttggatccagtggttaggttttagaaaggaacactgaacaaagttcaaaagtagaaataccaaaatagagcagaaaccaagctaagagtgtgtttctgtgtttgaggaccaatatctgttcgtgttgaggagatgaggtgcagactccacactggggtcttagaggcaccagtgggaaagcaggactggggagagatccaggactgagccagcctcaggccagggcgggaaagcaggctgtccaggctgggcttggtggtcaggaacaggggcagctcacggtggctctggagtacgtttcctctgtcagatgcttcaaggtttttttttttttttttttttgctgaggcagttattgtccacaggcctttgggtacagatgaggccttggggctgactgcatgtggcagaaaacgggtgggtcagcccttgaaaagtcttgagatataagtgtgagtactatacaagcattaaactggagtgcagtaaacctaggaaccttcccacaattgtttttttgtttgtttgagatgcagagtctagagtgcagtggtgcaagctcagcttactgtaacctctgcctcctggattcaagtgttagtagctgggattacaaaagcatgtggccccacgcccagctaagttttgtatttttagtagacatggggtttcaccatgttgcccaggctggtcttgacctcccgacctcaagtgatctgcctgccccgacctcccaaagtgctgggattacaggcttgagccaccgtgccaggcctgttttgtttgtttttgtagagagatggggtttcgccatgttgcccaggctaatctcaaattcctgagctaaagcgatctgcccacctcggcctccgaaagtgctaggattacagatgtgaaccactgtgcctggcctgtttgtttgtttgtttaaaacatttctccatcactcattccaggtcccagagcaaactctctctgctctcggagcctgtgacactggctatgtgctccacagtttcagtcccaggtcatactctccaacagttttcagagctccatatatatgtagatgccatcctttctaaaaacttctcacgacctcctggaatattcctattgatctcattttatttagcatcagctcaagaaactaagtcttagtgcacagtatcacaacaaagaaaaagctttgtttttataactggtaaaaacaagaaaagattctcatcaaaatgaaaatataaaattaatcatttctcaccaaagagtatgcctgggagcctccagctgttaaaagacaatgctattactacttcttatcaaaaatctgtaatgccctgtgatttttatgatacttcttcaatacaaagtgttaatatgtgtcatcagtataataacaaccaacaaaatgccactttcagaaaactgtatgtaaattttttgtaacaatgtaaaaaagaaatggggagtaagtgttcacatcattaaaaggctttgaattcatggaaatacaaaaaaaaaaaaaaa

SEQ ID NO: 4392 - DNA, 1892 bp, Homo Sapiens
  NM_017518
cgtgagcatggtgaagagaagacggagccccgcgctgggagaggaacgcttcagtccgagttccattctgcacccaaggctccccttggtcctcctgggaaccagggtgccccttagtggtggtggcccaggagaacccgaccaaggcaggagcgccccctcctggaagagcctcgcttcaacgcatcatcattcccggccggcagcaggggcgacgccagcaaggcctgcgactcagagccagcttggcccgttcgccccgccccttcccggtgtccgccccgcccctttcccggtgtccgccccgcctccttcccggtgtccgccccgcccccttccctgtgtccgccccgcccccttccctgtgtccgccctgcccgcttcactgtggtcctgcctctgggtggtgccggggcggggggtgggagcccggggcccgcgcaggcggagatgtcgcccaatgggaagggtcggtcgggaagggggtgggcgcaggcgggtgggcgggaagaacgctggaggttgattggcggtcttgccggccagtgaagccagggcatgggcggggcgcggctcggagcgcgaaacatggcggggcaggacgctggctgcggccgtggcggcgacgactactcagaggacgagggcgacagcagcgtgtccagggcggctgtggaggtgttcgggaagctgaaggacctaaactgccccttcctcgagggtctgtatatcacagagccaaagacaattcaggaactgctgtgcagcccctcagagtaccgcttggagatcctagagtggatgtgtacccgggtctggccctcactgcaggacaggttcagctcactgaaaggggtcccaacagaggtgaagatccaagaaatgacgaagctgggccacgagctgatgctgtgtgcgccagatgaccaggagctcctcaagggctgtgcctgcgcccagaagcagctacacttcatggaccagttgctcgataccatccggagcctgaccattgggtgctccagttgctcgagcctgatggagcacttcgaggacaccagggagaagaacgaggccttgctgggggagctcttctctagcccccacctgcagatgctcctgaatccagagtgcgacccgtggcccctggacatgcagcccctcctcaacaagcagagtgatgactggcagtgggccagtgcctctgccaagtccgaggaggaggagaagctggcggagcttgccaggcagctgcaggagagtgctgccaagttgcacgcgcttagaacggagtactttgcacagcatgagcaaggggctgctgcgggcgcagccgacatcagcaccctagaccagaagctgcgtctggtcacttccgacttccaccagctaatcttggcttttctccaagtctacgacgacgagctgggcgagtgctgccagcgcccaggccctgacctccacccgtgcggccccatcatccaggccacgcaccagaatctgacttcctacagccaactgctgcaagtggtcatggcagttgctgacacctctgcgaaggccgtggagaccgtgaagaagcagcaaggcgagcagatctgctggggtggcagcagctccgtcatgagtctagctaccaagatgaatgaactaatggagaaatagaaagtcttcagtgatggcctacgccaaagcacaggatggggcgggcaggaagccctctcccaagatcgagttggccgaggatggatgattgtggcagcagaagccgttgcagccccacgttgtgctctaggcagggacctttggcccctttggggagggagagacagacgggcggtttgacttggacacaaagaaagccttggtttctaagcaaaaaaaaaaaaaaa

SEQ ID NO: 4393 - DNA, 4281 bp, Homo Sapiens
  NM_017520
gttacgccgctgatgtggagtagggccgagcgcggaacgcgaggggctgctggggtgtttgtcgcagcgggttttcctcggcggtttgcggagctgctaggatggagcaggttgcggagggagcaagggtgaccgcagtccctgtgtcagctgccgacagcactgaggagttggccgaagtcgaagaaggagttggagtagtgggcgaagataatgacgcagccgcgagaggagcggaggcctttggcgacagtgaggaggacggagaggatgtgttcgaggtggagaagatcctggacatgaagaccgaggggggtaaagttctttacaaagttcgctggaaaggctatacatcggatgatgatacctgggagcccgagattcacctggaggactgtaaagaagtgcttcttgaatttaggaagaaaattgcagagaacaaagccaaagcagtcaggaaggatattcagagactatccttaaataacgacatatttgaggcgaactctgatagcgatcagcaaagtgagacaaaagaagatacttccccaaagaagaaaaagaaaaaattgaggcagagagaagagaaaagcccagatgatctgaaaaagaaaaaagcaaaggccgggaagctaaaagacaagtccaaaccagacctggagagctccttggaaagtttagtttttgatttaaggacaaagaaaagaatttctgaagccaaagaagaactaaaggagtccaaaaagcccaaaaaagatgaagtaaaagaaacaaaagaattaaagaaagttaaaaagggtgaaataagagatttaaagacgaaaacaagagaagatcccaaagaaaatagaaaaacaaaaaaagaaaaatttgtcgaatcccaggtggaatctgaatcaagtgtacttaatgattctccctttccagaggatgacagtgaagggctacattccgacagcagagaagagaaacaaaacactaaaagtgcaagagagagagcagggcaggacatggggctggagcatggctttgagaagcccctagacagtgccatgagtgctgaggaggataccgatgtcagaggcaggaggaaaaagaagaccccgagaaaggctgaggacactagagagaacaggaagctagagaacaagaacgctttcttagagaagaaaactgtgcctaaaaagcagaggaatcaagacagaagcaaaagtgctgcagagttagagaagctgatgcctgtatctgcccaaacgccaaagggccggaggttgagcggggaagagagaggcctctggtccacggactcagccgaggaggacaaagaaaccaaaagaaatgaatccaaagaaaaatatcagaaaaggcatgattctgacaaggaagaaaaaggcagaaaagagccaaaaggattaaagacacttaaggaaatcagaaatgcatttgatttatttaaattaactccagaagaaaaaaatgatgtttctgagaataatcggaaaagggaagaaataccactggattttaaaaccatagacgatcacaaaaccaaggaaaacaaacagtcacttaaagaaaggagaaacaccagagacgaaacggatacttgggcatacattgctgcagaaggtgatcaggaggttttagacagcgtgtgccaagcagatgagaattcagatggcaggcagcagattctgagtttgggcatggacctgcagttggaatggatgaagttggaagatttccaaaagcaccttgatgggaaagatgagaattttgctgcaacagatgcaattccaagtaatgtgttaagggatgctgtgaaaaatggggattatattactgtaaaagttgcacttaattcaaatgaagaatataacctggaccaagaggattccagtggaatgacactggtgatgcttgccgccgccggagggcaggacgacctcctgcgactcctcatcacaaaaggcgcgaaagtgaacggtcggcagaagaacgggaccaccgccctcattcatgctgcagagaagaactttttaacaacagtggctattcttttggaagcaggagcttttgtaaatgtccagcaaagcaatggtgagactgcactgatgaaggcctgtaaaagaggaaattcagacatcgtacgactcgtaattgaatgtggagctgactgcaatattttgtcaaagcaccagaatagtgccctgcactttgcgaagcagtctaacaatgtgcttgtgtacgacttgctgaagaaccatttagagacactttcaagagtagcagaagagacaataaaggattactttgaagctcgccttgctctgctagaaccagtttttccaatcgcatgtcatcgactctgtgagggtccagatttttcaacagatttcaattacaaacccccacagaacataccagaaggctctggcatcctgctgtttatcttccatgcaaactttttgggtaaagaagttattgctcggctctgtggaccgtgtagtgtacaagctgtagttctgaatgataaatttcagcttcctgtttttctggacagtcattttgtttactcattcagccctgttgcaggtcccaataaactcttcataaggttgacagaagcaccctctgccaaggttaagttgctaataggtgcatacagagtgcagctgcagtgaccaaacagaagggactgggcggagttctcttcagaccgattcctatactctctttgacagcagtttggaattcttctagcacatctatgtaaagttttgtctgtaaacctcttgcagttaagcctgttgtctgttgtagtctgtaagatgcgacatagctgtgtctgtgccagtatgccggaatctcagtgcagtgtccagactgcgtatttcagtttttccacaatgtggatagtacatatgaggattatttaagaaaattaaagacttcactttcttttttctggagacggagtttcgctcttgttgcccaggctggagtgcaatggtgcgatctcggctcactgcaagctctgcctcctgggttcaagtgattctcctgcctcagcctcctgagtagctgggattacagacacccgccatggcacccagctaattttgtatttttagtagagatggggtttatccatgttggtcaggctggtcttgaactcctgacctcaggtgatccgcccgcctcggcctcccaaagtgcttggattacaggcatgagccaccgcacccagcaagagttattttcttaacttgaaattttctactagccctggtgaacttctgtgcttaaaaaaaaaaaaaaaaaaaggaaaaattcagctctaaaacatttgcttacagcaagggagccatgttatattcaagttacccaagcaccaaataaagtgtgggtttgctgcccttgaaagggttgggaggcctgatctttttctagtagacagttgccacacattccccaagcacaaaaggtggagatggcagtcactttgtaaatatgctgtagtcacttatcatcttttcaaagggtaacaagagaatctaagatgtagtaagaatgtaaaccagtacactatgagacctaaaagagagtattaaatgtgaacttttagcagagcgtggtggctcacacctataatcccagcgctttggaggctgaggttggaggattgcttaagtccaggagttcaagaccagcctgggtaacatggggtggaacaagcctgtagtcccagatactcaggaggctgaggtgaaaggattgcttgagccagggaggtcaaggctgcagtgagccgtgaaaggccactgcactccagcctgagtgacagaatgagaccttgtctcaaaaaaaaaaaaaagtttcttggaacctatacggtttttttttgttttttttttttgaaaagccagaccttgtgcccttgttttgaacaccgactgggaagatggggcttaggtaacagccaaacctggctgtcagctgtgtgggagccaccaccctctctgggaagagttcctgcttctgtatggcaagcataaatcaagctcagtctgggttatggagaagttgaaaattgttttgttcctcattagtttataattgtatgaaatacgattttaatgaaaacttttcagaattcacgtttgtgtagatatttcagagaaccatttttactttacatcctaaaactgccttttcctatggttttgtcaataaaacactatgatgttggtctgtttccttttataaaaaaaaaaaaaa

SEQ ID NO: 4394 - DNA, 4777 bp, Homo Sapiens
  NM_017526
agtagcgaggccgggtctgaactatcaggcgcggcctctgcgagctgggggcggggttctgcaccggcgggggcggggttgtgagtggtgggggcggggtctggagcagcaggcgccgcgtttgcgagctaaggtcggagttctgcaccggcgggggcggggctctgcgtggccggggcgggctcgggatccgcggggcgactcccggtctggcttgggcaggctgcccgggccgtggcaggaagccggaagcagccgcggccccagttcgggagacatggcgggcgttaaagctctcgtggcattatccttcagtggggctattggactgacttttcttatgctgggatgtgccttagaggattatggcgtttactggcccttattcgtcctgattttccacgccatctcccccatcccccatttcattgccaaaagagtcacctatgactcagatgcaaccagtagtgcctgtcgggaactggcatatttcttcactactggaattgttgtttctgcctttggatttcctgttattcttgctcgtgtggctgtgatcaaatggggagcctgcggccttgtgttggcaggcaatgcagtcattttccttacaattcaagggtttttccttatatttggaagaggagatgattttagctgggagcagtggtagcactttattctgattacagtgcattgaatttcttagaactcatactatctgtatacatgtgcacatgcggcattttactatgaaatttaatatgctgggttttttaatacctttatatatcatgttcactttaagaaagacttcataagtaggagatgagttttattctcagcaaatagacctgtcaaatttagattatgttactcaaattatgttacttgtttggctgttcatgtagtcacggtgctctcagaaaatatattaacgcagtcttgtaggcagctgccaccttatgcagtgcatcgaaaccttttgcttggggatgtgcttggagaggcagataacgctgaagcaggcctctcatgacccaggaaggccggggtggatccctctttgtgttgtagtccatgctattaaaagtgtggcccacagaccaagagcctcaacatttcctagagccttattagaaatgcagaatctgaagccccactctggacccaggacattttgatgagatccaaaggagttgtatgcacatgaaagtttgagaagcatcatcatagagaagtaaacatcacacccaacttccttatctttccagtggctaaaccacttaacctctctgggtgttacctgctcatttgtttaaaaaaaaaaaaaaagtctcacctgctttcatgctgaggacaagttcagatgttcaagcctataatatttaggcagttcctcaaatttatgaaaagtgttctcagaattgggagacagtcaaagggtacaaagcctcagttaggaggaataagtgtgatttttttttaaagatcacttgcacagcatgctaaatataggaataattgaatgtatatttcaatattgctaagagagtaaatttctaatgttctcataaaaaagttaaatatttgagatcatatgttaattagtgtaatcattccaccttatattcaaaaatcataaaaccgtattgtaccctataaaaatatacaataatttgtcaatatataatcaaaataaaaaacaaaacatactctctcccccaaaaaaacatctcagtggggaacagatgtatcttttcatctgaaagacaatgctgggggaagagctccactgagatgcgggcagggaggctgggctcgagccagcccctgcgttagcaggagggggagaacagataggtaactcttttacatttcctttatgatctggcacttctccccagctccttccctctgccccccacccctactcctcaacagttctggtttgccctgacttctctacggctctggcttcttcccgaagagatataggagccatgtaagcacgcagtgggtgaactgcttaatttcactacgtgttgatgtacttgtcttccgtcctgtaggtcttttctatataactttatgccacccttaaatgaatcattgggtatacctgtcatgttggatcctgtaatcacagttttccctgctcacctttttgtctaagatctattgagaaagggaaatatgggaaggagaaccatttgatcagaatacaaccaatagtctttaagcattgttaaagtatgaaactgaaatacattcaaaacacttaatccttgaggcttgtgatctgagtaattagcaggtatgatgctgggactggaaaatagaaagtaataactaaagggttaatgtgcaacgttattttttggccttgttcatgattttatgttttcagtgtcctgtgtacatatagaattgttaaagttgtcatttccaatatttatattagaaaaattatttagatactttataattttaaccggcatttttaataatgacacttgcatttattgtattgtaataaatttcacttttaactttaaaagtttaactttaaaatttttttgtgatgttgccttgcctgaaaagataacaaaaatgagagaatttcttgatgttttaaaatgggcagttttgagcaataatctgtcctaacagaacagtagcaataagttttaggataccatcttgaatgtctagttggtgtgcaatagcttttctttctaagatggcaataatgattcatttctactacattttgcaaaagtgtttttgttgcttatacacattttcaataaccaaggtagccttcatatgtagccttaaagcattacctcttgattgtatctttagattgatataaagtacttgcatatagagtatttgaagtgatagattattagatttgctctatgtctgaaaagagagctattctgcagtgcctaaatatcatttaaacagtaaatattaataggaaatattgctatatctgaatatataatacaaaagtttgatcatggtgacacaaatgttggacatttttttccttataaaaggctctttttttatatattgtacaatatatttggagattcagagcatagtgactatagtcgaaaactgagattgcacttccaaaattggccacaagtaaataatcttatgaagggattctttatcatgtttcaaacaagtgggttacaagcagactttgagacacttttccacagaaacaatactatgaattggtgattgagttcccaggccaagcctccctcaacaggttcaactctaatatacctaacctgtgatactgaaggtgcctgcctgagttttgggtctctgagacagggtagtgtgagtagtttggaggaaggacagtgcaactttccaccccttttcctaagaacaaggtctttctccttttaatttttccactcattttcacctcctaatgcccttgagatccaggtacactcctgggagttttgttcacctctcccaactgagaaccttcccactgggctccatcctccctcctgaggttcttcatattccagagtcacccacccttctcctcccattagtcagttctctaagtacagctgatgtcatgtggtgctgagaagaaagcagatcacacttcatcacagaaagaatgccttgtgattatcttctccacatctgaaattccttttgacacctgcattgggccgactgccattcccatgactgctgcacctgcgtttttagagaatgcctcataacccactgattctcattcacagagaatgggagaacggaatgaagaaagattccagcagcttatagaaggatagcaatattttgggacagggaaaatcctgtcatacctcatctcttcctcaggaggagttctgagctggtcctgcttttcatagttgtttcttttcttccacttaagaactcatagatttttcttactgtcctaaggaagtccttacctctgaggtatctcctcaatgaatactgttttcaaggctgaaatagttcattatgttaataaccttctttatgttctcagggaaatgcttaggtggtgtcacaaaatgtgccttttcttttctttttttttttttttttttgaggcagagtctcgctctgttgcccaggctggagtgcagtggtgcgatcttggctcactgcaagctccgcctcccgggttcacgccattctcctgcctcagcctcccaaggagctgggactacaggctcccgccaccacgcctggctaatttttttgtatttttagtaaagacgggtttcatcgtgttagccaggatggtctcgatctcctgacctcatgatccgcccgcctctgcctcccaaagtgctgggattacaggcctgagccactgtgcccagccaaaatgtgcctttgcaaagtttgcgaaatcagattttgtatcccaatagaaccaaaatatttatgaggatgctagcattttccaagcatagtaattagttcacaactgagaaatattatgtctgtagtagataaatattagttgtgcattttaatttaattctcctttttccattttgtctcatgaagtaccttattgcaaaaatcccactgagtaatagctcataaattataatctttcaaatagccatgctaccagcgtacaacagtgatacatgtaaccccaaatgtgatgtgagaggacgattactttgtaaataaaacttgttattgacattttaaaaaaaaaaaaaaaaaa

SEQ ID NO: 4395 - DNA, 1239 bp, Homo Sapiens
  NM_017528
gacataaaaaccgggtgccggcaggcgccagtcgcaggtgtgctgctgaggcgtgagaatggcgtcccgcggccggcgtccggagcatggcggacccccagagctgttttatgacgagacagaagcccggaaatacgttcgcaactcacggatgattgatatccagaccaggatggctgggcgagcattggagcttctttatctgccagagaataagccctgttacctgctggatattggctgtggcactgggctgagtggaagttatctgtcagatgaagggcactattgggtgggcctggatatcagccctgccatgctggatgaggctgtggaccgagagatagagggagacctgctgctgggggatatgggccagggcatcccattcaagccaggcacatttgatggttgcatcagcatttctgctgtgcagtggctctgtaatgctaacaagaagtctgaaaaccctgccaagcgcctgtactgcttttttgcttctcttttttctgttctcgtccggggatcccgagctgtcctgcagctgtaccctgagaactcagagcagttggagctgatcacaacccaggccacaaaggcaggcttctccggtggcatggtggtagactaccctaacagtgccaaagcaaagaaattctacctctgcttgttttctgggccttcgacctttataccagaggggctgagtgaaaatcaggatgaagttgaacccagggagtctgtgttcaccaatgagaggttcccattaaggatgtcgaggcggggaatggtgaggaagagtcgggcatgggtgctggagaagaaggagcggcacaggcgccagggcagggaagtcagacctgacacccagtacaccggccgcaagcgcaagccccgcttctaagtcaccacgcggttctggaaaggcacttgcctctgcacttttctatattgttcagctgacaaagtagtattttagaaaagttctaaagttataaaaatgttttctgcagtaaaaaaaaagttctctgggccgggcgtggtggctcacacctgtaatcccagcaccttgggaggctgaggtgggaggatcatttgaggccaggagtttgagacctgcctgggcaacataatgaaacttcctttccagggaggaaaaaaaaaaaaaaaaaaagctctgagagcatcttattttgtttaaaggcaagaaataaaatttccttttgtggaaaaaaaaaa

SEQ ID NO: 4396 - DNA, 843 bp, Homo Sapiens
  NM_017541
agccattcctgaatttctttcagcactgggaaaaccagtctatgcaccaaaaatgtctaaaactggaaccaagattactttctatgaagacaaaaattttcaaggccgtcgctatgactgtgattgcgactgtgcagatttccacacatacctaagtcgctgcaactccattaaagtggaaggaggcacctgggctgtttatgaaaggcccaactttgctgggtacatgtacatcttaccacagggagagtaccctgaataccagcgttggatgggcctcaacgaccgcctcagctcctgcagagctgttcatctgcctagtggaggccagtataagattcagatctttgagaaaggggattttagtggtcagatgtatgaaaccaccgaagattgcccttccatcatggagcaatttcacatgcgagagatccactcctgtaaggtgctggagggtgtctggattttctatgagctacccaactaccgtggcaggcagtacctcctggacaagaaggagtaccggaagcccatcgattggggtgcagcctccccagctgtccagtctttccgccgcattgtggagtaatgacatgaatggggccatattcttcctggggcccaaatgctggctggccttgtggtccaaataggcatcatcaataaaacagttggcatgcatcccactgctgactataatgcctctccttaaatgcttctagggaccagcaatacagtgctcgccacagtgggcagtcacacaaagctacccatctgccagatcaccaatctagatctttgtgccaaacaaaatgagatctcattaaaaggttagaaagtcaa

SEQ ID NO: 4397 - DNA, 3852 bp, Homo Sapiens
  NM_017542
cgctccctcccgaggggccgcgcgcacgggaggacggagaggcggaaaggatggcgctgtgacagccgggccggagccctcgcgtccccaccccgcgccctggccgctgggcccggcgagatggagtccacagcctaccctctcaatttgagcctgaaagaagaggaagaggaagaagagattcagagccgggaactagaggacggcccggcagacatgcagaaagtacgaatctgctctgagggcggatgggtaccggccctatttgatgaggtggccatatatttttccgatgaggaatgggaagttttgacggagcaacaaaaggccctctaccgggaagtcatgaggatgaattatgaaactgtcctgtccctggaattcccattccctaagccagacatgatcacccgtttggaaggggaggaggagtctcagaattctgacgagtggcagctccaaggaggcacctctgcagaaaatgaagaatctgacgtaaagcctccagactggccaaacccaatgaatgctacctcccagtttcctcagcctcagcactttgacagctttggcctccgtctgcctcgggatatcacagagctgcccgagtggagtgaggggtaccccttctacatggccatgggcttcccagggtatgacctctcggctgatgacatagctgggaagtttcagttcagccggggcatgcgccgcagttacgacgcagggttcaagctgatggtagtggaatatgctgagagtaccaacaactgccaggctgccaagcagtttggagtattggaaaaaaacgttcgagactggcgcaaagtgaagccacagcttcaaaacgcccacgccatgcggcgggcattccgaggccccaagaatgggaggtttgctctggtggaccagcgtgtggccgaatatgtcagatacatgcaggccaaaggggaccccatcacccgggaggcgatgcagctgaaagctctcgaaatcgcccaggaaatgaacattccagagaaagggttcaaggcaagcttgggttggtgtcgaagaatgatgagaaggtatgacctgtctctgaggcataaagtgcccgtgccccagcacctgccggaagacctgactgagaaactcgtcacttaccagcgcagtgtcctggctctgcgcagggcgcatgactatgaggtagctcagatggggaatgcagatgagacgcccatttgtttagaggtgccatcacgggtaactgttgataaccagggcgaaaagcctgtcttggtcaagacaccaggcagggaaaaactgaaaatcacagcaatgcttggtgtcttggctgatgggaggaagttaccaccgtacatcattttgaggggaacatatatccccccggggaagtttcccagtgggatggaaattcgctgccaccggtatgggtggatgactgaagacttgatgcaggactggttggaagtggtgtggagacggaggacaggagcagtgcccaagcagcgagggatgctgatcttgaatggcttccggggccatgccacagattccgtgaagaactccatggaaagcatgaacactgacatggtgatcatcccagggggtctgacctcacagcttcaggtgctggatgtcgtggtctacaagccactgaatgacagtgtgcgggcccagtactccaactggcttctggctgggaacctggcgctgagcccaaccgggaatgctaagaagccacccctgggcctctttctggagtgggtcatggtcgcgtggaatagcatctcaagtgagtccatcgtccaagggttcaagaagtgccatatctccagcaacttggaggaggaagacgatgtcctgtgggaaatcgagagtgagttgccaggaggaggagaaccaccaaaagattgtgacaccgaaagcatggctgagagcaactgaagggaaagggaaagcaaatggaactctgatttaaacagctggggatgaaattcctcaagatgattattcctgaaagtgtggatgcgctggatgcgcagggaacatcaggaaaaggccacggggctctgaacagccccggtccagacagcagcctgtacatccatcccaggacacagcccagcccctccccacaccatacaaggtatcagaaaagtctaggacctatcatttcatcagagacatgatcagaaaagaaactgcttctgccccatttcttgttttggagattactccatctgtccatcaaaagaaacctgtaaatatgaaagaacaaaggttatttcctggagaaaagacaatttattcaacaccaacgagggactcatcatatgggcacaactctggtgtccttctatggagaaaacctcaagtaaagttttattctgcctttgaaaatgcttccaaaagtagaccctgtccccacacaggtcaagactacagagaaggctttgtagaaatgtgtcacctatgtacacctgctacttacacatttcctcttttggaaaaatgagatacttagaataacaagaaaattaagacatactggcctggtgccagcagatggcttttctatagacaaactaggttagtgtggaagatataggttaaaataaactatgctgttttatttatcttcccaacctgattggcagctagacttttttagggtctcatttaatggccctgtttttttcattattatatttaatgatagggcaggatttcgtatgcaagctcttgtttctcaggctgcctgcagaagaagtcgctataaattatctgttgtctacatggtacaaggcccattgactcatctgatgcttgttttgttaatttctttaatatttttatcacggggcagtgggagggcttgggcttttagccacagctgttttaagacttctgatctcctgccctgcaggaataggtgggaagtcattgaatttttacactatagtaatttgcattcccacataagtttgagtgttacgaaaacattcctttaaagggatctgtgctacacaaaatatgccaggacctcacagacaaagccattgctagaaatgtcattccaatgatcagatctggaaacaggctgccataaccacttttccttcttgtagactcagctcacctgtatatttaaactgttcttggcatcttgaaacacctatttctactcaggtactcattgtcctgttactgattcacctttctgatccttttcaaccagttttcccccaaggggggaaattttacttaacctctagtatttgaacaactcaatatttgaattgttgccccatttgcttttacctgtactgtattcttggtcatctcaaatggcgtctaaacccagctactttgcattccagaagtttccattccctccaattccacctaatttttcatctgtcctagttactggctctttcttcatgtcttatttctcttgctttgggagcttaaaagattttacaagacctaattttgggttccttccttggagccatagttaccctgccaagaagagtagaaaatgggttcaactcctgtttcgctccaccaacacctctgtgagtctcatcatcagctgagcgatgatgccttacaggttgcatagcactggaactttcctagagtaacggctctgctgccagggtttctctgggctcattcttccactgacttaattatgatctatgcctaacagagccccagtacaactattttgcagaatggctgttaccctagaattactatagcacatattgagatatagttgtactccctagtagataggaactgaccccaacaataaactttgataataaagacaat

SEQ ID NO: 4398 - DNA, 3263 bp, Homo Sapiens
  NM_017544
ggagcagtggcgctatagccacgaaagtgactggcagtgggctctgcggcgcagcttcatctgtcggcacctgcacagctatcccggggctgccctcgaccagctcctcgcgctctccgccgcctggaccaaccacgtcttcctgggctgcaggtacagcccacgcttgatggaaaaaattctccaaatggctgaaggtattgatattggggagatgccttcatatgatctggtgctgtccaaaccttccaaaggtcaaaaacgccacctctcaacatgtgatggtcaaaatcctcctaaaaagcaagccggttccaaattccatgcgagacctcgttttgagcctgtacattttgtagctagtagttcaaaagatgaaagacaggaagatccttatggccctcaaacaaaagaggtaaatgaacaaacacattttgccagcatgccaagagacatctaccaagattatactcaagactctttcagtatacaagatgggaattctcagtattgtgattcatcaggattcattctcacaaaagaccagcctgtaacagccaacatgtattttgacagtgggaaccctgccccaagcaccacatcacagcaggcaaactctcagtcaactcctgagccttcaccatcacagacatttcccgagtctgtggtagccgagaagcagtattttattgaaaaattaacggcgacaatctggaagaacctttctaatccagaaatgacttctggatctgataaaattaattatacatatatgttaactcgttgtattcaggcgtgtaagacaaatcctgagtatatatatgctcctttaaaggaaattcctcctgccgacatccccaaaaataaaaaacttctaactgatggctatgcttgtgaagttagatgccaaaatatctacttaactacaggttatgctggcagcaagaatgggtccagggatcgagctacagagctagctgtaaaactcttgcagaaacgtattgaagttagagttgtccggcggaaattcaagcatacatttggagaggacctcgtggtgtgtcagattggcatgtcctcctatgaatttcctccagctctgaagccaccagaagacctggtggtgctgggtaaagatgcttccgggcagccaatttttaatgcttctgccaaacactggaccaattttgtcattacagaaaatgcaaatgatgcaattggtatccttaacaattctgcctcattcaacaagatgtcaattgaatacaaatatgagatgatgccaaatcgcacatggcgttgtcgagtgtttttacaagatcactgcttagctgaaggttatggaaccaagaaaacaagtaaacatgcagctgccgacgaggctttgaaaattcttcaaaaaacacagcccacttatccatctgtcaaaagttcacaatgccatacaggctcttcacccagaggatctggaaagaagaaagatataaaggatcttgtagtttatgagaattcttcaaatcccgtgtgcacgctgaacgacacagctcagtttaaccgaatgacagttgagtatgtctatgaaaggatgacaggcctccgctggaaatgcaaagtgattctagagagtgaagtaattgcagaagcagttggggtgaagaaaactgtcaaatatgaagctgctggggaagctgtgaaaaccctcaaaaagacccagccaactgtcattaacaacttgaagaaaggagctgttgaagatgtgatttcaagaaatgaaattcagggccgctcagcagaggaggcttacaaacagcaaatcaaagaagataatattggaaatcagctgctgagaaagatgggttggactggtggtggtttaggtaaatctggtgagggcatacgggagcctatctcagtgaaagagcagcataagcgggaagggcttggtctggatgtagagagggtgaataaaattgccaagagagatattgaacagatcatcagaaactacgcccgctccgagagccacacagatttgactttctctagagagctgactaatgatgaacggaagcaaatacatcagattgcccagaagtatggtcttaagagtaagtctcatggggtgggccatgataggtacctagtggtaggtagaaaaagacggaaggaagacctactagatcagctcaaacaggaaggccaagtgggccattacgagcttgttatgcctcaagcaaattgagatcttactaatttattttgtaaatgcctaatgaggcagatttttgaattaaagaaatgctacatgttccggttgcagagtatattcataagatgtctcaccttgttcatttcacatagtggtttattagatattggaacctaaagaattctgtccacttgtattagcttaatccagcagatgatattgtgcagttactgtttgtgtctttgatattgctgtgtccctcagattttagtagtttgacaagcaagaacacatatccaaatggaattttaccctgagaaattatcattttaaagggcatagcacagcaatctgcaacaatatgtaaagttgatattgactacaataaaaatccagtcttaattccagatttactgaaaatgtcagatcattttgtattaatctattttcatctttgtgtgaagccagttatagaatgtttgacaataaattgtgctgtacacgtaaatgtccttaccaactaaatgatgtaaaactttcttaaagtaattttagtgttcatttatttataacttctaccatgtgatttccagactattggaagtgatttactgtatcttgtgatatatgggttttaacaaattctagtcttcacgctgagagagcactacttgagagagcagttgaaagtttcaaaaactttggttcaatctgaagaaaggaagcttgaactgtttgttcttggtgccttgcagagagactcacagcaactctccattatagctttcacacggtttggatgtgcagcacatccaaggcaaccacagctgtggtagagcttggtaaaagactgaagatacattggtgctttgatgaaaaggtcagttggctggtccctctctcaaaaagcttattaagcctgaaaagccaactttgtaacatatttaaaactgctattttcgcttatttctggaatgtaaaaaaaaaaaatgtataaaaagaattagtgtatgcttcctgaataaaaaggagccaaagttgatcagaaaaaaaa

SEQ ID NO: 4399 - DNA, 2544 bp, Homo Sapiens
  NM_017546
agcgcgctttacggccgcggggacggagcgagccggcgccagggcccctcgggccgggaagaggggaaggggagcgaggttgatgcccggcggaggggcgagcgcggcgtctggccggcttctcaccgccgcggagcaaagagggtcccgggaagcggcagggtcggcgtccaggagcggcttcgggggctccggcggcggcagaggcggagcaagcggccccgggtccgggagcggaggcccggggggccccgcgggcaggatgagcttgaccccgaaggagctctcgagcctgctgagcatcatatcggaggaggcgggcggcggcagcaccttcgagggcctgtccaccgccttccaccactacttcagcaaggccgaccacttccgcctgggctcggtgctcgtcatgctgctccagcagcccgacctgctgcctagcgcggcgcagcgcctcacggcgctctacctgctctgggagatgtaccgcaccgagccgctggccgccaaccccttcgccgccagcttcgcgcacctgctcaaccccgcgccgcccgcccgcggcggccaggaacccgaccgccctccgctctcaggatttttacctcctataactccaccagaaaagttttttctttcccagctgatgctggcacccccacgggaactcttcaaaaagacgcctcgccagattgcactgatggacgttggaaacatgggccagtctgtggacattagtgggcttcagttagccttggccgaacgccaatctgaattgccaacgcaaagcaaagcgagcttccccagtattctcagtgacccagacccggattcttctaattctggatttgacagctcagttgcctctcagatcacagaagctttagtcagcggaccaaagccacctattgaaagccattttcgaccagagtttattcgtccaccgcctccactccacatttgtgaggatgaacttgcttggctaaaccccacggagcctgaccacgcgatccagtgggataaatcgatgtgtgttaagaatagcactggtgtggagatcaaacgaataatggccaaagccttcaaaagccccttatcctctccccaacaaacacagctacttggtgagttggaaaaagaccccaaacttgtctaccatattggcctcaccccagccaaacttcctgaccttgtggaaaacaaccctttagtcgctatagaaatgttgctgaaattaatgcagtcaagccagatcactgagtatttctctgtcctggtcaatatggacatgtctttacattcaatggaagttgtaaatcgactaactacagctgttgatctacctcctgaatttattcacctttatatatcaaattgcatctctacttgtgaacagattaaggataaatatatgcagaatcggttggtgcgtcttgtgtgtgtgtttctccaatccttgatccgtaacaaaattattaatgtacaggatttgtttatagaagtgcaggcattctgtattgaattcagtaggatacgagaagctgctggtcttttccggttgttgaagacattggatactggggaaacaccttctgagaccaaaatgtcaaaataatacctcatcagaaccatcccatccattcactgttcagctgtactgtgatttagtttttacaccgttaaaaccctgagtggattgcttggtttaatgcatataaacagtactttatctacttaaagcaaagttttgctttcttgaatgactttttctgtgagatgaatttttgataagaactagggaaaacatgtcttttaggtgtcttgctgatgactatccataggaggaatggctatcccaaaaaaagttccgcaaaaaagtagatgagtttcttttttttttaagcactaaagaacaaaatgcatttttcattaatacaggcttctgatgaaccaggaatcctgttttcgtaaagttccaatgttgatgagagtaaattcttaagcatttgtcctagaggtgaaagcagctgaatgtttctgaaccatcaagaggcaaacaaacaggagtttgtttcttgaacctgcttatgcacacagctcttaactcctcatgaggcacacagctcttaactcctgatgaaccaaggatttactcataactttctccttgtcatggaggcttaatagacaacagaataaatgcatttcttgggcctcttataaacttgggaattcttagaaagctgcttctattaccaggctgtaatagctggtatagttttttttttttctcttaagatgttctgttattagtctgagacagccatttttttgttttaaggaaaaatatcagtcagtgctccgggaggtaatttcctgtggggtctgcaccctcctgtctgggtggtggatgtgggtttgagaagtaggagagcagggtggtaccgtgtgggctcttaccctttatgtgattttggacaacagtgccttccattaaagttctttttatcaactgttaaaaaaaaaaaaaaaaaaaaaaaaaaa

SEQ ID NO: 4400 - DNA, 2825 bp, Homo Sapiens
  NM_017550
cacacggccatggcggaggcctcctcgctggggaggcagagtcctcgcgtggtctcctgcctcgagcacagcctgtgcccaggggagccgggcttgcagacaacagcagtggtgtccatgggctctggagaccatcagttcaacctcgcagagatcctgtcacagaactacagtgttaggggggagtgcgaggaggcctcgaggtgcccagacaagcccaaggaggagctggagaaggacttcatctcccagagcaacgacatgccctttgatgagctgcttgcgctctatggctacgaggcgtcagaccccatttcagaccgggagagtgagggtggtgacgtggccccgaacctcccagacatgaccctggacaaagaacaaatagcgaaggatttgctttcaggggaagaagaggaagagacgcaatcatctgctgacgacctcaccccgtccgtgacctcccacgaggcctccgacctcttccctaaccggagtggatctcgtttcctggctgatgaagacagagagcctggctcttctgcctcctccgacaccgaggaggactctcttcctgccaacaaatgtaagaaggagatcatggtgggacctcagttccaagctgacctcagcaacctgcacttgaaccggcactgtgagaagatctacgagaacgaagaccagctgctctgggaccccagcgtcctccctgagagggaggtggaggagttcctgtacagggcggtgaagcggcgttggcacgagatggccgggcctcagctcccagagggagaagccgtgaaagacagtgagcaggcgctgtacgagttggtgaaatgcaacttcaatgtggaggaggccctgcgaaggctgcggttcaacgtgaaggtgatccgagatgggctctgtgcttggagtgaagaggagtgcaggaactttgagcacggcttccgtgtgcatggaaagaactttcacctgatccaggccaacaaggtgcgcacacggtcagtgggcgagtgtgtcgagtactactacctgtggaagaagtcggagcgctacgactacttcgcccagcagacgcggctgggccggaggaagtacgtcccgtccggaaccacggacgcagaccaggacctggatggcagcgaccccgatggccccggccgtccgcgcccggagcaagacaccctgactgggatgcgcacagatccactgagcgtggatggcacggccggtggtctcgatgagcccggagtggcctctgatggactcccgtcctcggagccagggccgtgttccttccagcagctggatgagtcccccgctgtacccctgtcccatcggcccccagccctggccgacccagcctcataccagccagctgtcactgctccggagccagacgccagcccaaggctggccgtggacttcgccctgcccaaggagctgcccctcatctccagccatgtggacctcagcggggatccggaggagactgtggccccagcacaggtggctttgtcggtcaccgagtttggactcatcggcattggggacgtgaaccccttcctggccgcccaccccacgtgcccggcccccgggctacactcggagcccctgtcacactgtaacgtgatgacctgctgactcctggccgcgggcggcgtatgcggcccagactggacttagcgctgccgctgggcccgcctctgtcagtcttcctgaccccttccccaccccccgggccttggggtagcacctccttctgcttcagaacacgtcaggactggggtgaggtggctgggccgtgagcccttgcccctgtccacacagaatggacccacggccccacccagcgccgtcagcgcccggcactgccacccgggtccgggccgctgcctgcacgtgggatccgtcgggcagccggggacagaagagaccccgccgttgggacgcagggcagagccggccacctagtcccttccagccagcagaggcgagggaaggcgtcactgccccggcggggagacgggcaggacgccctgccccgcaccagcagcctccgccggggcgccctcagctccctgcttggctctgtctctccacacccggcagggccgcgggctgccccagccctgggggtcgtgggcagctgctactcagtgccaaccccgtggggcacagagccatatacctcgctgtccggcccccaccccagcctcgccttcccaccccatcgtctccacttcaggaaaagccgcactttacacccccacctgcctcttccccctccatccctgctccccgatcctgagcggttggggtggggtccctcagcaaccccaggcgtgggtttgaggagacaggtgatttacatcccctttgctgtcctcccccggtaccaaggcagggagcctccggaggagccggccctgctggccacgcaggggccagactccagcctgtttccccagccctgcaggtcttccttctgtgggaagcttcctagcaagatggcttggagtcctggtccccctcctccctggccctctcgttcgtttctgtttctgtttacacgttggagtggggtcctccgtgggcggcggcgcgccctgccccgggtgtcgtccggcctcttgtgctcgagcccctttccgagttggactcgaccatccctcaccccaccaaggaccacactgtgaagtgataactgccttgaacccccctttgctgttttatttattaaacttgatttgaagcccaaaaaaaaaaaaaaaaaaaaaaaaaaaaaaaaaaaaaaaaaaaaaaaaaaaaaaaaaaaaaaa

SEQ ID NO: 4401 - DNA, 6249 bp, Homo Sapiens
  NM_017553
ccgcggagggagcgagctaggagcgtccacgcccaacgcagtcaccgtcccacggcctcagagagcgaaccgcggctccaccgtcggcggggcgacccccccctccggaccccgcccgcaccccgccccccctccgccgccgtcgcggcggcggggccaggcggcccgagccgtgcagtcggaggtccttgtgcatgaagacagatttgttctatggcctcggagttgggtgccagggatgatggaggctgcactgagctggcaaagcccctctatcttcagtacttggagagggccctccggttggaccattttctgcgacaaacgtcagctatcttcaataggaatatttctagtgatgacagtgaagatggactggatgacagtaatccattattgccccagtctggggatcccttaatacaagttaaggaagaacctccaaattcattgcttggtgaaacttctggagcaggcagttctggaatgttaaacacatattctctgaatggagttctacagtcagaatcaaaatgtgataaggggaatttatataatttctctaagctgaagaaaagcagaaagtggctaaagagcattctgctaagtgatgaatccagcgaggctgattctcagagtgaagacgatgatgaagaagaactcaatctcagcagagaagaacttcacaacatgcttcgactacacaaatataagaaacttcaccaaaataagtatagtaaagacaaggagttgcagcaatatcagtactacagtgcaggcctgctctccacatatgaccctttctatgagcaacaacggcacctacttggacccaagaaaaagaaatttaaggaggaaaagaaacttaaagctaagttgaaaaaagtgaagaaaaaaagacgaagagatgaagaactttcctctgaagaatcccctcgtcgccatcaccaccagaccaaagtctttgccaagttttctcacgatgcacctccccctggcactaagaaaaagcacttatccattgagcagctgaatgctcgtcgcaggaaagtatggctcagcattgtgaaaaaggaactaccaaaggcaaataagcagaaagcttcagctcgtaacctgtttctcaccaatagccgaaagcttgctcaccagtgcatgaaggaggtgcgtcgagctgccttgcaggcccagaagaactgtaaggaaaccttgcctcgtgcccgccgcctcaccaaggagatgcttctgtactggaagaaatatgagaaagtagagaaggagcaccgcaagagagcagagaaggaagctttggagcagcggaagttggatgaggaaatgcgggaggccaagaggcaacagcgaaaactcaacttcttaattacccagacagagttgtatgcccatttcatgagtcgcaaacgagatatgggtcatgatggtatccaggaagaaatcctaaggaaactggaagacagttctacccagagacaaatcgatataggtggaggagtggtagttaacatcacacaggaggattatgatagtaaccattttaaagcccaggccctgaagaatgctgaaaatgcttaccatattcaccaagctcggacaaggtcatttgatgaagatgcaaaagaaagtcgagcagctgccctacgggcagcaaacaagtctggcactgggtttggggagagttatagcctggctaacccatctatccgggctggtgaggatattccacagcccacaatttttaatggcaaattgaaaggttatcaactgaaaggcatgaattggttggccaatctatatgaacagggtattaatggcattcttgctgatgaaatgggccttggtaaaacagtacagagcattgcccttctggcccatctggctgagagagagaacatttggggacctttcttaataatttcacctgcgtctacacttaacaattggcaccaggagtttactagatttgttcctaaatttaaggtgctaccatattggggaaatcctcatgatagaaaagtcatcagaaggttctggagtcagaagaccctctacactcaggatgcccccttccatgtggttattaccagctatcagctggtggtgcaggatgtaaagtatttccagcgggtcaagtggcaatacatggtactggatgaggctcaggcgctcaagagtagttccagtgttcgttggaagatcctcttacagttccagtgtcggaatcggcttttgctaaccgggaccccaattcagaacaccatggcagagctttgggctctgctgcatttcattatgccaacattatttgattcacatgaggaatttaatgaatggttttccaaggacattgagagccatgccgaaaacaaatctgctattgatgagaatcaactttctcgcttacacatgattttgaagccatttatgctgaggagaatcaagaaagatgtggaaaatgaattatctgacaagattgagattctaatgtattgccaactgaccagccgacagaagctgctatatcaggcactaaagaacaaaatttccattgaggatttattgcagtcttctatgggctctacccaacaagcacagaacaccaccagcagcctcatgaatctggtcatgcagtttaggaaggtgtgtaatcacccggagttatttgaacggcaagaaacttggtctccatttcatatttccctaaagccataccacatttcaaagtttatctaccgtcatggacagatcagggtcttcaatcattcacgagacaggtggttaagggttctttctccatttgcaccagactatatccaacggtctctctttcacagaaaaggtattaatgaagaaagctgtttctctttccttcgctttattgatatatctccagcagaaatggcaaaccttatgcttcagggacttttggccagatggttagctcttttcctgtctctgaaagcctcctacaggctccatcagctacgctcctggggagcgccagaaggggagagccaccagagatacctgaggaacaaggatttccttcttggggttaattttccactctcctttccaaacctttgcagctgccctttgttaaagtctcttgttttcagcagccactgtaaagcagtgagtggctactcagaccaggttgtccatcagcggagatcagctacctcctcgctgcgtcgctgcctgctcactgagctgccatcttttttgtgtgtggccagtccacgagttaccgcagtgccattggattcttactgcaatgaccgaagtgcagaatatgaaaggcgagttctgaaggaaggagggagtctggcagccaagcagtgtttgttgaatggggcccctgaactggctgcagactggctaaatagacgatcacagttcttcccagagccagctggaggtctgtggagcatcagacctcagaatggctggtctttcatcaggattccaggcaaggagagcctcatcactgacagtggaaagctgtatgcccttgatgtcctgctgactcggctcaagtctcaagggcatagggtccttatctactcccagatgaccaggatgatagacctactggaggaatacatggtttacaggaagcatacctacatgaggcttgatggctcatccaagatctcggagaggcgagacatggttgctgattttcagaacaggaatgacatctttgtgttcctgttaagcacacgagctggaggactgggtatcaatctcactgctgcagacacagtgattttctatgatagcgactggaaccccactgtggaccagcaggccatggacagggcccaccgcttagggcagacaaagcaggttactgtgtaccggctcatctgtaaaggcaccattgaagaacgcattctgcaaagagccaaggagaagagtgagattcagcggatggtgatttcaggtgggaacttcaaaccagataccttgaaacccaaagaggtggttagtcttcttctagacgacgaagagttggagaagaaactgaggctgcggcaggaagagaaacggcaacaggaggaaaccaaccgagtgaaagagcgcaagcggaagcgggaaaagtatgcagagaagaagaaaaaagaagatgaattggatgggaaaaggagaaaagagggtgtgaacctggtgatcccatttgttccctcggctgataactccaacctctctgctgacggagatgactccttcattagcgtggactcagccatgccaagccctttcagtgagatctccatcagcagtgagctgcacactggctccattcccctggacgagagcagcagtgacatgctggtcattgtggatgacccagcctcctcagcccctcagtctcgagctaccaactctcccgcatccataacaggctccgtctcagataccgtgaatggaatttccattcaggaaatgccagctgcaggacgtggtcactcagcccgaagccgaggccgccccaaaggttcaggaagcacagccaaaggagcagggaagggccggagccgaaagtccacggcaggcagtgctgctgcaatggcaggagccaaagccggggctgcagcggcctctgcagctgcctatgccgcatacgggtacaacgtgtctaaaggaatctccgccagcagtcctctgcagacatcccttgttcggcctgctggccttgctgactttggaccttcaagcgcctcttctcctttgagttcccctttgagcaagggaaataatgttcctgggaatcccaagaacctccacatgaccagcagcctagccccagactctctggtccggaaacagggcaaaggcaccaacccctctggaggacggtaaccatctgggccctccgacttccttcaaccaaaccagggctagagtcctgacctgccagtggtctttggatggcttgccccgtgcagcatcttgcatcctgagtcagaagtggaaatgtccagcaggggaaggacaggcaggtggatggtgtgagcacttttatcatctgtgtctcatcaggagcatctggggtgcctgtaggaggaaggccacagggcatggatcagccccactgcatctcaagtgaactgtatagccaagtcttaaacctctcacggggcaagcctgacacagaccccctttagatgctcaggcatactgtttccatcccgattccactcttcggctctgacacgtcccttgcaaagtctccgcaggtgctgtgaagagccttccatggtagagatttctcttaagagtgtgatttctcatagggctagtaagggagattgtatacctgttgtccacagtcttcaggcagctccccaggtctctgaaccccagagtgtcatcattggagagagcagtgactgcgagagatggtggaggccgctaagcatggtagaggctagaggaagtctatccacaggcagttgtgttcccagcaattcctcccatcctgcatggttcacaccaagagaaccttcagatcctaccagcaaccgtagcaccttccacccaggggactcccagaagccagtaaagagaccaggagccacctcaatcagcaggacagcctcactgcccctcttgcagagtcccctttgcccatcctgaatgcacagtctccctgctcatgcccttcagtcccctgcttggctgtatgcactgtctatattgcactgagagaggaagggacagcaggagtgaggtgaagagggcggagagagggggcaggctcggcaccggccctcccagcccggccagcctgagcttgctgccctccagtagagacagaggggcagtgtttgcatgggaggtgtttctgcctgtccctgcctgatgtccctggtggagcaggtacctccgggcgggcaagcctctgatttgcacacctgaaaatcgcggaattgagtttcgatagattgatttttaaaacttttttggagtagggggtataggggaatcatttaatttaaatcattaagattcccctgctcaaacccagattcctgtgtacagatgctatttagagggaatcagaaaaatgccaagccttttctctttgaatgtgctatttttataactgaacttgtacatatgtataaagagagacacatcttccttttactaactggataaaaaaatcttaaataaaatggagtgagataattttatgtaaaaaaaaaaaaaaaaaaaaaaaaa

SEQ ID NO: 4402 - DNA, 4285 bp, Homo Sapiens
  NM_017565
aaaggcgcaagaagcgggcaccccgggaaccccattccctcggctcactcggcgcggagaagcgacgcccgctgactccgagagccccggtgctccgtgcacctggtccccaagttgaggagcgacacccctccacaggggactagcccgcgcggggagcattccggtctcactgaccccggcccacccgcgggactccaggcacctcttctgcccgcaccccgcgacccctcccgggaccccggagacagccggcctgcccccggcgtcccccttggccagcacgccatgccggggctgcgccgggaccgcctactgactctgctgctgctgggcgcgctgctctccgccgacctctacttccacctctggccccaagtacagcgccagctgcggcctcgggagcgcccgcgggggtgcccgtgcaccggccgcgcctcctccctggcgcgggactcggccgcagctgcctcggaccccggcacgatcgtgcacaacttttcccgaaccgagccccggactgaaccggctggcggcagccacagcgggtcgagctccaagttgcaggccctcttcgcccacccgctgtacaacgtcccggaggagccgcctctcctgggagccgaggactcgctcctggccagccaggaggcgctgcggtattaccggaggaaggtggcccgctggaacaggcgacacaagatgtacagagagcagatgaaccttacctccctggaccccccactgcagctccgactcgaggccagctgggtccagttccacctgggtattaaccgccatgggctctactcccggtccagccctgttgtcagcaaacttctgcaagacatgaggcactttcccaccatcagtgctgattacagtcaagatgagaaagccttgctgggggcatgtgactgcacccagattgtgaaacccagtggggtccacctcaagctggtgctgaggttctcggatttcgggaaggccatgttcaaacccatgagacagcagcgagatgaggagacaccagtggacttcttctacttcattgactttcagagacacaatgctgagatcgcagctttccatctggacaggattctggacttccgacgggtgccgccaacagtggggaggatagtaaatgtcaccaaggaaatcctagaggtcaccaagaatgaaatcctgcagagtgttttctttgtctctccagcgagcaacgtgtgcttcttcgccaagtgtccatacatgtgcaagacggagtatgctgtctgtggcaacccacacctgctggagggttccctctctgccttcctgccgtccctcaacctggcccccaggctgtctgtgcccaacccctggatccgctcctacacactggcaggaaaagaggagtgggaggtcaatcccctttactgtgacacagtgaaacagatctacccgtacaacaacagccagcggctcctcaatgtcatcgacatggccatcttcgacttcttgatagggaatatggaccggcaccattatgagatgttcaccaagttcggggatgatgggttccttattcaccttgacaacgccagagggttcggacgacactcccatgatgaaatctccatcctctcgcctctctcccagtgctgcatgataaaaaagaaaacacttttgcacctgcagctgctggcccaagctgactacagactcagcgatgtgatgcgagaatcactgctggaagaccagctcagccctgtcctcactgaaccccacctccttgccctggatcgaaggctccaaaccatcctaaggacagtggaggggtgcatagtggcccatggacagcagagtgtcatagtcgacggcccagtggaacagttggccccagactctggccaggctaacttgacaagctaagggctggcagagtccagtttcagaaaatacgcctggagccagagcagtcgactcgagtgccgaccctgcgtcctcactcccacctgttactgctgggagtcaagtcagctaggaaggaagcaggacattttctcaaacagcaagtggggcccatggaactgaatctttactccttggtgcaccgcttctgtcgtgcgttgccttgctccgtttttcccaaaaagcactggcttcatcaaggccaccgacgatctcctgagtgcactgggaaatctgggtataggtcaggcttggcagccttgatcccaggagagtactaatggtaacaagtcaaataaaaggacatcaagtggatacctgacttctcaggatccttattctagctacaagtcaaagataactcctggtccagacaaaacacctggcctatcacaagctgactaaaaatctgcactttgggccagcgcaggcaacagtaactctgacaggttcaaattagacctcacactttctactcatattctagtcactggacccatctgaatcagtaatccctactgcccggtcctggagtaacttcttagagatattataacaagtggcaaaaataaaagagggatttgctaagaatatcagaaaaggagtgttccaatttgaagagtattacaattgaaataacatcaaatatgtcacactaagcagccagtaacagaataaataattacaacgaaggaaaaaaaaaggaaagtcctccaaggtcaggatggcatgggaacaggcctagcagggacacaagcctggagtaaggcaggaaaagagccaaggctgactacagcccaccaaccacaatcttcttccctaagaccccaggattgtccccggcccatccccaaaagaagaaaggggctatgtggaaaggtgaggccctctagatgcccctccctgtgacggctggctcaaaaaagactaagtcaggttttttattgaagcctcccttagaagaaagtgtagtagggattccttgtctcctctaccttctccctgacttgttgatatctgaaactccttttaataggaggctttgtttcttattccataattaatgaccgaaaacacaaaggacagtaaggtcttcattccatggagtgactagtcagtcaacaaaagtaaaaatgcctcatttcatcaaatcaacttttccagtaaaggccagagttcaaatactgtaagcatgagaatagaatggagctgtcactaaagagagtacaaggtcaagaaccagaaatgtctccaagctttctgcagtgtgagcaaagatagcctcgactggacaaataacacttctgaccccgtggtacccccacatgactggtatgctgcccctggactttgtgtctctctaaaatcactaccattcactgagatctgaccaggtgaggcactcaccaacgctacagaagcaacacacaggtttccaatcctctcaaacacagatacaacccccatcctccaatgtgcatggaagaactttaaatctcagagagagtaagcaaaatcacacaatttagtggtttagacctattccaaagtcttcttttcactgtaacacaaaacccaacagtatcccacccaatttatgaagtcaaatttgtttgcttaaaaaaaaaatcagctgggcatgggctcacacctgtaatcccagcactttgggcctaaacaggcagatcgcttggtctcaggagctcgagaccagcctgggtaacatgacaaaaccctgtctctacaaaaaaatacaaaaaaaaaaaaatttttttttaaatcaactctttaacagagaaaccttaatcccaaagatttccttaactgttgtggccctactgcagcatagggctccccacttcattcactgtctctcctgcttcaagatgtttcttccctgtggatgaagaaccaggagatcacacacagaaatgggaaaatatctgggtaaaaacattcaaagaatagcacaaaatggtttgggacttccaaataagactctcaggaaagcaggctacagctctacctcaaaacccgccacctcctataacgaaggactggttttccaatggcctatatacacattttgctgcactctacaaacagaaagcaataggcttgaatttcaccatgatatgtggtacacctaccttattattcacttatctttcaaccttccattactttttgattagtaacaaaattaagactcatttctcaaaaatatcagaaaaccaaccgtttcattcttactcgagttcttccagcatgttcattttgaactgtttacctcccatgaaataaaaagtctcttgactctgaaaaaaaaaaa

SEQ ID NO: 4403 - DNA, 1944 bp, Homo Sapiens
  NM_017566
atttctgtgcgccgagctccgccccacgagcacctgtttccgagcggagagcgcgggccgttttctttcctggtgtcccgtcgcggcttgggacccggcaagatgggcaagaagggcaagaaggagaagaagggccgcggcgcggagaagacggccgccaagatggagaagaaggtgtctaagcgctcgcggaaggaggaggaagacctggaagcgctcatagcccatttccagacactcgatgccaagaggactcagactgtggaacttccgtgccccccaccctcaccaaggttaaatgcctccctctcggttcatcctgagaaagatgagttaatcctttttggaggtgaatatttcaacggccaaaaaacttttttgtataacgagctctatgtctacaataccagaaaggacacctggaccaaagttgacatccccagtccacctccgaggcgctgtgctcaccaggcggtggtagtgcctcaaggtggcggacagctgtgggtctttggaggggagtttgcctctcccaacggagagcagttctaccactacaaggatctctgggtcctgcatttggccaccaagacctgggaacaagtcaaatcaacaggcggtccttcgggtcggagtggacatcggatggtggcctggaagagacaattgatcctgtttggtggcttccatgaaagtacacgggattacatctactacaacgacgtgtatgcctttaatctggacaccttcacatggagcaagctgtccccgtcagggacggggcccacacccagatcaggctgccagatgtccgtcactccccagggcggcatcgtcgtctatgggggctactcgaaacagagagttaagaaagacgtggacaagggcacacggcactcagacatgttcctgctgaagccagaggacggaagagaagacaagtgggtttggactcggatgaacccttcgggggtcaagcccaccccacggtctggcttttccgtggccatggccccgaatcaccagacactgttcttcgggggtgtctgtgacgaggaagaggaggagagcctgtcgggcgagttcttcaacgatctgtacttctacgacgccaccaggaaccgttggtttgagggacagctgaagggacccaagtctgaaaagaagaaacgcaggcggggcagaaaagaggagcccgaaggtggtagcaggccggcgtgtgggggagctggcacccaggggcctgtgcagctggtcaaggaggtggtggccgaggatggcaccgtggtcaccattaagcaggtgctcaccgcgccaggctcggcggggcagccccggtctgaggacgaagacagccttgaggaggccggcagccccgcacctgggccgtgtccacgctccaacgccatgctggctgtgaagcatggggtgctctacgtctatgggggcatgtttgaggccggcgaccgccaggtcaccctcagcgacctgcactgcctggacctgcacaggatggaggcgtggaaggccttggtggagatggacccagaaactcaggagtggctggaggagacggactcggaagaggacagtgaggaggttgagggcgccgagggtggggtcgacgacgaagacagcggagaggagagcggtgcggaggactgagaagagcccctgccaggggcgcctggcaagtgctgtgcccacgtccgcccaggacccagccgtgttgagtgaagctcttggggccagcgtgcgtcctgacgcacaggagagagctgaaggtgggtggcccaggccagggtgtgaactttctcccatggtttagtctctgacgcggcactgggccggaagttcaactgagtgcagtgcaggtggattccctcagcagcctgtgtgttgtgtgaaataaattggacttgaaacaagaaaaaaaaaaaaaaa

SEQ ID NO: 4404 - DNA, 4052 bp, Homo Sapiens
  NM_017570
cgagcgaccgagccggagccgagcgccagtttttccagggctaccagctgaagagctcctgtgggactccagccccaccaccatgggcagccccgagggccgcttccactttgccatcgaccgtgggggtaccttcacagacgtctttgcccagtgcccaggggggcacgtgcgggtcttaaaactgctctcagaggaccctgccaactatgcggacgcgccaaccgaaggcatccgccgcatcctggagcaggaggccggcatgctcctgccccgggaccagccgctggactccagtcatatcgccagcatccgcatgggcaccacagtggccaccaacgcactgctggagcggaagggggagcgggtggcgctgctggtgacacgtggcttccgagacctgctgcacattggcacccaagcccgtggggacctctttgacctggccgtgcccatgcctgaggtgctgtatgaagaggtgctggaggtggacgaacgcgtggtgctgcaccgtggagaggcgggcaccgggacgcctgtgaaaggccgcacgggggacctgctggaagtgcagcagcctgtggacctgggggccctgcgtgggaagctggaggggctgctatctcgaggcatccgcagcctggctgtggtgctcatgcactcgtacacgtgggcccagcatgagcagcaggtgggtgtgctggcccgggagctgggcttcacgcacgtgtcactgtcctcggaggccatgcccatggtgcgcatcgtccctcgggggcacacggcctgtgccgacgcctacctcacgcccgccatccagcgctacgtgcagggcttctgccgtggcttccagggccaactcaaggatgtgcaggtgttgttcatgcgctccgatggcggcctggcgcccatggacaccttcagcggctccagtgctgtgctctcgggcccggccggcggcgtggtgggctactcagccaccacctaccagcaggagggtggccagcctgtcatcggctttgacatgggaggcacgtccacggatgtgagccgctatgctggggaattcgagcacgtcttcgaggccagcacagctggcgtcaccctccaggccccgcagctggacatcaacaccgtggcagcgggagggggttcccgcctcttcttcaggtctggcctctttgtggttgggcccgagtcagcaggagcccacccaggacccgcctgctaccgcaaagggggccctgtgacagtgacggatgctaatctggtcctgggtcgcctgctgcctgcctccttcccctgcatttttgggccgggagagaaccaaccactttcccctgaggcctcccgcaaagccctggaggctgtggccactgaggtcaacagcttcctgaccaacgggccctgcccggcctccccgctgagcctggaggaggtggccatggggttcgtgcgcgtggccaacgaggccatgtgccggcccatccgtgcactcacgcaggcaagaggccatgacccctcagcccatgtgctggcctgctttgggggagctggtgggcagcatgcatgtgccatcgcccgggccctgggcatggacacggtgcacatccacaggcacagtgggctgctgtcggccctggggctggccctggctgacgtggtgcatgaggcacaggaaccctgctccctgctctacgcgcctgagaccttcgtgcagctggaccagaggctgagccgcctggaggagcagtgtgtggatgctctgcaggcccagggcttccccaggtcccagatcagcactgagagcttcctgcacctgcgctaccagggcacggactgtgctctgatggtgtctgcccaccagcacccagccacagcccgctcgccccgtgcgggggacttcggggcagcctttgtggagcggtacatgagggagtttggctttgtcatacctgagcggccggtggtcgtggacgatgtgcgagtgcggggcaccggccgcagtggtcttcgcctcgaggatgcccccaaagcccagaccgggcctccccgggtggacaagatgacccagtgctactttgaggggggctaccaggagacccctgtgtacctgctggcagagctgggctatgggcacaagctccatgggccctgcctcatcatcgacagtaacagcaccatcctggtggagccaggttgccaggcagaggtgaccaagacaggggacatctgcatctccgtgggggccgaagtccccggcacagtgggcccccagctggaccctatccagctgtccatcttctcacaccgcttcatgagcattgctgagcagatgggccgcatcctgcagcgcacagccatctccaccaacatcaaggagcgtctggacttctcctgtgccctctttgggcccgatggggggctggtgtccaatgccccccacatccctgtgcacctgggtgccatgcaggagacggtgcagttccagattcagcacctgggggccgatctccaccctggcgacgtgctactgagcaaccatcccagtgccgggggcagccacctgccagacctgactgttatcacaccggtgttttggccgggtcagacgcggcctgtgttctatgtggccagccgagggcaccacgcagacatcgggggcatcacaccaggctccatgcccccccactccaccatgctgcaacaggagggtgccgtctttctgtccttcaaacttgtccaggggggcgtcttccaggaggaggcggtgacggaggccctgcgggcgccaggcaaggtccccaactgcagcggaaccagaaacctgcacgacaacctgtcggacctccgtgcccaggtggcagccaaccagaagggcatccagctggtgggggagctcattgggcagtacggcctggacgtggtgcaggcctacatgggccatattcaggcaaacgctgagctggccgtgcgagacatgttgcgtgcctttggaacctcccggcaggcccggggcctgcccctggaggtgtcctcggaagaccacatggacgacggttcccccatccgcctccgtgtgcagatcagcctgagtcagggcagcgccgtgtttgacttcagcggcactgggccggaggtgtttggtaatctcaacgcaccgcgggccgtaaccctgtccgccctcatctactgcctgcgctgtctggtgggccgcgacatcccactcaaccagggctgcctggcgccagtgcgcgtggtcattccccgaggctccatcctggacccgtcgcccgaggcggcggtggtgggcggcaacgtgctcacgtcgcagcgcgtggtggatgtcatcctgggggcctttggggcctgcgccgcctcccagggctgcatgaacaacgtgaccctgggcaacgcccacatgggctactacgagacggtggcgggcggcgcgggcgcgggtcccagctggcacgggcgcagcggtgtgcacagccacatgaccaacacacgcatcaccgaccctgagatcctggagagccggtacccggtcatcctgcgccgcttcgagctgcggcggggctcggggggcagaggccgcttccgaggcggcgacggcgtcacccgcgagctgctctttcgtgaggaggcgctgctgtcagtgctgaccgagcgccgcgccttccggccatacgggctccacgggggcgagcctggcgcccgcggcctaaacctgctgatccgcaaaaacggccggacggtgaatctgggcggcaagacgtcggtgaccgtgtaccccggggatgtgttctgtctccacacgcccggcggcggtggctatggggacccggaggaccccgccccaccgccggggtcgcccccgcaagcactggcctttcccgagcacggcagcgtctatgagtatcgccgggcccaggaggccgtgtgaggatcccgcaataaagatgccttaagtctcccggttctggggacgcagctacggcgcctaaaaaaaaaaaaaaaaaaaaaaaaaaaaaaaaaaaaaaaaaaaa

SEQ ID NO: 4405 - DNA, 4942 bp, Homo Sapiens
  NM_017580
gtgatggcctccctgaaattaaacatttctattagtggcttcccgttaatctcatccttcttagatcaaacctcgttatatctcctgcctatctcttttgcattccaaagttcagttttattaaatcccagggtctaagattttttctttgagaatttatctccagtgtttctatggaaattaaaaaagaaaattaggataattcaatgtcgaaatgttgcatgcatcttttgagaaatttatattttgtaggttgaaggacttgctttttgggcagcgtatttttggaggtggaatgtagttattttaataaccatgtcctaattatttatagcttcctgcctgacacagctcacttcaagaagtgcacaatgtcagaacgtggaattaagtgggcttgtgaatattgtacgtatgaaaactggccatctgcaatcaagtgtactatgtgtcgtgcccaaagacctagtggaacaattattacagaagatccatttaaaagtggttcaagtgatgttggtagagattgggatccttccagcaccgaaggaggaagtagtcctttgatatgtccagactctagtgcaagaccaagggtgaaatcttcgtatagcatggaaaatgcaaataagtggtcatgccacatgtgtacatatttgaactggccaagagcaatcagatgtacccagtgcttatcccaacgtaggaccaggagtcctacagaatctcctcagtcctcaggatctggctcaagaccagttgctttttctgttgatccttgtgaggaatacaatgatagaaataaactgaacactaggacacagcactggacttgctctgtttgcacatatgaaaactgggccaaggctaaaagatgtgttgtttgtgatcatcccagacctaataacattgaagcaatagaattggcagagactgaagaggcttcttcaataataaatgagcaagacagagctcgatggaggggaagttgcagtagtggtaatagccaaaggagatcacctcctgctacgaagcgggactctgaagtgaaaatggattttcagaggattgaattggctggtgctgtgggaagcaaggaggaacttgaagtagactttaaaaaactaaagcaaattaaaaacaggatgaaaaagactgattggctcttcctcaatgcttgtgtgggggttgtagaaggtgatttagctgccatagaagcatacaagtcatcaggaggagacattgcacgtcagctcaccgcagatgaagtacgcttgctgaatcgtccttctgcctttgatgttggctatactcttgtacacttggctatacgttttcagaggcaggatatgctagcaatattgcttacagaggtgtctcaacaagcagcaaagtgtattccagcaatggtgtgtcctgaactgacagaacaaatccggagagagatagctgcctctcttcatcagagaaagggggattttgcttgctattttctgactgaccttgtaacatttacattgccagcagatattgaagatttgcccccaacagtccaagaaaaattatttgatgaggtgcttgatagagacgttcaaaaagaattagaagaagaatctccaattattaactggtccttggaattggctacacgtttggacagtcgactgtatgcactttggaaccggactgcaggagactgcctacttgattcagttctacaagctacctggggcatctatgacaaggactcagtgcttcggaaagccctgcatgacagcctgcatgactgttcacattggttttacacacgctggaaagattgggaatcatggtattctcagagctttggtttacatttttccttgagagaagaacagtggcaagaagactgggcatttatactctctcttgctagtcagcctggagcaagcttggagcagacgcacatttttgtactggcacatattcttagacgaccaattatagtttatggagtaaaatattacaagagtttccggggagaaactttaggatatactcggtttcaaggtgtttatctgcctttgttgtgggaacagagtttttgttggaaaagtccgattgctctgggttatacgaggggccacttctctgctttggttgccatggaaaatgatggctatggcaaccgaggtgctggtgctaatctcaataccgatgatgatgtcaccatcacatttttgcctctggttgacagtgaaaggaagctactccatgtgcacttcctttctgctcaggagctaggtaatgaggaacagcaagaaaaactgctcagggagtggctggactgctgtgtgacggaggggggagttctggttgccatgcagaagagttctcggcggcgaaatcaccccctggtcactcagatggtagaaaaatggcttgaccgctaccgacagatccggccgtgtacatccctgtctgatggagaggaagatgaggatgatgaagatgaatgaaaaaaaaaatcaaacagcagaagaccaaggcatcagatctgtaatgaccctaaagttagtgtggtgctccaagcagagtcgacatcatggaatgaaccaaatctggcaggatctgctcggggaagtgttttcctggaccacacacaccttatggagataatgcctctgctgcgtgaggagacagagaactttagttggactacagtttgtaaaaaaaactaattttattaagacagaactttttttccttccaaattgtaaatctgtctataaatgtaacgcatgtggttgtgtaagacattgtttaataggaaaagttgtaccagcatcttcatattattgagaaaattttttccagcatgggcacttagaaaaagcacatggcaaatggctctttgttcctttcagatattatttcagtagaacctggcattctactttcaccttaaaagatccatctaagtctcagatctggaaacgttttgtaccgattatccacagcaaaacaaaaataagcttttattttattaataatttcgttcctcttgtgcccaatcaaatcttttaggaacaaactgcaagaaaagctaagaatgttttagagtgaactaaatacagacattgcttacttgttttgaagagggttttggttttggttattgtgtctttaagttttctgatatgccccctttcaatatttagatatttatttgttgggaagaataccttaaaatgagggttcttattccagattctgggcagtggtctgtgagtagtttttttcctggatgaaaagggagcaagcccacttgtcactaaatgaattgtgtgaaatgtgctcacttggactccatcaacaatgtgctgctcccagattgccatgccagagggtcttcggattcttccttctatcacctctgctctaagcaaatcttgttagaagggcatgcctttgcttaggcagattgggaataccaattcactacagaataaagattttaaaaatgcaataaggtggcaaatgcattgtatgaagaatttctcagtgtttagtctgagaatttttgcatgttggttaattgtggccattctttaatttaaagttaaaactataatcttaggtagaaaaacttttttataagaagtattatttgaccacttcaggtatacattcaatactgggtaaaaatttcagacctatctcaggaacacagaaatatttggtgtcctgataagcactttctagactattgatgtggccaggaatttggaaagacgacacacgcacgcgcgcgcgcgcacacacacacacacacacacacacacacacagttttttccttccctgtgatgaaaaaggctgtgaaaaccttaaagtatttgcttgcttcttgttttgtttagttgataatgaaatgtgtacaacctcaaatttgctgccagaatactaaaaatagaaaaatacccacaaaactgtcatgtctttagttctttccccccgaaaactcagtaaaaaggtgttcccaggatgaaaagatcattttttgctgcatgctaaatcttgcaggaaaaatgattttttagtacgattctgtagaaatgaatctttgatataatgtaaatgctgctgtttgtttcaagtggtgaatgtgttgttaaaaattggctgtttgctttcattttggccaataagtaatcaagtttgtagaaaatgttagcattctgactacttagcatctgtagtaatttctctatgtatagggataattttttagtgggcagagatcctgttctagttgcctgttaagcaaaatctgccctcccaattgaaaaagccaaagagaattgttagagggaaaagcatgtagccattgcagtctgcattgcagccagcgttgtccagagtacacgctcagcacttagcttctactgtgtgttgtggtctggtgagtgttgtttcccctgagcgctctattatttatttatttattatcaatcagtgaccctgaccacatagtgtgataggtgcagcattcttccctgtgggaaagaattaaagatggttccatttcctaggctacagacaggaatggggctctaaatggttttcatagactggctgttaaaggccaaaaattttggtaaatcaatgctatattatgctcttgaactattaaaacagccataattattgtcccaagatagaatatagtcctttttcaaagatgattatacgtggctaggtgacagacattaatgactgactctggagagtaagtcatacctgcactctgtggacttgatggttctttttctagagcaaacagagcgtggcattttgttttgacttgttcttccttggggtcaaatttatatatatatatataaatttttgtttgggcgaccaagatctaataattaaaacccaggtggaccatggattca

SEQ ID NO: 4406 - DNA, 3223 bp, Homo Sapiens
  NM_017582
cggcggcggcggcggcggcggcggcggcggagcccggagcgcaggccggaggctcccggcccgccggccccggagcggagcggagcggaggatgcagcagccgcagccgcaggggcagcagcagccggggccggggcagcagctggggggccagggggcggcgccgggggccgggggcggcccaggggggggcccggggccggggccctgcctgaggcgagagctgaagctgctcgagtccatcttccaccgcggccacgagcgcttccgcattgccagcgcctgcctggacgagctgagctgcgagttcctgctggctggggccggaggggccggggcgggggccgcgcccggaccgcatctccccccacgggggtcggtgcctggggatcctgtccgcatccactgcaacatcacggagtcataccctgctgtgccccccatctggtcggtggagtctgatgaccctaacttggctgctgtcttggagaggctggtggacataaagaaagggaatactctgctattgcagcatctgaagaggatcatctccgacctgtgtaaactctataacctccctcagcatccagatgtggagatgctggatcaacccttgccagcagagcagtgcacacaggaagacgtgtcttcagaagatgaagatgaggagatgcctgaggacacagaagacttagatcactatgaaatgaaagaggaagagccagctgagggcaagaaatctgaagatgatggcattggaaaagaaaacttggccatcctagagaaaattaaaaagaaccagaggcaagattacttaaatggtgcagtgtctggctcggtgcaggccactgaccggctgatgaaggagctcagggatatataccgatcacagagtttcaaaggcggaaactatgcagtcgaactcgtgaatgacagtctgtatgattggaatgtcaaactcctcaaagttgaccaggacagcgctttgcacaacgatctccagatcctcaaagagaaagaaggagccgacttcattctacttaacttttcctttaaagataactttccctttgacccaccatttgtcagggttgtgtctccagtcctctctggagggtatgttctgggcggaggggccatctgcatggaacttctcaccaaacagggctggagcagtgcctactccatagagtcagtgatcatgcagatcagtgccacactggtgaaggggaaagcacgagtgcagtttggagccaacaaatctcaatacagtctgacaagagcacagcagtcctacaagtccttggtgcagatccacgaaaaaaacggctggtacacacccccaaaagaagacggctaaccctggagtatcacccttcctccctccccaggcaccactggaccaattacctttgaatgctgtatttggatctcacgctgcctctgtggttccctccctcatttttcctggacgtgatagctctgcctattgcaggacaatgatggctattctaaacgctaaggaaaaaaaacaaacacagaactgtttcaagtactcaagactgacttacagaccaaccaaccaccttgctggaacccttgctagcaggcattcttataaaagaaactttcgagcctccttatattgctggaaactcagctgtgctccagactagagcctccttacctatgctatggatttttaatttattttctcttatttcatgtacactgctttttttggttacagtgtatgatggatgtgtatgaaaaaaatgtatctttgggaaaacaattacagtttgttaatttgaagatgctggtcttgactcatctttatttttattcgcacatcccaccccatcccctgaactacttgggaggtggggaggggtacgagtccactgttgctttggtagagatgagaggccgcattttgctgctaaagcaagagaaacttggagctgaagcacacacctggtctgcccctagatttctcctcaaggcctctggagcaaccagcacttgcccccttggaatgcagagcctggcctgccaaactacaatgtggtaggctgaaacgatggtgttaattcttaggactacttttctagtcacagatgttttcaaatttctaagaaaaagaaaatgaggctcaagaggctgcttcgtagaattccttttgaatgaattgagtggggatggggacacagtctccaagtgtgtatgtggtcttttctgatctcagctgtgtggctgcaactcttcgctgttcattggttcctctcctggaaagtggcttctaaccagcactggatggtgatcattggtaagctttgctcacctccctctctcttgcttcatttggctttatcaaaaagaacagacctagctctgaatttgtttggcttgggaaattatggattctttcaagccactcccacaaggtgggtcctactagaaagggttagcattttaaggggggttgttctatacacctgtgtccttaccccaggctcaggaactgccagggagggaagatgaggtggggagtctgtactgagatggaactgtcagtgctgtgttgtatgtacttgctgttgtaaaagtttgggcatgactttgcatctagcgggtgctgcctgcatctctttgtctgtaagcttgctctgggactcagcctcttaggacctacgatgccagcagctctcattaacagtgaaatgacagaggccaaagatggccaagtgaagacccaagtctcagaaaacccagacttgggacaactgcctgggaactaggatgctagagcagttctgtaatgctttgagacacagcaattttcacattggccattctttcccctcccctaccccttttcttttgagggacttttaatgtttgctgctttaggtggatggagagtccaccagtcccactcaatgctgctctaactctacccacacccacctaattaggggtgctaataaaacatgctgaggttgagataaagacgggacataaggggaaaattcattccatagagctgaaatctggttttcaaggcctctgtggctttcttctgaacttaccaccagccctggctggaatgtagattgtgtttttagtaatgtgtactgtgagctgtcttctgtataatgtattttgtaatgtatttttctcatctaccaaaggatgaaacaaataaaattatttaaatagt

SEQ ID NO: 4407 - DNA, 4337 bp, Homo Sapiens
  NM_017583
ggaggctgagcgggcggcgcgacgcgggggccgacgggggcgccgggtggccgcgccggaagtgccttgcgcggcagaggaagcgcagggacagagcggagcaggccgagccggcggaaagggtctttgctgctgcgcccgggcaggggctgccgcggccccaggtcccgcttcgagacgcggcgcggtccaggcgggaggcgactccctaggaagggacccggggcgggaggaggaagtgaggccgcgcggaaggaaggcggcgagccccggggccccgaggccttggccgcgtcacagcacccacatggcctctggagtgggcgcggccttcgaggaactgcctcacgacggcacgtgtgacgagtgcgagcccgacgaggctccgggggccgaggaagtgtgccgagaatgcggcttctgctactgccgccgccatgccgaggcgcacaggcagaagttcctcagtcaccatctggccgaatacgtccacggctcccaggcctggaccccgccagctgacggagagggggcggggaaggaagaagcggaggtcaaggtggagcaggagagggagatagaaagcgaggcaggggaagagagtgagtcggaggaagagagcgagtcagaggaagagagcgagacagaggaagagagtgaggatgagagcgatgaggagagtgaagaagacagcgaggaagaaatggaggatgagcaagaaagcgaggccgaagaagacaaccaagaagaaggggaatccgaggcggagggagaaactgaggcagaaagtgaatttgacccagaaatagaaatggaagcagagagagtggccaagaggaagtgtccggaccatgggcttgatttgagtacctattgccaggaagataggcagctcatctgtgtcctgtgtccagtcattggggctcaccagggccaccaactctccaccctagacgaagcctttgaagaattaagaagcaaagactcaggtggactgaaggccgctatgatcgaattggtggaaaggttgaagttcaagagctcagaccctaaagtaactcgggaccaaatgaagatgtttatacagcaggaatttaagaaagttcagaaagtgattgctgatgaggagcagaaggcccttcatctagtggacatccaagaggcaatggccacagctcatgtgactgagatactggcagacatccaatcccacatggataggttgatgactcagatggcccaagccaaggaacaacttgatacctctaatgaatcagctgagccaaaggcagagggcgatgaggaaggacccagtggtgccagtgaagaagaggacacatgaaggcttgctacccccagtggaaaatcatcccctccccttgtgtgtatgtgacagcgtgtatgtaacggcttctgatttctgtgaaagctgctcagcaacaaacgtacttccaccagatgtgtccccagatccacagcaggcacatatctctccaagggatgaccagttttatgcttactgtgtgcttctcatcccctggttgtggtaggtcaaggaaaagagcccctttgatccaccaggagcaattaagaaaggtccttcaggtaatccctcaatggctgctttgaacttactcaggaaagccagcccccataatattgtattaccaaacagtatcgctttgttaggaaggatctggaataatcttgaagggaagtcagagttttctccctgcctattaacaaaaacccaattttgttcatattgaagcatgaaataaatgagagcaaggtagggccaaattaactcttgtggacagtccctaaaagtccagttctacatttgtgaaaattgtggtgccatgaattaagatggatgactggaaaaaggtgttggagaaagagttaaagatgaggaagagatatttttagtatatgaagttatccaggacttgatattcataattcagtgctgtggaaatgaaaaaaatgattgaagaggtggaacggaaatgaccttagggggaaaaaaaaggaccaaagaagtctgattaaaagttgaaatcagtatttctgaattcaaattgcttgaatttccaaaatagtcagtaaaggatctaatagaaccagaattatttgggtgaattctgcaggttttatgggcttgtcacaacgtgaagggctggaatgtatattaccaaatgggaatttccattgtaggtttttgctagtcccacccccattttagcctaatttggcttaaacgcagtatggggagaattgttcccattccatgtgttctgaattcagctcatctcccagcatatagatatatcctcctttaactccgaccagaacccttcttcctgtggcactccccacccatagaccttcagatcatctcccacaccctggatctcactctcctcttagtaacagagacactcctgaggttggacttccttgcttttctctacttccaaatcacaatttcttacaaccaagctttgtgctcccgagtaagcagggatgtactaggggaatgtaaaactgcaaacttaaaaacctgcatcttcttgaagcatcagttttacttaccaaatggtttagagtcataagatgacctatttttatataaaagttatattatagaataaaatgttcatacgcatagactgttaagataaaaaaataggaatcttgcaaggtaattcttatttgcaagtgggttatgtgttcactctcctctacctttatggtattttggtgttcacttacgaagcatacaactagaaccatatccaagcagactctgggttgctgttaacccagggcctagacttctagtgcctctgaggcagaaccaaaggagcctgcactgggggaaatcccttttcctgcctgcctgtctgcctgtgacctgtgtacgtattacaggctttaggaccagctgattgttatgcttgcaggatggttttgaaacagaaacaatacttgtttactgtaggaatcctatttatattatttttcagtcctgtgaatgctgtgaaaagatttattcctttgaggccaggaagctcccaggcatatatgcttctaggttaggattgtcctgactcactaaagatgccaggatattggggctgaggggagtttgaggtgttaaaaaaaaaaaaaaaaaagcatttttctctcaaactgatggccaagaaatggctaggacaattttggtgctttacctatctctgcaaagactggagaatttggcataccattaattacaaccaccaatcatatccaacaaaagtaccctaaaagaaggaccagtggccactctcgaaaaaatttaagtatcagaagattaaaaagattttaggatttggaagcttgtattgtctttccccaataatcattgtttgatctccaaatagtagccttatattagcaatagacagatcattggttctccatatctgatcatatgttactactttgaatcagtatttgggaaattcaagcatttatgcagtggatataaatggaaatataaaaatatttgccaacctgtctcagtaacttatcatatctctgtgatcctcaaggaaagcacttttgcttttacttagaaagcgtttcagatttgctttatagactcctgctgtcttcagtacctgataaaactttaaccagggaagcattaaacacagtgcagcagcttttgcccaggcttctaagttcctgccggcagcatttatcaatgtaagaactaggatgcttcctgcagtggcactaccttcccctagagctggagcatgctgcttggccttaagccccagcatgatgaggcttccctcctgccaggtcagtaaaagttagagagctcagaattgggtcttgcctgggtgcaggtggcagggtttgctgaaacccctaaagagaagtcaccaagggaggcaggtaatgaatgtttccagaatcagtcggatactcatagcaatttctggctatctttcaaatgttgaatttctggatgctgagagggactttgatttgatatcattaaatccaggacagtcccaagaagtgcttggagtctcggctctgacagcccaagaagggaaataacttgtattaaggaacaactatgagccaggccctgagctgtctcttagataataaaacagatggggagtggaagagtcatttgcttcaagttatacagctaggaaatactcaagccaaatcttgaacgcagctccccctaattctgtggacaggcactttgtaccacacaccatggtccacctaaaaacagaaggataaaaagacttcaggtt

SEQ ID NO: 4408 - DNA, 2563 bp, Homo Sapiens
  NM_017585
aaggggcggagcctggccggtgccctcggagctgctggccccgggcggctgctccagtctgagcgccctccgctcgccccgagagagacccggccatgcaggagccgctgctgggagccgagggcccggactacgacaccttccccgagaagccgcccccgtcgccaggggacagggcgcgggtcgggaccctgcagaacaaaagggtgttcctggccaccttcgccgcagtgctcggcaatttcagctttgggtatgccctggtctacacatcccctgtcatcccagccctggagcgctccttggatcctgacctgcatctgaccaaatcccaggcatcctggtttgggtccgtgttcaccctgggagcagcggccggaggcctgagtgccatgatcctcaacgacctcctgggccggaagctgagcatcatgttctcagctgtgccgtcggcggccggctatgcgctcatggcgggtgcgcacggcctctggatgctgctgctcggaaggacgctgacgggcttcgccggggggctcacagctgcctgcatcccggtgtacgtgtctgagattgctcccccaggcgttcgtggggctctgggggccacaccccagctcatggcagtgttcggatccctgtccctctacgcccttggcctcctgctgccgtggcgctggctggctgtggccggggaggcgcctgtgctcatcatgatcctgctgctcagcttcatgcccaactcgccgcgcttcctgctctctcggggcagggacgaagaggccctgcgggcgctggcctggctgcgtgggacggacgtcgatgtccactgggagttcgagcagatccaggacaacgtccggagacagagcagccgagtatcgtgggctgaggcacgggccccacacgtgtgccggcccatcaccgtggccttgctgatgcgcctcctgcagcagctgacgggcatcacgcccatcctggtctacctgcagtccatcttcgacagcaccgctgtcctgctgccccccaaggacgacgcagccatcgttggggccgtgcggctcctgtccgtgctgatcgccgccctcaccatggacctcgcaggccgcaaggtgctgctcttcgtctcagcggccatcatgtttgctgccaacctgactctggggctgtacatccactttggccccaggcctctgagccccaacagcactgcgggcctggaaagcgagtcctggggggacttggcgcagcccctggcagcacccgctggctacctcaccctggtgcccctgctggccaccatgctcttcatcatgggctacgccgtgggctggggtcccatcacctggctgctcatgtctgaggtcctgcccctgcgtgcccgtggcgtggcctcagggctctgcgtgctggccagctggctcaccgccttcgtcctcaccaagtccttcctgccagtggtgagcaccttcggcctccaggtgcctttcttcttcttcgcggccatctgcttggtgagcctggtgttcacaggctgctgtgtgcccgagaccaagggacggtccctggagcagatcgagtccttcttccgcacggggagaaggtccttcttgcgctaggtcaaggtccccgcctggagggggccaaacccccagtggctgggcctctgtgttggctacaaacctgcaccctgggaccaagaggcagcagtcatccctgccaccagccagagcacaggaagagcagtgtgatggggcctcagcagcgggtgcccctggctcgggacaggtagcactgctgtccagccacagccccagcccaggcagcccacagtgctgcacgtagccatgggccgcaggagtgcatacaaccctgcatccagggacacggccctgctgggtgacctcaggcctagtccctttcccttgcgtgaaggacacgccccacagaaggctacggggaggactgagaggacagggctggaggcagccaagtaacgtagtcatatcatcgcgctctgatctggtggcatctggctgtgcaaggaagacccggctttgccctcacaagtcttatgggcaccacagggaacatcctggacttaaaaagccagggcaggccgggcacagtggctcacgcctgtaatcccagcactttgggaggccaaagcaggtggattacccaaggccaggagttcaagaccagcctggccaacatggtgaaaccccgtctctactaaaaaatacaaaaaagctgggtgtggtggcacacacccgtagttccagctacttgggaggctgaggcagcattgcttgaacccgggaggtggaggctgcaatgagctgagatcatgccattgcactccagcctgggcaacgagagtgaaactccgtccccaccccctgccaaaaaaaaaaaaaaaaaagccagggcaaaggacctggcgtggccacttcctcctgccccagcccaacctctgggaacaggcagctcctatctgcaaactgtgttcacccttttgtaaaaataaaggaactggacctgtaaaaaaaaaaaaaaaaaa

SEQ ID NO: 4409 - DNA, 3163 bp, Homo Sapiens
  NM_017588
gccgcctggcgcccgcccgagctgccgccttgtcgagctgagtccgcgctcccgcccaggcggcggccgacgcgacgccccgagcgcccggccccgccgccgcggcccggcagactgcctctgtcaccgggtccctccacccttgtctcctgtgcggccagcgtcagagccatggcgacggaggagaagaagcccgagaccgaggccgccagagcacagccaaccccttcgtcatccgccactcagagcaagcctacacctgtgaagccaaactatgctctaaagttcacccttgctggccacaccaaagcagtgtcctccgtgaaattcagcccgaatggagagtggctggcaagttcatctgctgataaacttattaaaatttggggcgcgtatgatgggaaatttgagaaaaccatatctggtcacaagctgggaatatccgatgtagcctggtcgtcagattctaaccttcttgtttctgcctcagatgacaaaaccttgaagatatgggacgtgagctcgggcaagtgtctgaaaaccctgaagggacacagtaattatgtcttttgctgcaacttcaatccccagtccaaccttattgtctcaggatcctttgacgaaagcgtgaggatatgggatgtgaaaacagggaagtgcctcaagactttgccagctcactcggatccagtctcggccgttcattttaatcgtgatggatccttgatagtttcaagtagctatgatggtctctgtcgcatctgggacaccgcctcaggccagtgcctgaagacgctcatcgatgacgacaacccccccgtgtcttttgtgaagttctccccgaacggcaaatacatcctggccgccacgctggacaacactctgaagctctgggactacagcaaggggaagtgcctgaagacgtacactggccacaagaatgagaaatactgcatatttgccaatttctctgttactggtgggaagtggattgtgtctggctcagaggataaccttgtttacatctggaaccttcagacgaaagagattgtacagaaactacaaggccacacagatgtcgtgatctcaacagcttgtcacccaacagaaaacatcatcgcctctgctgcgctagaaaatgacaaaacaattaaactgtggaagagtgactgctaagtccctttgctcctgcccgcgagagactgtcgggaagttgacccggattggcaagaaacagggtgtcttggaggtggtcccccagatctgcgcctgggggtcaggacagggcctgatttgagcctcctctctgaagatgatttggccgagcggaaggtgtggaccaccggaaagttcttaaaagttgctggtgacatttcttgccaattctaacactgtctagggaagagttcctagtctattgtgttcaaacagagtcaacaaaagtttttaattttttattacagaagggtgaagttcaatttaacatgcgttgtgttttttcagtaaacgttctgtatctttttgatattccatgacccagtgcacgctgtggcctgtcaccgccaccgtggccccgccagctggcctcccctttggcccacgccggccgcccccattctctgctgcgtagatgccctggcccagggccctgactcctccattcccgccagtagctgttcctagtgtattttcgtctttctggaaaacagcattgagtggttgttttctgtgtaaagagccgtttgtgtcttgggagtttgtggcccacatgccgatagcacggtcatcgcacatgactctcccgtttgtctcagtgtccctgcaacaagcagcaccgcagactgtaataaaaggtggggttttgtgaatggttgtggcaagtgcgtccttgtgaagctcgtctccatgtggctttcttggagaaaggctcccctggggcaagagggtggaaggtttctttggacaggaggtgctgaggctggctgcacctgctctctgaagacgccttcctctctaggttcattgttcagtgttgctgggggcggggaacgggggtggggaggttcttagttgcgaaggagccaagctcctgatggacttgcgttgggatgtgggggacacctgtggcatggtaaggctccctgagtcccttactccaggtcagatgccagtgggactcatgcgccctatgagggctgcagggccagtgctgcccctcggactcctcgaggggttgggtgctaagcgcgagcctcgccgtccctgctggagccctcgcctgcctgcccctctgcctgtgctcctggcagtgtggcttcccggtgctcacctgcacagcagttaacagcagaggccgagcgggagcctctggggagcgaggctgaaacctgaacctgcccatggagacagttgtggtgagggttgccacacacagtgagggcggagcagggtggctgagggcacaggtgcctgggtctgtcccacggggcagggctttggggctgtgatgctctgggaagccagcttgggtcctgggtctacagagggccctggccccggagcccagccagctctgcctctctcagggcctggagtcctgggggagctcagccagctctgcctttctcagggcctggagtcctggatgaatcctgcaggtttttggttgcaccggcccagggaggaagcggggggtttgtcaggtgggctctcctggaggtcctcgagtggcaggggtgaggaggggattatctgaggcatctggagatgtatatcctgtggtttcccctgcccctctgtttccgatgaggtgtacggatgagtgacctgcactaagaagtgagttgccacagtgaaaatgggttggtttttgtcttcgacgctcagggtctgggcgcctcgcatttgcagtctgttgtgacagacacggggagctccgcgtgccagcctgtggctgccctgctgtgggggtcctggggccggcgaggccccttcagtcttgttctggggggacggcccactccggggagggggtgtgctgtgctgagcgctgtatccctgaatatagtttattttttctacatttgaattctgttgtagatttatgtaaaaatacattctttttgaaaataaaaattttcatgtcttctaatttaaaaaaaaa

SEQ ID NO: 4410 - DNA, 3604 bp, Homo Sapiens
  NM_017592
ggcgggactaactagcaaacggggactagaaatagggatgctgaaaagcaacggggagagacgcagtcgtaacgcacttccggcggtctacgcgaggaagatggctgcatcccagcagcaagcttcagcggcttcctcagctgctggtgtatcgggtcctagttcggctggcggcccgggtccccagcagcagccgcaaccgccagcacaactggtgggccctgcccagagcggcctcctgcagcaacagcaacaggacttcgatcctgtgcagcgttataagatgctcatcccgcagctgaaggagagtctacagaccttgatgaaggttgcggcccaaaacttgattcagaacactaacatcgacaatggacaaaagagcagtgatggacccatacagcgctttgacaagtgcctggaagagttctatgcactctgtgaccagctggagctgtgcctgcgcctggcgcatgagtgcctgtcacagagttgtgacagtgccaagcactctccaacgttggtgcccacagccaccaagcccgacgcagtgcagcctgacagcctcccctacccacagtacctggcggtcatcaaagcccagatttcctgtgccaaggacattcacaccgccctgctggactgtgccaacaaggtcacgggcaagacacccgcaccacctgctggccctgggggcactctgtgaagtgggggacagggagtggggcaggcagtggttggtgggtggtgtgcaaagggaatgaagagcgtcctgggcctaaacacagcagcctcctctcttcctgcctgagcaccgcagcgggagccagcagggggcagcagaggccaacagggagctcgcaggccgggcccctgcgtccctgccccttcttcctgctccccctcctagcctagggtagactttgaactgtgtgtgttgatgacttctctgttccacaggccctcccccattcttgcctgggtgtggagccctggctgtcccctctccctcagtccttcctgactgtctccagctgggaggtggtctctgtgtgccactcctctgtgtctctattacagttgtgtctctctcatcctgtctctttttcccttgtttctctgttcctgttaatgtgtttctccccatggtcctatttctctcactctgacctctctctcttagtcccctttagctgtcttctatccccagctcctaactgggactctgtgtctatgcagggggccagcacccctgggttatctggggctaagggaagggacttcatttccaggggccacagccaagcccagagtcccccagcggctcgcatgtcagcccagaccccagggtccttggcctaggagaggagcagtggaggggcccaggctctgagctccacaggtctgagcagggagcaactcaggcccccacccaagcctgcgtcagcggaacttgagtgaggggcgttgtgcaatttgtggcaaggctggcccagctggatgcctgggtcccagtatttttagccccaaaggagaagtgaaaaggccccagccggggtgaatcatcagtcctggggaagaacccaggcgcctgagccccagctccgggaagcaggcactggggagggggcttcaaggagggagtgccccctcagactccctgcttccctggaagcttcaggaagctcagcctcagccttcaggcctgagcaagtgcagggcggagctaccagcccaggctcagatgttggggtgtgaaagcctcaagtgactcagcctggttggagaactgccccacccagtatcttctgtgccatggttcccacattcgcactccatggcctcctgtcctggaccccacgtctgcaaggaaaccctaggaccatggatacctctgtgattcacgctgagcccaagtccccacactggaaaactgggaaatggccagctgtgtgtcccaggaaattcctccccttattcttccttgaagtgcccgagcatgtagggcaagaaggaaggctgaagcgctgtccctaggaggaatttctccttcaggggagcctcagttttgcccatttatctaattgaatcagttttttacccaatcccccgattttgtaggataatctcccttatctaaagtcaactgattatggactttaatcacatctacaaaacacttccatggcgacagctagatgagtgtttgaataactgggactgtagcccgtccaagttgacacataaaactgaccatcgggccgggggcggtggctcacgcctgtaatcccaacactttgggagcccgaggcgggcggatcacaaggtcaggagttcgagaccagcctggccaacacggtgaaaccccgactctactaaaaatacaaaaaattagccgggtgtggtggcacacacctgtagtcccagctactcgggaggctgaggcaggagaatcgtttgaacctgggaggcagaggttgcagtgagccaagatcacactattgcactccagcctgggcgacagggcaagactctgtctcaaaaaaaataaaaaactgaccatctagtccttgtcatctgggcaccctcacacatctccttaaccacacttaatctccaaataagtacgataacatagtcatagtcccacccaacatgatgcagttatcttgcatacaactgaagacaactaaccctttccccaacagagcccaccagcagtggtggagatgtcggtccatgagcgcacacacaagactgagggactgtcggccctcccaggtggtgtcaacacaacatcacacacaggtgggggggcctgatagcccagcacccatgatacagggcctaccaatgcttaaaaccacacccagggagcccacagaggcactcagtgggtggtggggtgatggatacacatctatcaggcacagggcggaggtgggcaccactgagttgcactcagcaaacacattgggtatcttgtgcccaaggcctgtatttgtggagctgatgttttagtgagagacagtaaatgtgacaaaagtaaaatatatcagatggtgagaaaacagaaaaatgagatcagaagtggagatgttggggccaggcacagtggcccaggcctgtaatcccatcactttgggaggtgcaggcaggcagatggcttgagcccaggaattcaagaccagtccgagcaacatagcaaaagcccttatctgcaaaaaattcaaaaattagccaggtgtggtggtgcgtgcccaggttcccaggtactcggaggctgagaggtgggaggatgccttgagcttgagaggttgaagctgcagtgagctgtgatcgcaccactgcactccagcttggttcatggagaccctgtttttttaaaaaaagaagtggaggtgtttacaccagcaaaatactcattttttaagtgtaattaagttgaagatcaaaaaatggaaatgtataattaaatcatacttagcaaatctaacacatgaaatgtaacatctgcatatggagaaccgtgttactttattgaaaaacattaaaagtttgagaacttaaaaaaaaaaaaaaaaaaaaaaaaaaaaaaaaaaaaaaa

SEQ ID NO: 4411 - DNA, 2681 bp, Homo Sapiens
  NM_017593
cggggcccaggctgtgcgcttggggagcgcggaatgtgaggcttggcgggccgcagcacgctcggacgggccaggggcggcgacccctcgcggacgcccggctgcgcgccgggccggggacttgcccttgcacgctccctgcgccctccagctcgccggcgggaccatgaagaagttctctcggatgcccaagtcggagggcggcagcggcggcggagcggcgggtggcggggctggcggggccggggccggggccggctgcggctccggcggctcgtccgtgggggtccgggtgttcgcggtcggccgccaccaggtcaccctggaagagtcgctggccgaaggtggattctccacagttttcctcgtgcgtactcacggtggaatccgatgtgcattgaagcgaatgtatgtcaataacatgccagacctcaatgtttgtaaaagggaaattacaattatgaaagagctatctggtcacaaaaatattgtgggctatttggactgtgctgttaattcaattagtgataatgtatgggaagtccttatcttaatggaatattgtcgagctggacaggtagtgaatcaaatgaataagaagctacagacgggttttacagaaccagaagtgttacagatattctgtgatacctgtgaagctgttgcaaggttgcatcagtgtaagactccaataattcaccgggatctgaaggtagaaaatattttgttgaatgatggtgggaactatgtactttgtgactttggcagtgccactaataaatttcttaatcctcaaaaagatggagttaatgtagtagaagaagaaattaaaaagtatacaactctgtcatacagagcccctgaaatgatcaacctttatggagggaaacccatcaccaccaaggctgatatctgggcactgggatgtctactctataaactttgtttcttcactcttccttttggtgagagtcaggttgctatctgtgatggcaacttcaccatcccagacaattctcgttactcccgtaacatacattgcttaataaggttcatgcttgaaccagatccggaacatagacctgatatatttcaagtgtcatattttgcatttaaatttgccaaaaaggattgtccagtctccaacatcaataattcttctattccttcagctcttcctgaaccgatgactgctagtgaagcagctgctaggaaaagccaaataaaagccagaataacagataccattggaccaacagaaacctcaattgcaccaagacaaagaccaaaggccaactctgctactactgccactcccagtgtgctgaccattcaaagttcagcaacacctgttaaagtccttgctcctggtgaattcggtaaccatagaccaaaaggggcactaagacctggaaatggccctgaaattttattgggtcagggacctcctcagcagccgccacagcagcatagagtactccagcaactacagcagggagattggagattacagcaactccatttacagcatcgtcatcctcaccagcagcagcagcagcagcagcagcaacagcaacagcagcagcagcaacagcaacagcagcagcagcagcagcagcagcagcaccaccaccaccaccaccaccacctacttcaagatgcttatatgcagcagtatcaacatgcaacacagcagcaacagatgcttcaacaacaatttttaatgcattcggtatatcaaccacaaccttctgcatcacagtatcctacaatgatgccgcagtatcagcaggctttctttcaacagcagatgctagctcaacatcagccgtctcaacaacaggcatcacctgaatatcttacctcccctcaagagttctcaccagccttagtttcctacacttcatcacttccagctcaggttggaaccataatggactcctcctatagtgccaataggtcagttgctgataaagaggccattgcaaatttcacaaatcagaagaacatcagcaatccacctgatatgtcagggtggaatccttttggagaggataatttctctaagttaacagaagaggaactattggacagagaatttgaccttctaagatcaagtaagggacacttgaaggcttattttgcttcacagtaaaataacagctctattattattcagcaaggccaaagacttttgagaatgtgtatggaaaattctttttgtgcatttgagggcaaaattcaggccatcttcttatacatatactatcaaattatgttgtgtgcattagaaatcagttgcttgatagtagctattaaacccaatattgctgatagtatgctaatatcctaaaacttaaatattgcatatctatgaatgttaaattcagaatatctctaaaacatggaaaattgatgtttcaataaaaagggagacattttattattttgccttactaatgattttgcagctctgtttttctgcacactcaatagaaaatattgtgggtctgagatgccctttgaaaatgcctgaaagaaaacatgggctactacattatgttaatgttttgtaatgtccttttaatgagtggtgacataaaagggctgctttgttgtcctgatatggcaaaaattaaataaattctttttcactttaaatcagaaaaaaaaaaaaaaaa

SEQ ID NO: 4412 - DNA, 4580 bp, Homo Sapiens
  NM_017599
gtagttttctggacccacgggacgggcaggagctggagctccgtgccgcctgtactcccgccttcatttcccatcgtgctgaggcgggtggcatggcggagaaggatgacaccggagtttgacgaagaggtggtttttgagaattctccactttaccaatacttacaggatctgggacacacagactttgaaatatgttcttctttgtcaccaaaaacagaaaaatgcacaacagagggacaacaaaagcctcctacaagagtcctaccaaaacaaggtatcctgttaaaagtggctgaaaccatcaaaagttggatttttttttctcagtgcaataagaaagatgacttacttcacaagttggatattggattccgactcgactcattacataccatcctgcaacaggaagtcctgttacaagaggatgtggagctgattgagctacttgatcccagtatcctgtctgcagggcaatctcaacaacaggaaaatggacaccttccaacactttgctccctggcaacccctaatatttgggatctctcaatgctatttgccttcattagcttgctcgttatgcttcccacttggtggattgtgtcttcctggctggtatggggagtgattctatttgtgtatctggtcataagagctttgagattatggaggacagccaaactacaagtgaccctaaaaaaatacagcgttcatttggaagatatggccacaaacagccgagcttttactaacctcgtgagaaaagctttacgtctcattcaagaaaccgaagtgatttccagaggatttacactggtcagtgctgcttgcccatttaataaagctggacagcatccaagtcagcatctcatcggtcttcggaaagctgtctaccgaactctaagagccaacttccaagcagcaaggctagctaccctatatatgctgaaaaactaccccctgaactctgagagtgacaatgtaaccaactacatctgtgtggtgccttttaaagagctgggccttggacttagtgaagagcagatttcagaagaggaagcacataactttacagatggcttcagcctgcctgcattgaaggttttgttccaactctgggtggcacagagttcagagttcttcagacggttagccctattactttctacagccaattcacctcctgggcccttacttactccagcacttctgcctcatcgtatcttatctgatgtgactcaaggtctacctcatgctcattctgcctgtttggaagagcttaagcgcagctatgagttctatcggtactttgaaactcagcaccagtcagtaccgcagtgtttatccaaaactcaacagaagtcaagagaactgaataatgttcacacagcagtgcgtagcttgcagctccatctgaaagcattactgaatgaggtaataattcttgaagatgaacttgaaaagcttgtttgtactaaagaaacacaagaactagtgtcagaggcttatcccatcctagaacagaaattaaagttgattcagccccacgttcaagcaagcaacaattgctgggaagaggccatttctcaggtcgacaaactgctacgaagaaatacagataaaaaaggcaagcctgaaatagcatgtgaaaacccacattgtacagtagtacctttgaagcagcctactctacacattgcagacaaagatccaatcccagaggagcaggaattagaagcttatgtagatgatatagatattgatagtgatttcagaaaggatgatttttattacttgtctcaagaagacaaagagagacagaagcgtgagcatgaagaatccaagagggtgctccaagaattaaaatctgtgctgggatttaaagcttcagaggcagaaaggcagaagtggaagcaacttctatttagtgatcatgccgtgttgaaatccttgtctcctgtagacccagtggaacccataagtaattcagaaccatcaatgaattcagatatgggaaaagtcagtaaaaatgatactgaagaggaaagtaataaatccgccacaacagacaatgaaataagtaggactgagtatttatgtgaaaactctctagaaggtaaaaataaagataattcttcaaatgaagtcttcccccaaggagcagaagaaagaatgtgttaccaatgtgagagtgaagatgaaccacaagcagatggaagtggtctgaccactgcccctccaactcccagggactcattacagccctccattaagcagaggctggcacggctacagctgtcaccagattttaccttcactgctggccttgctgcagaagtggctgctagatctctctcctttaccaccatgcaggaacagacttttggtggtgaggaggaagaacaaataatagaagaaaataaaaatgagatagaagaaaagtaagaaccaagattcatatgaagtgatattagattgttccttttacaaaagtgtttagcttcaagactggaaagggaatatgagtgtaagtttactatatataaagctaagatgtggatttacaggaagaaccctggtttgaataactgatctgaaattagtagttacctgtaaatggcagatcttttaggaaaataagagaaaggtaagggctcttttgaataaactgctgttttatttgtggcacaactgatcaatcttggaaattctttaagtatttttaataagaaatgaattatcatttcttgccagaatttgctaccttaaggtgattgggaaaattctgttgcaagaacattaacatttagtatgactcctttttactgtattcttgcagttaataactgcagctattatgttaataacaagttgtttgtattttatttttgtttataccagtcttaaagatccaggttctgaataaaaaaattaattgatacaattgatgtgtgctggggtttggaactaaaagtagtttcaacagtgcgtgggttatgacatttcttatgtttctttgttcatgtgtgtatttagtagttaattttaagatgtcctagtgatctttaaaagaaaaatattgtaccattttttagaattacactttcacctttctttttgcaattgaaagtgatgatgtcaaagtgggatttctgtactccaaggccccacccccaatttagcaagcagaaaaacgttccttgtatcactttaccttggataattgggtgccattaacacaaacaggtcacaatcctgctgttttctagccctgtccaccataatgagattcaggaaacatcctgtcagcctcctggaaagcatccttgtctccttagtatttcatttacaaactacctcttaacagagactgcttttcaaattggccaatcttacctgttttgtgttgtgattgcattttcaaagagtaattattttcagcatatacagttttgaaacctgtagctcctatgcaataacatagttctatagacattatttgggggaaatgtagtaataactcaatctatgttgctgtcctagaaaggaaattgcatgatgaatctagattgtctttagagtaaagaaacacattcaaattcctgtaacttatcactttcagtgagtaaatttacttataccaaaggggattttttttctttcaggaatctaaggaaatttactttttaacctgagaaaaaaacttggttctgctttatataaacagtagagattattgtactataagtgattttgcctttttgccaaaatcctggaactcatctataattaacctcttcggagcaataccttaggttgggccttgctttactacttagaaatagctaaatttcaattttaaaaatctttgtgtgttataactgttaaattattcaataatacttagggtttactttcttatttaaatcacttatttagtttaccgacttcatttttctttggatttagaagaagcaattatggaaaaacttggtaatctctctcaacctataaccttacacaggaagaattagagtttaataatttttaattcttttattgtatgttacttttattacaccagtttgggggaaaatcttcataaaattgtatcagttttattcagtgttctctaaggtgataccttttaattttgaaagactaaataattttaatcgagaatttccagtctttcagtctgatctatttaattcactacttgttacataatccagtgaaaactctacttgttgaaattatgacataaagatcttgcagctttatttgagtatttgttcttttgtgtagtttccatcttttaaaatatttaaaatattttcaagataaagtattatcttctctgcaaaaattcctggagtaattttctctcataatatttgaagtcagtggttctcagttgtattagtggggtaactacatcaaaataaataaagtcttatttttaaaatgcaaattttagaccatactcccagtgattcttagttggtctttttggaatgagccataggtaatgtttatgtccaataaaatctaggaacctcaaaaaaaaaaaaaaaaaa

SEQ ID NO: 4413 - DNA, 2874 bp, Homo Sapiens
  NM_017612
gcgtctggagaaaaccctagcgggtggctccgtgcggccagagctctagagagtggtgccgccttccaaccttcttccccaagccctggtggccggctccgcctcttctcgaatcttttccacagcccaaaatggccgcagaggtgtattttggcgatctagagctcttcgagccgttcgaccacccagaggagtcgattccgaagcccgttcacactcgcttcaaggacgacgacggcgacgaggaggacgaaaatggggtcggcgacgcggagctacgggagcggcttcggcagtgcgaggagaccatcgagcagctccgcgccgagaatcaagaacttaaacgaaaattgaacattctgactcgaccgagtggaatattggtgaacgatactaagttagatggacctatattacagattctattcatgaacaatgctatttcaaagcaatatcatcaagaaatagaggaatttgtatcaaatttagtaaaaagatttgaggaacagcagaaaaatgatgtggaaaagacttcctttaatcttttgccccagccatccagtattgtgctagaggaggaccacaaagtggaagagtcctgtgccattaaaaacaacaaggaagctttcagtgttgtaggaagtgtcctgtattttactaatttttgccttgataaattggggcaaccgcttctaaatgaaaaccctcagctttccgaaggatgggaaatacccaagtaccatcaagtcttcagccacattgtttctctagaagggcaagaaatacaagtaaaggcaaaaaggccaaagcctcactgtttcaattgtggttctgaagaacaccaaatgaaagattgcccaatgcctcggaatgctgctcgaataagtgaaaagagaaaagagtatatggatgcctgtggagaagcaaacaatcagaatttccagcagcgataccacgcagaagaagtagaagaaagatttggaagattcaagccaggagttattagtgaggaacttcaagatgcactaggtgtgacagacaagagtcttccaccttttatctatcggatgcgccagctagggtacccaccagggtggctcaaagaggctgaattggagaattcggggcttgcactctatgatggaaaagatggcactgatggggaaacagaagttggagaaatacaacagaataaaagtgtcacttacgatctctcaaaattggtcaactatcctggttttaatatatctactcccagaggaattccagacgaatggaggatctttggttccataccaatgcaggcatgtcagcagaaggatgtgtttgccaattaccttacttctaacttccaagcgccaggtgtgaagtctggcaacaagaggtcttcatctcactctagcccaggtagtccaaagaagcagaagaatgaaagcaactcagcgggatctcccgccgacatggagctcgattcagatatggaggtaccacatggttctcagagcagcgaaagttttcagtttcaaccaccattacctcctgacactcctccactcccccggggaactcctccacccgtcttcacccctccactcccaaagggcaccccgccgctgactcccagtgactcaccccagaccagaacagcatctggagctgtggatgaggacgcactgactctagaagaacttgaagaacagcagaggcggatctgggcagctcttgagcaggccgagagcgtaaacagcgactccgacgttcctgtggacacacctttaactggcaattccgttgcctcatcaccttgtccaaatgagctagacctccctgtcccggagggaaaaacatctgaaaagcagacgctggatgagcctgaggtaccagagatttttacaaagaaatcagaagctggacatgcctccagtccagactctgaggtgacatcactttgtcagaaggaaaaagcagagttggctccggtaaacactgaaggtgcccttcttgataatggcagtgtcgtaccaaactgtgacatcagcaatgggggcagccagaagctctttcctgcagacaccagtccttcaacggccactaaaattcatagccctatacctgacatgagcaaatttgcaactggaatcacgccatttgaatttgagaatatggcagaatctactggaatgtacctcaggataagaagcttgttaaagaactcaccccgaaaccagcagaaaaacaaaaaggcctctgaataatggcttgacttagcactgagagctatttaataactttgttccgttaattagtactaattaagtggatagatagaatggttttcctgtttgtccctcccatgtttaaaaatctatccaaggttcatgttccaaagtcaagcctattttaaagaaagactgagctcactagttcagtatattttattctcactgacaaaacttggggggagatgtgaatatgacctggtttagagagggtttgttaaggtttatactatttttggattgtgactatccgtcgagagtgatggtttttatctgtcttttgtacattgttttccctttctacattttgctaattatcctgtatataagtttaatatatcactttttaaaagaaaaaattctaccattttaaattcatgtttcaactcctacaaccaaatgagaaaaatcagggatgagcagctttatcccatttggggtatttttgtaagtgatttacatgtgtcaattttagtaatacttttacttttttgtaacttcatccttcatatatgcttgctatacaggtatgttcatctttgtgtacagaggtttaataaattagttttcatatacataatctaaaaaaaaaaaa

SEQ ID NO: 4414 - DNA, 1420 bp, Homo Sapiens
  NM_017615
gcaggggtttcagtttctggcgcgaacttccgccgttccgaagttgcacggtgaattggcgctatgtctggggacagcagcggccgcgggccagagggccggggccggggccgcgacccgcatcgggatcgcacccgctcccgctcccgctcgcggtcccctttgtcgcccaggtcccgccgcggctctgcgcgggagcgcagagaggccccagagcgcccgagcctggaggacacagagccgtcggattccggggacgagatgatggacccggccagcttggaggcggaggccgaccaaggcctgtgccgccagatccgccatcagtaccgggcgctcatcaactccgtccaacaaaaccgtgaggacatactgaatgccggtgacaaattaacagaggtccttgaagaggctaacactctgtttaatgaagtgtcccgagcaagagaagcagtcctggatgcccactttcttgttttggcttcagatttgggcaaagagaaagcaaagcagctgcgctcagacctgagctcctttgacatgttaagatatgttgaaactctactcacacatatgggtgtaaatccgctagaagctgaagaactcatccgtgatgaagatagtcctgattttgaattcatagtctatgactcctggaagataacaggcagaacagcagaaaacacctttaataaaacccatacattccactttctgttgggttcaatatacggagagtgccctgtgccaaagccacgagttgatcgtccaagaaaagttcctgtgatacaagaggagagggcaatgcctgcccagttaagaagaatggaagaatctcatcaagaagcaacagagaaagaagtagaaagaatcttgggattgttgcagacatattttcgagaagatcctgataccccaatgtccttctttgactttgtggttgatcctcattctttcccccgtacagtggaaaacatctttcatgtttccttcattatacgggatggttttgcaagaataagacttgaccaagaccgactgccagtaatagagcctgttagtattaatgaagaaaatgagggatttgaacataacacacaagttagaaatcaaggaattatagctttgagttaccgtgactgggaggagattgtgaagacctttgagatttcagagcctgtgattactccaagtcagaggcagcagaagccaagtgcttgatgctagctgaaggactcaaatggatagtgaagtccaaaacggaaagcggcatgtatcgtacatattgtatgattcaacatttttaaaggcagattgtttttagtaaaatgtagcttttgatagttaataaatttgtcatggttgtctttgattaaaggaaactcaccgccatattcacaaataaaaaaaaaaaaaaaaa

SEQ ID NO: 4415 - DNA, 2138 bp, Homo Sapiens
  NM_017621
cacggccgcgcctgcgcactggccacgcggacggcgcgatggcggcggctgccgccgagacccccgaagtccttcgggaatgcggttgcaagggcatccggacctgtctgatctgcgagcggcagcgcggcagtgacccgccctgggagctgcccccagcgaaaacataccgtttcatttactgctccgacaccggctgggccgtgggcacagaggagtctgactttgagggctgggccttccccttcccaggagtgatgctgatcgaggactttgtgacccgggaggaagaagccgagttggtgcggctcatggaccgtgacccctggaagctctcccagtctggacggaggaagcaggactatggccccaaagtcaactttcggaaacagaagctaaagaccgagggcttctgcggcctccccagcttcagccgggaggtggtgcggaggatgggcctctacccggggctggagggcttccggcccgtcgagcagtgcaacctggactactgccccgagcggggctctgccattgacccccacctggacgacgcctggctgtggggggagcggctggtcagcctcaacctcctgtcccccaccgtgctgtccatgtgtcgggaggcgcccgggagcctgctcctctgctcggccccgtcggctgccccggaggccttggtggacagcgtgatagcacccagccggtcggtgctatgccaggaggtggaggtggccatccccttacccgcccgctccctgctggtcctcaccggggcggcacggcaccagtggaagcatgccatccaccgcagacacatcgaggcccgccgcgtctgcgtcactttccgggagctgtcggctgagtttggccctggagggaggcagcaagagctgggccaggaactgctgcggatcgccctctccttccagggaagacccgtgtgaaccgcctccttggctccagacttgactgatcccgggattgaaatgaggagcacagaacagggcctcctgcaactcacggggtttcaagagaagatggctgacccctgatgctgtgagcagtgtgagccctgcccaggagcaggttttgatgggaacgtacctccaggcagcccccttccacctggaccgtggccacacttttttggttatttagtttgtcacagtcttggggacatgggatcatttgagcttaaaaaatactgggggccgggcacagtggctcacacctgtaatcctaacactttgggaggctgaggtgggcggatcacttgatgccaggagttcgagaccagcctggccaacacggtgaaaacccgtctctacaaaaactacaaaaattagccgggtgtggtgactcacagccgtaatcccagctactcgggaggctaaggtgggagaattgcttgaacctgggaggcggaggttgcagtgagccaagatcacgccactgcactccagcctcggtgacagagcaagactgttttgaaaaaaaaaaaaaatgggaacattttaaatgattttcacctttattatgcatctattttcatggggtttcccgatatctcactgtccagtcccttcatttggggaatgtgttggattagggaacagggttgaagatttgaagtttagactaaagagctgggaacagcttcagagtcaggctcagcctgactcatgcttgacacccccacgcccagggagggttgggggatgtgaggagggcagggaaatctgagagcctccttccagccccataacgctgttaacaagtaggaaaaattaaagctcccggccaggcgcggtgactcacacctgtaatccgagtactttgcggggctcaggtgggaggattgcttgaggccagcctgggcaacatagtgagacccccatctctacaaaaaatacaaacattagctgggcgtctgggcatggtggcacacacctgtagtcccagctactcgaaaggctgaggcgggaggatggctttaccaccatgtcaaggctgcagtgagctcatgatcataccactgcacttaacttggcaacagagcaagaccctgtccctaaaataaataaaaggaaaacaaaaaaagctcctcacctcccactaaaaaaaaaaaaaaaaaa

SEQ ID NO: 4416 - DNA, 4916 bp, Homo Sapiens
  NM_017623
gaggccgagagggggcagcaggcgatggcggcggcggtagctgcggcgggtcggttaggctggttgttcgccgcgctctgcctgggcaacgccgcgggggaggccgcgccgggcccgcgagtgctgggcttctgcctggaggaggatggagcggcgggcgcgggttgggtacgcggaggggcggcgcgggacacgccggacgccaccttcctcctgcgcctcttcggcccgggcttcgccaacagctcttggtcctgggtggccccggagggggcgggctgccgggaggaggcggcctcccccgcgggcgagtggcgcgcgctgctgcgcttgcgcctgcgggccgaggccgtgcgcccgcactcggcgctgctggcggtgcgcgtggagccgggtggcggggcggctgaggaggcggcgccgccctgggctctgggcctgggggcggccgggctgctggcgctggcagcgctggcgcgaggcctgcagctgagcgcgctggcgctggcgcctgccgaggtgcaggtgctgcgcgagagcggctcggaggcggagcgtgcggcggcgcggcgtttggagcccgcgcggcgctgggccggctgcgccttgggcgcgctgctgctgctggccagcctggcgcaggcggcgctggcggtgctgctgtaccgcgcggccggccagcgtgcggtgcccgccgtgttgggcagcgcggggctcgtgttcctggtgggagaggtggtgccggccgccgtgagcgggcgctggacgctggcgctggcgccgcgagcgctcggcctcagccgcctggccgtcctgctcactctgcccgtcgcgctgcccgtggggcagctgctggagctggcggcgcggcccgggcggctgcgggagcgggtgctggagctggcgcgcggcggcggcgacccctacagcgatctcagcaagggcgtgctgcgctgccggaccgtggaggacgtgctcacgcccctcgaagactgcttcatgctggacgccagcaccgtgctggacttcggcgtcctggccagcatcatgcagagcggccacacgcgcatcccggtgtacgaggaggagcgctccaacatcgtggacatgctctacctcaaggacttggccttcgtggatcccgaagactgcacgccgctcagcaccatcactcgtttctacaaccatccgctccacttcgtcttcaacgacaccaagctggacgctgtcctggaggaattcaagcgagggaagtcccacctggccatcgtgcagaaggtgaacaacgagggtgaaggcgaccccttctacgaggtcctgggcctggtcaccctggaggacgtgatcgaggagatcatcaggtccgagatcctggacgagtctgaagactaccgagacaccgtggtgaagaggaagcctgcttctctgatggcccctctgaagcggaaggaggagttctccttgttcaaggtgtctgatgatgaatataaagtaacaatctcgcctcagctgctcttggccacccagcgcttcctgtcccgagaagtggatgtattcagcccgctgcgcatctctgagaaggtcctgctgcacctgttgaagcatcccagtgtcaaccaggaagtgaggtttgacgagagcaaccggctggccacacaccactacctgtaccagcgcagccagccggtggattacttcattctcatcctgcagggcagggttgaagtggagatcgggaaagagggtctgaagtttgagaatggggccttcacgtactatggagtgtcggccctaactgtgccatcctcggttcaccagtccccggtgtcctcgctccagcccatccgccatgacctgcagcccgacccaggtgacggcacgcattcatctgcgtattgtcccgactacaccgtgagggcgctctctgatctgcagctcatcaaggttacgcgactgcagtacctcaatgcactcctggctacccgagcccagaacctgccacagtcccctgagaacaccgacctgcaggttattccaggcagccagaccaggctccttggtgagaagaccaccacagcggcagggtccagccacagcaggcccggcgtcccggtggaaggcagccctgggcggaacccaggcgtttaacggctcactaggcagccccagatctggggaacagatgagcacgtggggagctggagtgagctgagcagaagttttgtgcccgcctgcccccatcccctccaggccacgttttagatggcccttgtagttgcgggtcctgggtgtcctcagaactagacatcaatgcctggatccttcagccggccctgccctcctttaggagacaggagtcaccagggcacagccctccaggcccgcctcaggaaggaatgaaaggaatgccatcatctctagttcccagggcccagccttccccttctcccccggggcagggacagtgcggcatattcagattcagacctctttgggctgagccaccttgtgagtgcagttactgcctttgtgtggccgtgacctctatttgtttgcttttaatttgccaacctatcgctgctggcagcactttttgagcaagccgagagcacccattttggctgggggttcagatcgatggccttgtccatgttgtcctttctggcttccctgatggtgtcatgtttcagcgcatgcgccccagcctttcccatgtgccaaaccagaagctccactgcccgtaggctgtccctgtagccctgctccctccctggaggctgctcttctgattctgagagctggcctagtggtgctgagggcccctttctgcttctctgcccacctgctgagttgccactcgcagtgttgtcagttcccgtgttctgagaagaggtcatgcctgggaggaagggatcgtcatgctgcatcgaatcctctctccgccgtgtggcccccaggagagtagctgcctgttgcacctgctccacacctccccacagcctccctgcaggtgctgtgtggccgtgatgtgcagagagcagtgagggagggttcatgaaccaggtggatcctctttaaaaaaaaaaaagtttttgttatatctctagaacatttcaagtcttttcctttttttctgttcctagctatggggttttagagaagtgggaacaggaaggcatttgtctttttcttctagtttactacattttccttccgtagttcttcagctgtgtggaaacgggcatcacaaggacataggatcatagattgggtagggagggaggaggatttctggaacttttctcaaaggaatttggacccttataaatgggactgaaggtcaaaacaacagtgatatccttgcttagaaattgtcctcaaggaataaactctgagagcaagcccgggttggaaacagatgctttaaaatcctctctccagaacagtggttttttgtttgtttatttgagatggagtctcactctgtcacccaggctggagtgcagtggtgagatcttggctcactgcaacctccacctcccaggttcaagccattctcctgtctcagccccctgagtagctgggattacaggtgcccaccaccacacccggctaatttttgtatttttagtagagatggggtttcaccatgttggccaggctgatcttgaactcctgacctcaggtgatctgcctgccttggcctcccaaagtgctgggattataggtgtgagctaagatcagggattcttaaccttggctgcacaccagaatcacctggcaaattaaaaatacgtggacctgccaccagagcttgtgatttaatcagagtcggcatcagagttttcaattttttatttatttattattattattattattattattattattgagacaagatcttgctctgtcgcccagactggagtgcagtggtgtgatcacggcttgctgcagcctcgacctccctggttcaggccatcctgccacctcagcctcctgagtagtagggactacaggtaggcaccaccacacccagctaatacttttaatttttttttgtagagatagggtctcattatgttgcctggggtagtctcgaactcctaggctcaagcgatcctcctgcctcggcctcccaaagtgttgagattataggcgtgagccaccgtgcccagattcacagaagtttcatacacctttcacccaggttcccctaatgttaacagcttacatataaccttggtacatttatcaaaactaaaggtgcaatcatactaatagctagagtttatttggattttaccatttttcccaatgtcccttttctgctgcagcagccaatccaggatgccatactgcacttagagctgttgctttcttttttcctaactttatattttgaaataatttcagatgataggaagttgtaaaggtaagggccccacgcacccttcatctagtttccctccatggttacatcttatatggttgtaatgcagtattccaacaaagactctgacactggtgcgatgtgggtggacagtccaaatcatttgtcacatgtacatctgtgtaactaccactgcaatcaggataaagaagtcccatccccacaaggatctccctccccaccttccctaactcctggtaaccactaatcgttcatctcttcttattttgtcatttcaagaatgttgtataaatgggagcatagtgtgtaagcattcgggattgtcttttttcactcggcgtcattctcgggagatcatccaggcattgcatgtgtcaacagtttgctcctttttattgctgagtggtattccgtggtgtatgcattggccccctgaaggacacctgggatgtttccagtttggggctattccaaataaagctgctacgactattcatgtaca

SEQ ID NO: 4417 - DNA, 4758 bp, Homo Sapiens
  NM_017629
gagccggagccgggtccctgtccccgggccgggcgccgccgccgccccctgcccagcgcccgcgtctccgcggcgccaccccagcgccaatattccggagatcaagcgttacgcggcggcggcggcggcggcggcggggcccggagcgggaggcgccggggaccggggcgaggcggcccccgccgccgccatggaggcgctgggacccggacctccggctagcctgtttcagccacctcgtcgtcctggccttggaactgttggaaaaccaattcgactgttagccaatcattttcaggttcagattcctaaaatagatgtgtatcactatgatgtggatattaagcctgaaaaacggcctcgtagagtcaacagggaggtagtagatacaatggtgcggcacttcaagatgcaaatatttggtgatcggcagcctgggtatgatggcaaaagaaacatgtacacagcacatccactaccaattggacgggatagggttgatatggaggtgactcttccaggcgagggtaaagaccaaacatttaaagtgtctgttcagtgggtgtcagttgtgagccttcagttgcttttagaagctttggctgggcacttgaatgaagtcccagatgactcagtacaagcacttgatgttatcacaagacaccttccctccatgaggtacaccccagtgggccgttcctttttctcacccccggaaggttactaccaccctctgggagggggcagggaggtctggtttggttttcatcagtctgtgagacctgccatgtggaatatgatgctcaacattgatgtatctgcaactgctttctaccgggctcagcctatcattgagttcatgtgtgaggttttagacattcagaacatcaatgaacagaccaaacctctaacagactcccagcgtgtcaaatttaccaaagaaatcagaggtctcaaagttgaggtgacccactgtggacagatgaaacgaaaataccgagtttgtaatgtgactagacggccagccagtcatcaaacttttcctttgcagctagaaaacggtcaagctatggaatgtacagtagctcaatattttaagcaaaagtatagtctgcaactgaaatacccccatcttccctgtctccaagtgggacaagaacaaaagcatacatacttgccactcgaggtctgtaatatagtggcaggacagcgatgtatcaagaagctcacagacaatcagacttccacaatgatcaaagctacagcaagatctgctcctgacagacaggaagagatcagtagactggtgaagagcaacagtatggtgggtggacctgatccataccttaaagaatttggtattgttgtccacaatgaaatgacagagctcacaggcagggtacttccagcaccaatgctgcaatatggaggccggaataaaacagtagccacacccaaccagggtgtctgggacatgcgaggaaagcagttttatgctggcattgaaattaaagtttgggcagttgcttgttttgcacctcagaaacaatgtagggaagatttactaaagagtttcactgaccagctgcgtaaaatctctaaggatgcaggaatgcccatccagggtcagccatgtttctgcaagtatgcacaaggtgcagacagtgtggagcctatgtttaaacatctgaaaatgacttatgtgggcctacagctaatagtggttatcctgcctggaaagacaccagtatatgcggaggtgaaacgtgttggagatacccttctaggtatggccacacagtgtgtccaggtaaaaaatgtagtgaagacctcacctcaaaccctttccaatctttgcctgaagataaatgcaaaacttggaggaattaacaatgtgcttgtgcctcatcaaaggccctcggtgttccagcagcctgtcatcttcctgggagcggatgtcacacaccccccagcaggggatgggaagaaaccttccattgctgctgtggttggcagtatggatggccaccccagccggtactgtgccaccgttcgggtgcagacttcccggcaggagatctcccaagagctcctctacagtcaagaggtcatccaggacctgactaacatggttcgagagctgctgattcagttctacaaatccacacgcttcaaacccactcggatcatctattaccgtggaggggtatctgagggacaaatgaaacaggtagcttggccagaactaatagcaattcgaaaggcatgtattagcttggaagaagattaccggccaggaataacttatattgtggtgcaaaaaagacatcacacacgactcttctgtgcagataaaacagaaagggtagggaaaagtggcaatgtaccagcaggcactacagtggatagtaccatcacacatccatctgagtttgacttttacctctgtagtcatgcaggaattcagggaaccagccgtccctcacattaccaggtcttgtgggatgacaactgcttcactgcagatgaactccagctactgacttaccagctgtgtcacacctatgtgaggtgcactcgctcagtctctattccagcccctgcatattatgcccggcttgtagcatttagggcaaggtatcatctggtggataaagatcatgacagtgcggaaggcagtcatgtgtcaggacagagcaacggccgggatcctcaggccttggctaaggctgtgcaaatccaccatgatacccagcacacgatgtattttgcctgagagtctcagaaaaagaactcaaccaatttggcaccccatgcagcctcaaaatgtttcaaatgcctaccgcctctagatcgagccacgttgacttcaggtggtcttctaccagcagctcggaatagttgcactgaatctatactttgcagcactgtctgatgcgtcaacaaaattgagccatttttttaaagtaatagatactaatagattatcttttctgatgcactggactgaatttttacctcaatgtgcaaaggctgatcagcctgaactttctaaaggactttacaagaagggtttctatggaatattttgctagctgtggtgttcaccgcatccctctagtcttagaagagaagattattccttttttctgtagtcattgagtggggtatatgcataagtgggagagaaaaaccaaacaatctacttcagttcagtgtaactatttaattgtgtgggtccatagactttttaatgaagatttctgactttgccactgtaaatgcctttaatgagcattaatttttgaaagttttacagagttttattagttttactactttatcttattgatctctgcagacttgtgctggtgcaagtacatgctgacaggcaatttgcactatatttggctgcagattcaaataggcagttctcttatttggtcgacttttgtgaatgtgtgacataaacagatgtaatgcatgtcacagtgacggagataacactgccatgataaaagtactcatgtttcccctatttggaaaaaaaaattgcttttagtatttttccaagttttcaaaagtgcccattttatgctgctgtgtggtttgttaaatctaaatgatttttaaacttttctcatagaaacttaactttggcaataaacattttttaaggtctctcctcttccttccccaacaatgtagttttctagatgagatttcagtatgattttatcagctatttcttatatatcataatctggcaatttctgaaaccagtcagaaaagacatatatttccatgcctttttaaagaattatttttacctgttttatattcacagttggtgtcctgtcactttgttttaaaataagctagaaccaggatgcttccttattggaaaggctttgccagtccttaaggtacaatgagtgatgctgcaacttgcaaatgtaccagcatttaaaatttcttttcctgggaatcaaggtaactcacacgactacttgcagtacaaattttttgcttctctttcgacatgaaatgtacttggtgggttttccttccttttattaaactaaaactgtgtggaaaaggttgatttttcttaatagattctggattccactcacagggagatgggattcctttcttgtccaaacaaagggagttgctctaaagcgagcatcagttaaaatgtaggggaaaatgtattctgtatgtagtgtagataatactttgtgaatggacaacagttacatagtgtcttggtagcaccagccagtgtttcccagcccagagtttactgacttgtaattctctatccaggacatcaggagtgagggatggaaaaggggataaaaggcctggagccacactctatatggctgaggaaggagctagggaaagagatagacacaatggggtgaaaacaattttgccgcccctgcctggaaactgctggtggggaaatgatggtgaagggtgtttgcttgaactcatgagacggtccaaatctcataaactagccttctcaaaatcccagcaatataaagcactgtttttcttcagtcgtttaaataaacttgtaaatacattgaagtttacatttccatgtgctgttgatcaacggcgccacctgtgtttgctgagactggtctctgagagagttttatgtcgatcgaggcctgttgctcattaagctgagtgcagacgtccttaatccctgcagatagtgggatgaaagcaagttct

SEQ ID NO: 4418 - DNA, 2391 bp, Homo Sapiens
  NM_017632
agtgggcggttcggcggctctgggcgctgttgtttggtctttaggcctgcggaggggcgttatctggagggccgcgggtgcaggccgcagtgacagggccgctcgccccgctagtcctgcctgtctcccggtgcagctgtgttcgcggcctgcaggcccaacatggcgcaggaggtgtcggagtacctgagccagaacccgcgggtggcagcctgggtggaggcgctgcgctgcgacggcgagactgacaaacactggcgccaccgccgggattttttgcttcgcaacgccggggacctggcccccgctggcggcgctgcctccgctagcacggatgaagctgccgacgccgagagcgggacccgaaaccggcagctgcagcagctcatctccttttccatggcctgggcgaaccacgtcttcctcgggtgccgataccctcaaaaagttatggataaaatacttagtatggctgaaggcatcaaagtgacagatgctccaacctatacaacaagagatgaactggttgccaaggtgaagaaaagagggatatcgagtagcaatgaaggggtagaagagccatccaaaaaacgagttatagaaggaaaaaacagttctgcagttgagcaagatcacgcaaaaacctctgccaagacagaacgtgcatcagctcagcaggaaaacagttcaacgtgtatagggtcggccatcaaatcagagagtgggaactcagctcggagctctggcatctccagtcagaatagctctacaagtgatggagatcgatctgtttccagccaaagcagcagcagcgtttcctctcaggtaacaacggcaggatctgggaaagcttctgaagcagaagctccagataaacacggttctgcatcatttgtttccttgctgaaatccagtgtgaatagtcacatgacccaatccactgattctagacaacaaagtggatcacctaaaaagagtgctttggaaggctcttcagcctcagcttctcaaagcagctcagagatcgaggtgcccttgttgggctcctcaggaagctcagaggtagaattgccactattgtcttccaaacctagttcagagacagcttcaagtgggttaacttccaaaactagttcagaggcaagtgtttcatcatcagttgctaaaaacagttcctcatcaggcacatccttactgactcccaagagcagctcttcaacaaatacatcgctgctaacttccaagagcacttcccaggtagctgcatcactactagcttccaagagcagctcccagaccagtggatctctggtttccaaaagcacttccttagcaagtgtgtcccagttggcttctaagagtagttctcagactagcacctcacagttgccttctaaaagtacttcacagtcaagtgagagttctgtcaaattctcttgcaagttaaccaatgaagatgtgaaacagaagcaaccttttttcaatagactatataaaacggtggcatggaagttggtagctgttggtggctttagtcccaatgtgaatcatggagagctcctaaatgcagctattgaggctctgaaagcaacactggatgtattttttgtcccactaaaagaattggcagatctgcctcaaaataagagctctcaagaaagtattgtttgtgaattgaggtgcaagtctgtgtatttgggcactggctgtggaaaaagcaaagaaaatgcaaaagcagttgcatcaagagaagcattgaagttatttctcaagaaaaaggtggtggtaaaaatatgtaaaaggaaatacagaggcagtgaaatagaagatctagtactccttgatgaagaatcgaggcctgtaaacttacctccagcactaaaacatcctcaagaattactataatgtgtccaaaatatcactgcatacaatatctggtatttgaagagaaaaactgacttttgtatagtataaaacacaggctttcacaaattttgtattgctttttttccagttttgcagaaaatttacattctagttctcttcacacagtagcagttgtaaataatttatgaatgacagtacacattaaaaggtatgcattagcagcatattagtatgctgttttatttgctgaagaaaatactgtcttctatttttaatgatacattaggtacgatgtgtagttcggtagagtcccaaaatttttgtactactttcaatttggtgaaaatgtattaagttgtctaccatgttttcttttctagctgaataaaccacatcaaaggaaagggaccacagtatttgaatgtttgaaagtctgtaaagcttaaggttttaaaaatgttgcccgtaatgttgaacgtgtctgttagaaaaaaaaaaaaaaaa

SEQ ID NO: 4419 - DNA, 5397 bp, Homo Sapiens
  NM_017643
ggagggagggctatgctaatgttgttgatatcctggggccacccgagttaaaggggggaaatccgggggctgctgcacccgccaccggtctgggcccagccgggggccccctgtagtcgccgcagtcccggggagaggcacctgcccccagcccggggagggggcgccgcgggctcggggagcacggacaacccctacccatgaggccctgatggaaaacacaaaggatctgagtcggaagagacattagaggtcatccaaagcagccgtcccctctgcagcctctctgacaagtgactgaacattcttcacgatctgaaaggaaaagaagagattctttcgggatgtttgacggttatgatagctgcagtgaggacacaagcagcagctccagctccgaagagagtgaggaagaagtcgctcctttaccttctaatctcccgattatcaaaaacaatgggcaagtctacacatacccagatggtaaatctggcatggctacctgtgagatgtgtgggatggttggcgtccgagatgctttttactctaaaacaaagcgtttctgtagcgtttcatgttcaagaagttactcgtcaaactccaagaaggcaagcattttggccagacttcagggtaagcctccaacaaagaaagcaaaagttcttcagaaacaacctttagttgctaagctagccgcatatgctcagtatcaagctaccttgcaaaatcaagcaaagacaaaagcagcagtctccatggaaggtttcagctggggtaactacatcaatagcaatagctttatagcagctccggttacctgttttaaacatgcacctatggggacctgctggggtgatatctcagaaaatgtgagagtagaagttcccaatacagactgcagcctacctaccaaagtcttctggattgctggaattgtaaaattagcaggttacaatgcccttttaagatatgaaggatttgaaaatgactctggtctggacttctggtgcaatatatgtggttctgatatccatccagttggttggtgtgcagccagcggaaaacctcttgttcctcctagaactattcagcataaatatacaaactggaaagcttttctagtgaaacgacttactggtgccaaaacactgcctcctgatttctcccaaaaggtttcagagagtatgcagtatcctttcaaaccttgcatgagagtagaagtggttgacaagaggcatttgtgtcgaacacgagtagcagtggtggaaagtgtaattggaggaagattaagactagtgtatgaagaaagcgaagatagaacagatgacttctggtgccatatgcacagcccattaatacatcatattggttggtctcgaagcataggtcatcgattcaaaagatctgatattacaaagaaacaggatggacattttgatacaccaccacatttatttgctaaggtaaaagaagtagaccagagtggggaatggttcaaggaaggaatgaaattggaagctatagacccattaaatctttctacaatatgtgtcgcaaccattagaaaggtgctagctgacggattcctgatgattgggatcgatggctcagaagcagcagacggatctgactggttctgttaccatgcaacctctccttctattttccctgtcggtttctgtgaaattaacatgattgaacttactccacccagaggttacacaaaacttccttttaaatggtttgactacctcagggaaactggctccattgcagcaccagtaaaactatttaataaggatgttccaaatcacggatttcgtgtaggaatgaaattagaagcagtagatctcatggagccacgtttaatatgtgtagccacagtaactcgaattattcatcgtctcttgaggatacattttgatggatgggaagaagagtatgatcagtgggtagactgtgagtcacctgacctctatcctgtagggtggtgtcagttaactggatatcaactacagcctccagcatcacagtcatcaagagaaaaccaatcagcttcatcaaaacagaagaaaaaggctaagtcccagcaatacaaaggacataagaaaatgacaacactgcagctgaaggaggagttgctggatggagaggattataatttccttcaaggagcgtctgatcaggaaagcaatggctctgccaacttctacatcaaacaagagccatgaggtggcttagaaactgagggcgggtggggaaggattttacacaggactgatttataatcaatccagctgtacagggggctactctactgggacattttgctaaacatagaagatttcagttccagatttttcaggtgggtgggggagctattttagtcgggggggcaggggggtgggaaattttcaatttataaagatggacaatttttgtgttgtatttgaagcttttgaaagaattttgtaatattttccaagtttggatttatgtgcattgttaacaagaactgaaattctaacttttttggtaacattaaagtttaggtagcaggattgaaggaaatgatttaagaaggatatagctgttaaatgcaaatgaactgtcattacaaatgaacctttttggtacctgttgggagattttgggatttttagaagttaggccagtcacatctccagcttcttttgctgcagaaatatgcaactgaactcctcatggaggggtcatcaccacaaaggtcatggaagggtcattatttctcttgttggcattttattgcagcccattttaaatgtttgtacagaaatatttttcattctgtgaaaatttatttggagttctgtatgaaactggaagaactctggatacttttatatgttctcttttaattaaaaaaatgattagaattatcctaacactaaagtgttaaactggaatggttgacaagatattcaggatctcagtctacacattgaggggttggggaaaatgtaatgttgtccttagtttattttcctttctaaaaaaaataccccacgaaagggattctgatcagttctctgccatttccctctatctgtgaaataacagcttcgtataaccacaaccaaaaacagatgttctgtattaggagaatcgaattgaaagttattcaaagccaaaataagtttagatttcaaaatcattccagctctgcttttatctatcctggatttggtagaaaactaatttgaaagagaatttaattttcttaaaattccatatatatatatatatatatatatatatatatatatatatatatatatatataaaattgtctttaattgtattcaggatttattttaataataaccgatttggaccattttgaacattccctgttttaaaattcatatgacttccttttaaaaaaaaaaaaaggatacaagggtaaactggtgaaaggtttgctctctgcattttctaactttctactgagttgtgactgaatgagagcgctctagcgtttaccagtgaggttcataaactaaactctcaggaattaattgcatctgttctagaagtgcttctgggtcttagcctggcctcttcagagtggtaatattgaccatctcctctggaatataggtagggctaattagaaattaatcaaaatgattaacctctacagtccttcagcctatggaatgctttaaaaaatgttaatggaaagccccaggagaccattttaggtaagacttttgtttgaattttaaaatgcatagaacgttaaaaaaaaccagcaatttattttctaaaatattgctctacttttgggaataatagcattggtaatacgcacaggtttacctcattctatgcaagaggggttaataacataaggttttataatagctactggaagtaaaatttgttactttatagtgtaagaatgtatggaatcgcatgtcaccatttcttaatactgactctttaggggcataaatgcagatcacatcaacgcaagttgattctcatgtgtcaaatatatgtgaattcagctgttaaattactggatatttatcttaacattgctgagagggacctactgtaaatgtgacatcctcacacttcccatatctttaactttgaaaaatcttcttgtaaacttaaagcctagaagtattccaaagcaagggttagagcagtctttattctcaggctcactgaattaaacccaggactaattccacagcacaggcacaagaagcctgttgtgtagtgtactctgccagtaccttggatttaggagctccatggggaactgactaaaccaggagagagaggatttggagctagtcagtcctggtaatctatgaaatgctcatttatacccaggtttcataagcttccaattctatagcaaacccaggctctgagtgttttagaatttcctaattcatgaagtgtttcttgtcttgatcccgtgaccaacagttgaaggttggtaaggacttttctacagtctgaacacaacctaaagccctctttcattgttcacacactaactcctactgccgacgaaccgaaaaataattaatgcagaggagatttatgtcttagccataactccagttgtacaactcaatcgccccattctcttttacggttcaaaatgtactgctgaccttgggtttgtttttgttttgttttgtttttcctgttaggatttatttggggacttttggtagtttaaactctttaaccttttccttgccgtgtatgaggaaagctaaagctgttatcaacttcttattctacgatactaacacgggttttcagtgtttgtttgtttttattattattattaattttgcgtgatgtgaataccctctcccatcaatatttgtattatggtgctatatattggtaatgatcctttaatattgggaagggattttaaaaatactgtgattaaactgggtttcttcctttgattttcatattttaaataaagccacagtcatttatacaaaagaaaagcatctgtccctgggcaaatcttttgaggacagaggtcaaagtaaactgcataaggtttttacatcatttctgtatgtatttgatatatagatcaatatctgtacaaatttaatcttttattttcttggtaactcgtgatcattgagaaagtgtttgaaactttctcatgaagtgtatatataatggcgtgaaaaattcctttggaaaaatttatgttcctttcatttttaccaaattgcaaattttcagcatggatgtgaaaagcattaaaattataactttgtgtacaagatgaaaataattcactaaatttgcccttttttacacaaaataaaatgttaaagttaaaaaaaaaaaaaaaaa

SEQ ID NO: 4420 - DNA, 7331 bp, Homo Sapiens
  NM_017644
gttgtgagctgcggcagagactggtggctggaggagacgccggcgctggagagtgcgctgcgccgcccgccgctgagggaccgcggggttagccactgctggctgcttccagtgttcgccgagaggtaccgggggtgacagctccgggaccggccgaaaggcgaggaaccggtgtggaaattaaaagaacacacatattttgactggggctttgatcaaccaaatgctaaaaagccacataaagaagatccctaatagtcatttctcaacaattatatagtcaactgatgtaacaatggtactaatattgggacgcagactaaacagagaggatcttggggtgcgtgattccccagcaactaagcgaaaagtttttgaaatggaccccaaatctctgacaggtcatgagttttttgacttctcttcaggatcatcccatgccgaaaacatactccagatatttaatgaatttcgtgatagccgcttattcacagatgttatcatttgtgtggaaggaaaagaatttccttgccatagagctgtgctctcagcctgtagcagctacttcagagctatgttttgtaatgaccacagggaaagccgagaaatgttggttgagatcaatggtattttagctgaagctatggaatgttttttgcagtatgtttatactggaaaggtgaagatcactacagagaatgtacagtatctctttgagacatcaagcctctttcagattagtgttctccgtgatgcatgtgccaagttcttggaggagcaacttgatccttgtaattgcttaggaatccagcgctttgctgatacccattcactcaaaacactcttcacaaaatgcaaaaattttgcgttacagacttttgaggatgtatcccagcacgaagaatttcttgagcttgacaaagatgaacttattgattatatttgtagtgatgaacttgttattggtaaagaggagatggtttttgaagccgtcatgcgttgggtctatcgtgccgttgatctgagaagaccactgttacacgagctcctgacacatgtgagactccctctgttgcatcccaactactttgttcaaacagttgaagtggaccaattgatccagaattctcctgagtgttatcagttgttgcatgaagcaagacggtaccacatacttgggaatgaaatgatgtccccaaggactaggccacgcaggtccactggctattctgaggtgatagttgtcgttggaggatgtgagcgagttggaggatttaatcttccatacactgagtgctacgatcctgtaacaggagaatggaagtctttggctaagcttccagaatttaccaaatcagagtatgcagtctgtgctctaaggaatgacattcttgtttcaggtggaagaatcaacagccgtgatgtctggatttataactcacagttaaatatttggatcagagttgcctctctcaataaaggcagatggcgtcacaaaatggctgtcctccttggtaaagtatatgttgtcggtggctatgatgggcaaaacagacttagcagcgtagaatgttatgattccttttcaaatcgatggactgaagttgctccccttaaggaagccgtgagttctcctgcagtgactagctgtgtaggcaaactgtttgtgattggtggaggacctgatgataatacttgttctgataaggttcaatcttatgatccagaaaccaattcttggctacttcgtgcagctatcccaattgccaaaaggtgtataacagctgtatccctaaacaacctgatctatgttgccggtggactgaccaaggcaatatactgttacgatccagttgaagattactggatgcacgtacagaatacattcagccgtcaggaaaactgtggtatgtctgtgtgtaatggtaaaatatatatcctgggcggaagacgggaaaatggagaagccacagacactattctctgttatgatcctgcaacaagtatcatcacaggggtagctgcaatgcccaggccagtgtcctatcatggctgtgtgactattcatagatacaatgagaaatgctttaaactctgaagacaggatacctcaccgaagaagccacactgatccaagatgggaggttttaaaaactctacagtgggaacttcacatatctcctttgtgccatatgcaaaaaatagtaaaaataataatttggtgcctttctcctcaaaatatcaatctttcaaactataataaagcctttcctataattgaaaaaaaaaacttttttgttaaaggtaatggtggttgttacttggcctttgaagagtgtacctttgtaagtatttgtaagaagtctatgtgaattaggaaatgtctgtctgcataccttttaggagcgtgtgaatggtgtcttcacttattatgtatgtttatctgtatgtatattccttattttgtcatatatgtagagaaaattgcatgacttgaggcatcatttaggttgaagaagttaatgcttaggatgcattctaggagaaaaaatcagttttaaaaacctttgttgttaacaaagtatatccagattggttaattttattgaagggtttttttctgtaattgataaaaatgtaatgacaacaattcaggcatcataaaatactgaactattgtgactttattcttagaattgctgtcttacattaaacatgtttttagggggaagttaggtaggagatagaaaaataagtgcccctacaagggggattaaaattacaagttaattcctaagagaaaaatggaatggcctttgaaggaaaaatgacccactatggctctcaaagtttttatgcatcatctcttcaatcctctaagaaagcctcttttcttaacttgataaagcagtggaaacccattttgcaatattgttttgtgaaaaacagggacagacagccaggtacagagactcacacctgtactcccaactactcagcaggctggggcaggaggattgcttgagcccaggagtctgaggctacagtgagctatgaacgcacacggcaccctagcctgggcaacaggttgcgacactgtctcaagagaaaagaaaaagaaaaatagggataggttttccttcctagcccagtagagtttgacctcattagtatggtgctttgggtgaggacctcttccttgattatcccactttctagtgaacagctaaaattcctgagagtctctactgttaaggtacctttaataggataaagcagggaccacctatctcagtgggtccatttttcttttaaaattagttatctgaaaaaacttagcagtagttcccatctttaaggtaagtctttcatttggtccccattgtgtaaaatactaatcaacattttcaagcttctgtacaacagactgcttttgtctagatttctcaactccactttataaagcttatcagttttcagagaggaatgtgaattttttttctaatgcaaataaatggatatggcaggaactacagcataagtgattattgtgattctgggtggacggatataatttacaacatttagggatgttctaggtagcctgctgtagtttgacttccagtcactgttgtctttcacattataatttgtatatttcttgtgatagaagggatgatgcaaatatgtaattaaagtgtcaccagatttctgttaaaaccaaggttgaaataaaaagcctaacattggtaagctacattgttttctcattttagaatgattcagagatttcagatagacattttttaaactttaatgcttagctagaatctacattctgaggaaaactctaaaaaacttaaaaatttttagggaatttttatttttcaaatcataattttaaaatgatagataccattttgtgataacaacaattcagaaaacaattttctatcctcttagttgaaagaatgtaggtacagtttggatacttgtactttaattttagagtaaacatctgcattatactcttatagataatagaattatttagttaagaaattctttacagtaaatgagataatgtgtgaaaaagtattttgtaaatgctgaggattctacaaatgatagttgttattttcatgtgtatttgtaagatcatgtccatttcatgaatataggacttcacataaaaaaagactttctcaagacaactttatattctagtatttttctgttgtaaaaagtattaactatttacttttattttgttatacatttattttaatatccatgtgtttattatagtaaatttgaaatgaaatcctgaaaaacagaatttttttaaacacagacctcacaccaatattaattttttctctacataatttaaaactacataaattaagtacttaaaatttatattgaaggccaccaagaacttaggttgaatcttagaaaatttaaataactatttttaaagttacccaacttaatattttaattttttaatatttatcttcctttactaattcttgataaataatagcattagacttgataaaataaaaaagaattttagagtagaattaatatatcaaaaggggtatatcaaccaaattggtgtcagattgtattcattctctcatcacataaagatttttcttttgataggtgatgctcatatgaacctttggtttagaatctatatatgtacatgtgtatgtatgtagatagtatggttgtatacacacatatataccaaacaccatgaattttagcagtctgtgatgatcagcaaaaaagcacataaagtaaaaattagttgaccatgctaaattcaattctggaatttttttttatttgggcatttctagaactttttacatttgaaagtacatgatgagtattagtaacgatgacttatgtataatcagaatctttatgacaatttagttttacaaggtcagaagagatgagtttgctaaacccagctgtgatacctcagttggaaagggaattcaaaggtatgctttgtagaacagaaaagtatagtttttttttcatgaactttaatcattttctgtttttcctctatgtgagtcagctacaaaagtggtctaatttttacaacagtagaacttcctccttttctactgtaatcttcccactgactttactgcacaggtatgaaatactagtgtattggatcttcagtaacctttttatttcctagatgattgaaatataggtatttactccatttaaaccaggtgataagatgatgtaaatactcagggagggtattaacttgttacttttgctcgtttggggtgtaaagtgccatgactgaataatcttcaattcatgattctagagtaagtttaatttggaaaaaggggcttcacacatggtggtggttgaacattgattcttttatacttaaaaagatgaaaatgttttgtggactgatacattttatcttactgaatatgaattgtttatgtatctctactgtcaaatagcctttttgaaactcaggaaagacaaaggttcaattacaccacttttgtcaataagcaaaccaggtattttttttttctcctgttgtctggatatggcaatagattttttaaattgctgtgagaacccatatatgaaaagagaggagttgaattgtgtgtgccttttatgtcttgagatttatatgtggaaaagacgacatctacttcaaactgtatttttttcgtttttttttttttttggggaaggggggagaacggggtcttgctctgtcgcccaggctggagtgcagtggcgcgatctcagctgactgcaacctccacctcccgggttcaagggattctgcctcagcctcccgagtagctgagaccacaggtgcgtgccaccacacccggctaatttttttgtatttttagtagagacggggtttagtagagacggatcactcctgaccacgtgatccgcccacctcggcctcccaaagtgctgggattacaggcgtgagccaccacccccggcctgtattttcagagaggagagcttggtgtttttgtggtgccaagtggtaagataatgtctctttgaggcttcctatggactgcctttattttagtaaactcaagacaccagttaacctcaacagagttttggccttattagaatttgttgtgcatcttattgaaagccaggtttacatcacctcaccccattattctttttagttaaataaatttaccatgccaagtaaccagaatggagcaaattggttgatctttaaggcagtaggtttgactagctagctatcattattgtcacatctaatgctaggcaccagaaaccatttgagccaggagtgtgaatgaataattccagagacactttagacattttttaatgttttatatgaacattttacatttgtgtgattgccttagatattaaattttcctagtgctgataaaaacagcaacattcataacttattttatatattgttccaaagaaaagaatttgttttaatggtttcaaaataactgcacctgaatttgtttatgtgccttaagttctctagtgctatttcaacttttttttcaatctaaatgaagcttaccttagataaggttcatatttgtttcctatagagtaaataaacttccccttcttaaattgtgtaataagcaccaacgtgtggttgcttggcagaatgagaatgttaagggagattgttggatgtttggagtttcattatattttttgtttttattttttgatacctaggtgctttttaaaatattcagacaaatatctatcttacattgattaaacccgtgtaaattcatttgcagtatctacatcgaatgtcaaaaaagtatacttatttttgttccatacttatgtacaattttttccctcttcaggctttttcatttacctttttgaaaaagcacttactctccccttccctatcacccctcccccaaggtttctttatttaaatttttattgagagttgttggagctctaagacaatacaaatttagagttgaacaaaagtataatctgctttacaactagtatagacctaaggtcatttgctttcaattagaggctccagagtcttcatagtggaaagaatgctttgtatttaattgttcttagttaagttgtagcacgtgaatacttacttacatgttttgtttaaatatacttcttgcatagtttaattttttaaaagttgtatctaataaaatgtcttttaaccattattacttgactatatggttgtattaaattttgtttacgaaaaa

SEQ ID NO: 4421 - DNA, 2146 bp, Homo Sapiens
  NM_017646
cagactgccataagatggcgtccgtggcggctgcacgagcagttcccgtgggcagtgggctcaggggcctgcaacggaccctacctcttgtagtgattctcggggccacgggcaccggcaaatccacgctggcgttgcagctaggccagcggctcggcggtgagatcgtcagcgctgactccatgcaggtctatgaaggcctagacatcatcaccaacaaggtttctgcccaagagcagagaatctgccggcaccacatgatcagctttgtggatcctcttgtgaccaattacacagtggtggacttcagaaatagagcaactgctctgattgaagatatatttgcccgagacaaaattcctattgttgtgggaggaaccaattattacattgaatctctgctctggaaagttcttgtcaataccaagccccaggagatgggcactgagaaagtgattgaccgaaaagtggagcttgaaaaggaggatggtcttgtacttcacaaacgcctaagccaggtggacccagaaatggctgccaagctgcatccacatgacaaacgcaaagtggccaggagcttgcaagtttttgaagaaacaggaatctctcatagtgaatttctccatcgtcaacatacggaagaaggtggtggtccccttggaggtcctctgaagttctctaacccttgcatcctttggcttcatgctgaccaggcagttctagatgagcgcttggataagagggtggatgacatgcttgctgctgggctcttggaggaactaagagattttcacagacgctataatcagaagaatgtttcggaaaatagccaggactatcaacatggtatcttccaatcaattggcttcaaggaatttcacgagtacctgatcactgagggaaaatgcacactggagactagtaaccagcttctaaagaaaggtattgaggctctgaaacaagtaactaagagatatgcccggaaacaaaaccgatgggttaaaaaccgttttttgagcagacctggtcccattgtcccccctgtctatggcttagaggtatctgatgtctcgaagtgggaagagtctgttcttgaacctgctcttgaaatcgtgcaaagtttcatccagggccacaagcctacagccactccaataaagatgccatacaatgaagctgagaacaagagaagttatcacctgtgtgacctctgtgatcgaatcatcattggggatcgcgaatgggcagcgcacataaaatccaaatcccacttgaaccaactgaagaaaagaagaagattggactcagatgctgtcaacaccatagaaagtcagagtgtttccccagaccataacaaagaacctaaagagaagggatccccagggcagaatgatcaagagctgaaatgcagcgtttaagagacatgtccagtggcctttggaaaggtggtggggatccagttcaggagggaggggtatgtttgtctcccagtctgggcaaaggagtgctatgcggaattctctgcatagcagaaaagctcccaccattttcttttgatgtggttttaaagtctcacgttctctataatagaaacagcaggtcttgtcagctccttgtgtggctgatgtgtctggaaatgatgtagttcaggaaagcattttttttttctttgaaccttaaaggttctattattaaaagcagcacagattccacatttttatacatgaggatcttctttgtggtgaataccaggattgactgcatccctttaaagaagttttatgtccctgactctggctaaaattatctaatttccagatgcttttgtagatgactgaagtatttgtgagccacatattgggagttctagatttgagtgaatggcaggaaagggccatctccattgagatgattaagtgaaccaaactagttctcagaattctacagagaaggagggaatcagactgaggaagctgtgacataggacttgaagaccaaagactttgaaatttgcgagctgctcatgtgtgagttattatcactgctgtctttctattgagttacaaatctatatttttattgaagtttaaataaagaaaaaatttacaagagcctctttgatccttaaaaaaaaaaaaaaaaaaaa

SEQ ID NO: 4422 - DNA, 5564 bp, Homo Sapiens
  NM_017651
ggcggcgcgctgtccgcactgcggcacagagccgcggcttgctttcaggacacgggtcgctggcgggttaggtggctgcgtggccgcctcacttcgcgcacgcgccgctaggctgggggagttgatttgcactgctccgggtgtcggctccggcgggacgggcggttctgcgtacccctctccagtgtcaacctggggctgaatcttcaacctgtcaaagccttcttaattatgtctgagaaaaggatcctgattgagtcaatgctttgcattctcagtcctctgcataaagctgagagatgcctacagctgagagtgaagcaaaagtaaaaaccaaagttcgctttgaagaattgcttaagacccacagtgatctaatgcgtgaaaagaaaaaactgaagaaaaaacttgtcaggtctgaagaaaacatctcacctgacactattagaagcaatcttcactatatgaaagaaactacaagtgatgatcccgacactattagaagcaatcttccccatattaaagaaactacaagtgatgatgtaagtgctgctaacactaacaacctgaagaagagcacgagagtcactaaaaacaaattgaggaacacacagttagcaactgaaaatcctaatggtgatgctagtgtagaggaagacaaacaaggaaagccaaataaaaaggtgataaagacggtgccccagttgactacacaagacctgaaaccggaaactcctgagaataaggttgattctacacaccagaaaacacatacaaagccacagccaggcgttgatcatcagaaaagtgagaaggcaaatgagggaagagaagagactgatttagaagaggatgaagaattgatgcaagcatatcagtgccatgtaactgaagaaatggcaaaggagattaagaggaaaataagaaagaaactgaaagaacagttgacttactttccctcagatactttattccatgatgacaaactaagcagtgaaaaaaggaaaaagaaaaaggaagttccagtcttctctaaagctgaaacaagtacattgaccatctctggtgacacagttgaaggtgaacaaaagaaagaatcttcagttagatcagtttcttcagattctcatcaagatgatgaaataagctcaatggaacaaagcacagaagacagcatgcaagatgatacaaaacctaaaccaaaaaaaacaaaaaagaagactaaagcagttgcagataataatgaagatgttgatggtgatggtgttcatgaaataacaagccgagatagcccggtttatcccaaatgtttgcttgatgatgaccttgtcttgggagtttacattcaccgaactgatagacttaagtcagattttatgatttctcacccaatggtaaaaattcatgtggttgatgagcatactggtcaatatgtcaagaaagatgatagtggacggcctgtttcatcttactatgaaaaagagaatgtggattatattcttcctattatgacccagccatatgattttaaacagttaaaatcaagacttccagagtgggaagaacaaattgtatttaatgaaaattttccctatttgcttcgaggctctgatgagagtcctaaagtcatcctgttctttgagattcttgatttcttaagcgtggatgaaattaagaataattctgaggttcaaaaccaagaatgtggctttcggaaaattgcctgggcatttcttaagcttctgggagccaatggaaatgcaaacatcaactcaaaacttcgcttgcagctatattacccacctactaagcctcgatccccattaagtgttgttgaggcatttgaatggtggtcaaaatgtccaagaaatcattacccatcaacactgtacgtaactgtaagaggactgaaagttccagactgtataaagccatcttaccgctctatgatggctcttcaggaggaaaaaggtaaaccagtgcattgtgaacgtcaccatgagtcaagctcagtagacacagaacctggattagaagagtcaaaggaagtaataaagtggaaacgactccctgggcaggcttgccgtatcccaaacaaacacctcttctcactaaatgcaggagaacgaggatgtttttgtcttgatttctcccacaatggaagaatattagcagcagcttgtgccagccgggatggatatccaattattttatatgaaattccttctggacgtttcatgagagaattgtgtggccacctcaatatcatttatgatctttcctggtcaaaagatgatcactacatccttacttcatcatctgatggcactgccaggatatggaaaaatgaaataaacaatacaaatactttcagagttttacctcatccttcttttgtttacacggctaaattccatccagctgtaagagagctagtagttacaggatgctatgattccatgatacggatatggaaagttgagatgagagaagattctgccatattggtccgacagtttgatgttcacaaaagttttatcaactcactttgttttgatactgaaggtcatcatatgtattcaggagattgtacaggggtgattgttgtttggaatacctatgtcaagattaatgatttggaacattcagtgcaccactggactataaataaggaaattaaagaaactgagtttaagggaattccaataagttatttggagattcatcccaatggaaaacgtttgttaatccataccaaagacagtactttgagaattatggatctccggatattagtagcaaggaagtttgtaggagcagcaaattatcgggagaagattcatagtactttgactccatgtgggacttttctgtttgctggaagtgaggatggtatagtgtatgtttggaacccagaaacaggagaacaagtagccatgtattctgacttgccattcaagtcacccattcgagacatttcttatcatccatttgaaaatatggttgcattctgtgcatttgggcaaaatgagccaattcttctgtatatttacgatttccatgttgcccagcaggaggctgaaatgttcaaacgctacaatggaacatttccattacctggaatacaccaaagtcaagatgccctatgtacctgtccaaaactaccccatcaaggctcttttcagattgatgaatttgtccacactgaaagttcttcaacgaagatgcagctagtaaaacagaggcttgaaactgtcacagaggtgatacgttcctgtgctgcaaaagtcaacaaaaatctctcatttacttcaccaccagcagtttcctcacaacagtctaagttaaagcagtcaaacatgctgaccgctcaagagattctacatcagtttggtttcactcagaccgggattatcagcatagaaagaaagccttgtaaccatcaggtagatacagcaccaacggtagtggctctttatgactacacagcgaatcgatcagatgaactaaccatccatcgcggagacattatccgagtgtttttcaaagataatgaagactggtggtatggcagcataggaaagggacaggaaggttattttccagctaatcatgtggctagtgaaacactgtatcaagaactgcctcctgagataaaggagcgatcccctcctttaagccctgaggaaaaaactaaaatagaaaaatctccagctcctcaaaagcaatcaatcaataagaacaagtcccaggacttcagactaggctcagaatctatgacacattctgaaatgagaaaagaacagagccatgaggaccaaggacacataatggatacacggatgaggaagaacaagcaagcaggcagaaaagtcactctaatagagtaaagaattgaagaaaagttaagagctgccgaaatgcacagaggtgaaaatgacaaaccaaatggaatttctcttcagagttcagaattttcagatactaaggaggaagaaaggatccactacttcttgttcttatgaatgactctagaaaaatcagaatcaagttgtgggtggaaaaatcaacgtggcctttgagttcagttgttataaaccattgtgactattgttggtcaaagtattggtacttatattgttagtaattgcatcataattacattaccagtgttggaaaactaatgaagaaaacactgtaattgctactcagcaaatgtgaataaaaggtgtttgcgttattaggatgtctgttaagtaatcatttaatattattatattggtaatggttgtatgtgtgatgctatgcccagaatatgaagtatctgtttttgaaattcactttatttaaaagataagcagctgactgggcacggtgcctcatgcctgtaatcctagcaccttgggaggctgaggcaggtggatcacctaaggtcaggagttcaacaacaccagcctgaccaacatggtgaaaccccatctctactaaaaatacaaaaatcagccgggtctcatggcaggcacctgtaatcccatctactgaggcaggagaattgcttgacccaggaggcagaggttgcagtgagccaagatcacgccattgcactccagcctgggggacagagcaagactctatctccaaaaaacaaaaaagataagcagctttagaatatggcgcattcaaaacagtctcagtaacaaagacattaaaagaaaacaatttactttctaattaaaattttgtgtttcttaagatcaaatcatataggtaacttcatagacctaaattaaaagtgatttttggctggactggcaacaatgttcccaatgtctttactttttaaaaaaggcttttcatatttaagcacatacctattttgtagacttacattgtttaatatttattttaatcttaatatttttacattattatattgcattatttattttttctaagttccagaataatagtgtcattattatagactatatgttttgaagtttgatattataatgggatattcattttttgttcttttcttgactcctttctcaagtgtgtgataaggtctgctgataaaatatttaaccccaagaaagtgaaaactaatataaaattagaaagacctatccaaattagacagtcaattccattaaaataagaagtgagaaaaacaatgttgggcattgaggtgtaaattttgcccagatgtatacccagtgtgaaatatcttctaataaaaatatatttggctcttatccctgcacatgtagaggcataaaaattggtaaacatgtcccgctgtgtagaactttaaaaaaaaggcatttttgaaagtgttgagtggcactgataactggtgaagcctacagccatccgcccaaaagtctgttctgatggcactgagttttcattgttctggatgtataagtctgtgtgtcaggtacagctgggcccagccagcttgagtcactcttgtacaagcttgtttttttctgtcttgtgaatgcacttgataatttaaaaataaaaatatctgtttctctgcagtttcagctaataaa

SEQ ID NO: 4423 - DNA, 5585 bp, Homo Sapiens
  NM_017656
agtgtgccaccgccatctttaccggctgtggctcagcatggtcagtgccgtttaacctttattgtggtggagtccaccccgctgtgggcctcagataaccctgtacaaaggggaatggagattgcctgtatccacctagattcataagctgccctgaggcgatcttggcatcaagaaagacagcattgaggcacatctcaccatcagcttcagaggatgtcagcctttgatatgtcccatgatttctttttctgcttaacttcagaatgggaaatacaacctagaaccaaacggtcatcacttcagcagggttttttgaagaatcaaatattcactgggatacaaatgcagacaagaagctacagtggatggaaactctgtgagaattgtggagaggtcttcagtgaacagttttgccttaagacacacatgagagctcagaatggagggaacacttttgagggtaattgttatggaaaagacagcatcagtgtgcacaaggaagcctctattggacaagaactttccaaatttaatccatgtggaaaagtcttcaccttaactccaggccttgctgtgcatcttgaaattctcaatggaagacaaccctacaaatgtaaggaatgtggaaaaggctttaagtattttgcaagccttgataatcacatgggaatccacattggagagaaactctgtgaatttcaggaatgtgagagagccatcacaacttcctcacacttaaagcagtgtgtagcagttcatactggaaagaaatccgaaaagactaagaactgtgggaaatccttcactaatttttctcaactttctgcacatgcaaaaactcataaaggagagaagtcctttgaatgtaaagaatgtggaagatcctttagaaattcctcatcctttaatgttcacattcaaattcacactggaataaaaccacacaaatgtacggaatgtgggaaagccttcactagatcaactcaccttactcaacatgtaagaactcacactggaataaaaccctatgaatgtaaggaatgtggccaagccttcactcagtacacgggccttgctatacacatacgaaatcacactggagagaaaccctatcagtgtaaggaatgtgggaaagccttcaatagatcttcaacgcttactcaacatagaagaattcacacaggagagaagccttatgaatgtgttgaatgtgggaagaccttcattacttcttcccatcgtagtaaacatttgaaaactcacagtggagaaaggtaaatgcaagatatgtgggaaagaatttctgtattcctcaccccacctgtgaactcctaccagagagaaaccttttgtatgtaaagaatttgggaaagcatttgctctttcctcatgcctaagtatgcatgaaagaattcacactggggagaaatactatgaatgtaaggatatgagtgttgttaccatttagcccattggttgccatctttaattattggcagtgcaaagatcatcagattagtcctaaatgccttttggaggttgtaatggctcacagattggccttagatgcatcccgagggtctgaaattaaacctacaggttctgaatacaacatcatggttacctgagtctgggcatctgtgaagaagggtcatggatggtgaggtcagtactgcaggctgcctcaccttggtgattagattcctaagatcatagcattaacaagttctgtacgagataaatcatgcagattgatcccagcccctgttggttagtggctgccagtgtggcacattcatgtcaaaatttaccagaagccaagatgatgtaggccccagaggtggattgttaaaaagatgctcctccaaggttctcttctgttcccatggatcctgcagagcatgtcaggagtgaaaccatccataactgccagtgccctttcacagctgattatttctatgtccccttcttgtaaaataagaagtgtgacaaccttgactgttctgttctgtcttctctgtccattttaggtggcacaatgtaagtggcagtgtctcttatagtataatccagtctctcttctcacttctgttaagatggctgatatagtccatgaatcccactcatgatctctttatcaaatgattgttcagccacactttgaggattctcttcagtacaagttttctaatttttgcagtatggataggctgagaattttccaaatctccaagttctggttcctttttccttaacaatttcttctgcaattcaggtctccttttgcatttttgccgagaccagctgggtcgtggagaccctaacccagtggctctagaggaattaagacaaagacacagaaatatagtgcagagtgggaatcggggctcacagccttcagagctgagcttgaacagagtttgacccacatatttattgacagtaagcctgtgataaacattattcctatagattgtagatcagctataagtattccttatgagaaagaaagggacaggctctggcttgttatctgcaacaggaatatgtccttaaggcacaaatcactcatgctattgtttgtggtttaggaatgccttgagcagttttccagttttctgccctgggtgggccaggtgttgcttgccctcattctggtaaaccagcagcctccagcatgggcgtcatagccatcacgagcatgtcacagtgctgcagagattttgtttatggccagtttctcattgcctgtttatggccagatttggggggcctgttcccagcacattttcctgtaagcactcaggaataatgaagcttcctgtgtcctttaacactttaattacagatcttagtgatacataccattttatctgtctcaagctctaccttccgtaaaatgctagaatacagttctgccaagttcttcaccactttatatcaagggttgtcttttcttcatttcccaatagcatgttcctcattccccaatgacacctcaccagaataacccttaccaaccttatttccagcttgcacatcagaatttttccagcctctactcatttgtcagtttcaaagctgcttcacatttttagtttttttgtttgtttttaattgcagtacctcacttctcagtaccaatatctgccttagtcagctcagacaaccataagagaataccgcagaccaaatggcttagaaattaatttaattttaaatcaatgaggttaaaaacacaggattttttttttttttttttttttttttttgagatggagttttgctcttgttgcccaggctggagtgcaatggtatgatcttggctcaccgcaacctccacctcctgagttccagtgattctcctgcctcaccctcagtagctgggattattggcatgcaccacaaaccttagctaagtttgtatttttagtagagacagggtttctccatgttggttaggctgatctccatgttggtcagatctgacctttggtgatccacctgccttggcctcccaaagtgctgggattacaggcctgagccaccgtatctggcccaaaacacaaatttatattctcacatatctggaggctggaagtctgagatcagagtgccagcatggtcaacctctagtgagagctctcttcctggcatgtaagtgcccacttcctcatgttttcacacgatggagaccaacaaataggtcggtcggtctcccccctccccgcccccttctcttttcacatacagtcacattgaggtttggaacttcatatgaaatttggggggtcactgtgtgtgtgtgtgtgtgtgtgtgtatgtgtatatatatatacatatatatacacatatgtatgtatacctaactcctaaagtggaacagtaagagtcattatttatagattatctgattctctatgtggaaagagaaaagaatcatattaagtactttggactgaacaatgacccccaaaattcgtatgatgatgaagctctctctaaatattttcttgctttactggactgattttaacccgctgcacaacaccaactaaaagtagtaataccagcatacttgtctttgcagttctggtgagatatgcactctattttgttggtttggctgtaggcttttatttcttttttattttttgaagaggttatgtcctgtcagggaaccagccccgatattcacataggttcttttctattttccctaagtgtcagccaacttgagaaataaagggacagagtacaaaagagagaaattttaaagctgggtgtccggggcagacatcacatgtcggtaggttccgtgatgccccacaagccgcaaaaaccagcaagtttttattagggattttcaaaaggggagggagtgtgcaaataggtgtgggtcacagacatcaagtactttacaaggtaatagaatatcacaaggcaagtggaggcagggcgagatcacaggaccaaggtgaaattaaaattgctaatgaagttttgggcaccattgtcattgataacatcttatcaggagacggttttgagatcaactggtctgactaaaatttattaggtgggaatttcctcttcctaataagcctgggagtgctatgggagactggggtctatttcacccctgcagtctcgaccataagagatggctacacccaggggggccagttcagagacccactcccaggtgtgcattctctttctcaaggatgttccttgctgagaaaaagaattcagtgatatttctcccatttgcttgtgaaagaagagaaatgtggctttgttccacctggctcaccggcggtcagaatttaaggttatctctcttgtttcctaaacattgctgttatcctgttcttttttcaaggtgcccagatttcatattgctcaaacacacatgctgtataatttgtgcagttaatgcaattattacagggtcctgaggtaatatacatcctcctcagctgacaggattgagagattaaagtaaagacaggcataggaaatcacaagggtattgactggggaagtgataagtgtccatgaaatctttacaatttatgtttagagattgcagtaaagacaggcataagaaattataaaagtattaatttggggaactaataaatgtccatgaaaccttcacaatccatgtttttctgccatggcttcagccagtccccccgtttggggtccctgacttcctgcaacaatgtcctgcaggaaaagttttttctttatatccagtttttacatgatgaattatttcccaatatttcatagtttatgaggctgaattcctcttgaatttattaaatgcttccttcacatcctctgtgatgatcatgtttatttactgataaaactcaatacctagaactgcacctagctcatgatggtacctaataaatacttcaatgaaatgatgtggtgatgcatgcctatagttttagctacttgggagggtggcctgagcccaggggttctagaccagcttaggcaacatagcaagaccccatctcaaaaaaaaaaacaaaaacaaaacaaaaaaaaaaaaaaaaaaa

SEQ ID NO: 4424 - DNA, 4054 bp, Homo Sapiens
  NM_017657
gtgtcggcggcagcggttcccccgctgcatgatgggagagtgtgtggagtgggcggggggtctccgcggaggaggtggaggaggcggcggcggcggcggaagagggcggagggtagtgggatgggggtcccgcggcagcggtgaaactccgggtgggcgtccatggtgctgctgcgctgacagggctgtgagcagccggccttccgctctcaccagttccgcgtcggaatagacggtccttccccggggagtcagttcctccccgggcccctgagccatgcccatcgcagccgccccgaaggagccaggtgtaaattaattatttgaaagcaactgaacaatggagccagacatcattcgaatgtactcttcatccccaccaccattagacaatggagcagaggatgatgatgatgatgaatttggggaatttggtgggttttcagaagttagcccttctggtgtagggtttgttgatttcgatacaccagattatactcgtcccaaggaagagtttgtaccttcaaaccattttatgccaattcatgaattctcagaaaatgtagatagccttacaagctttaagtccattaaaaatggtaatgataaggacatcactgctgaactttctgctcctgtgaaaggacagtctgatgttttactttctaccaccagcaaagaaataatttcatctgaaatgttagctacttccattgatggcatggaaagaccaggaaatttaaataaagtagtggagcagagacagaatgttggaacacttgaaagtttctctccaggagattttagaactaatatgaatgttgttcatcaaaacaagcagttagagagctgcaatggtgaaaagcctccttgtctggagattctaacaaatgggtttgcagtgttggaaactgtaaatcctcagggaacagatgatctggacaatgtagctgattcaaagggacggaagcctcttagcactcatagcactgagtataatttagactctgtacctagtcctgctgaggaatttgcagattttgccacattttccaaaaaggaaaggatacaattagaagaaatagaatgtgcagttttaaatgatagagaagcactaaccattcgggaaaacaataaaattaatagagtcaatgaactgaattctgtaaaagaagtggctttgggtagaagcttggataacaaaggagacactgatggagaggatcaggtttgtgtttcagaaataagcatagtgactaacagaggtttcagtgttgaaaaacaaggccttccaacactgcaacaggatgaatttttacagtcaggtgttcagtcaaaggcttggagtttggtagactcagctgataattcagaagccattaggagagaacaatgtaaaactgaagaaaaacttgacttacttacttctaaatgtgctcacctatgcatggattctgttaaaacttctgatgatgaagttggttctcccaaagaagaaagtagaaagtttactaatttccaaagcccaaacattgaccccacagaagaaaatgatttggatgattctttaagtgtaaaaaatggtgatagtagtaatgactttgtgacttgcaatgatatcaatgaagatgattttggtgattttggtgactttggctctgccagtggctcaactccaccttttgttactggtactcaagattcaatgagtgatgccacttttgaagagtcttcagagcactttccacattttagtgaaccaggtgatgactttggagaatttggggatataaatgctgtttcttgccaagaggagacaatattaacaaagtcagacctaaaacagacttctgataatttatcagaagaatgtcaattggcaagaaaatctagtggaacaggcactgaacctgttgcaaaacttaaaaatgggcaagaaggtgagattggacattttgattctgtgccaaatattcaggatgactgcaatggttttcaagactctgatgattttgcagacttcagttcagctggtcctagccaagttgtagattggaatgcttttgaggatgaacaaaaagatagttgttcttgggctgcttttggagaccagcaggctactgaatctcatcatcgaaaggaagcctggcagtcacataggacagatgaaaatattgatactccaggaacccccaaaacgcacagtgtaccttcagcaacttccaaaggagcagttgctagtggccatttacaggaatcagccacttcagttcagacagctttattaaaccgcctggagcgaattttcgaagcatgttttccttccatacttgtccctgatgctgaagaggaagttacttccctgaagcacttgctggaaacaagcactttgccaataaaaacgagagaggccttacctgaaagtggggaattgctagatgtgtggactgagctacaggatatccatgatgcacatggcttgagataccagtggggcggctcccatagcaacaagaagcttttgtcctccttgggaatagacacccgaaacattctcttcacgggcaataagaagcagcctgttatagtgcccatgtatgcagcaggattgggtatgttagagcccaccaaggaaccactgaaaccactttctgctgcagaaaaaatagcttccatcggtcagacagccaccatgtcaccagatatgaacacatgtacatctgatcagttccaggagtctctaccacccgtccagtttgactggagtagcagtggccttactaaccctttagatggtgtggatccggagttgtatgagttaacaacttctaagctggaaatctccacctcaagcctcaaagtgactgatgcatttgcaagactcatgtctacagtagagaagacaagcacatctaccagtaggaaaccgaaaagagaagagcacctaagtgaagaagctatcaaggtgatcgctggccttcctgacttaacattcatgcatgccaaggtgttgatgttcccagccacgttaacaccttccacaagctctcaagaaaaagcagacggataactgatgtgaattggacagtttctattgcttttccttttttccatcccttccctaccatcaaaagcatacctgctctaattaaaaaaaaaaaaaaaaaaaattcaagttcagctgatttgttggtaagccgcactagaaaggtatacatagtaatgtatatttatttacatactgaagtcctaaatttatattagaaaaatgtaaataatcgggggtaaacatttttgaagatttattctttttgtgttgctggggtgtatacatttatgtctttgtgaaatacactggtggtgtccttcttacaaaacttttgaaataaaaaaaaaactcaaatcttcactgtctgtgaaatccccttcagtcttttcagattgcattgactgtcctcttgatttttcatattacatgtcaaattacttttgctatcataaataagctccaaagtcccccatttaatttttttttaattttgtgtatgatgggtttcagatctggcttttgttaacattttggggcttttttaatcttttcaatctggcgtattgctgtttgaccttttgcaaggtacttaattgctcttttgttatagggtatggatcattgtcagaacttgattggaggggtttaaagagattgtgtctgtttaaaatcagtatgattcagagaaggaccaaattatatgaatgtcttacaatggaatttacttgttactgatttttttgttctattgtaccactattttttgaggattttgcacagtgtaaaatgacataatcatagattgctatggtttaggctgtatatacagtgaaaactatgggttttaaatgtttggggaaattcctatggaaaaaagagagacatgtagaagaacctctaacaaggttaatgtgcatgcccaaggtcttttgaaatttcagtgtgtaaatttccttttagcttatacaaaaataaaataatttaaaagaaaaaaaaaaaaaaaaa

SEQ ID NO: 4425 - DNA, 4695 bp, Homo Sapiens
  NM_017666
catgaggcagcgcgtgcagttatatacttctgcccccggctgagacgccggttccgcgctggaagtctccgggggagtcgctgttgctgaggctgtcgcctgaggtttttcgcgctcctccctttcctcctcctctttctcctcctccttatccgaaccccagtcagaccgatctgctctgctctcggtgaccttgcaacttcatggatgacgacaaaccttttcaaccaaaaaacatttcaaaaatggcagaactctttatggaatgtgaagaagaagagctagagccatggcagaagaaagtagaagaaactcaggatgaggatgacgatgaactgatctttgttggagagatatcaagttcaaaaccagccatttcaaatattttgaacagaggccactccagctcatcttcaaaaggaataaagagtgagccacacagtccaggtattcctgaaatattcaggactgcaagtcaacgctgcagagacccaccatcaaatccagtggctgcctcgcctagatttcatcttgtatctaaatcttcacaaagctctgttactgttgagaatgcgtctaaacctgattttacaaagaattcacaagttggatcggataattcttcaattttactgtttgactcgacccaggaatcactaccaccatcccaagacataccagcaatttttagagaaggtatgaaaaatacttcatatgtgttgaaacatccttctacttctaaagtaaacagtgttactccaaaaaaaccaaagaccagtgaagatgttcctcagataaatccctccacttcattgcctttaattggctctcctccagtgacatcctcccaagttatgctgtcaaaaggtacaaatacctcatctccatatgatgctggagcagattacctaagagcttgtccaaagtgcaatgttcagttcaatcttttggatcctttgaaataccacatgaagcattgttgtccagacatgataactaaatttttgggagtaattgttaaatcagaacgtccatgtgatgaagacaagactgattcagagacaggaaagttgatcatgttagtcaatgagttttattatggaaggcatgaaggagtcactgagaaagagccaaagacttacacaacctttaaatgcttcagttgctcgaaagttcttaaaaataatattaggtttatgaaccacatgaaacatcacttggaacttgagaagcagaacaatgaaagctgggaaaaccacaccacctgccagcactgttaccggcaatatcccacacccttccaactgcagtgccacattgagagtacacacactccccatgagttttctactatttgcaaaatctgtgaattatcatttgaaacagagcatattcttttacaacatatgaaggacacccataaacctggtgaaatgccatatgtttgccaggtttgccagtttagatcatcaacattttctgatgtagaagctcattttagagcagcccatgaaaacactaagaacttgctatgtccattttgcctcaaagttagtaaaatggcaaccccctacatgaatcattacatgaagcatcagaaaaaaggagttcatcgttgcccaaaatgcagactacaatttttgaccagcaaggagaaagctgaacataaggcgcagcatcgtacatttataaagcctaaagaactagaaggattgcctcctggagcaaaagttactattcgagcttcacttggacctctccagtcaaaattaccaactgcacctttcggttgcgctccaggcacttcttttcttcaggtcacacctccgacatctcaaaatacaactgctagaaatcctagaaaatctaatgccagtagatctaagacaagtaagcttcatgcaactacatccactgcaagtaaagttaatacaagtaagccaaggggacgtatagctaagtccaaagcaaaaccctcttacaagcaaaagcgacagcgcaacagaaaaaataaaatgagccttgctttgaagaacataaggtgtcgtcggggaattcacaagtgcattgaatgtcattccaaaataaaagattttgcaagccacttttctatatacatccactgcagtttttgcaagtacaatactaactgtaacaaagcctttgtaaatcatatgatgagctctcatagcaaccatccaggtaaacggttttgtattttcaagaagcattcaggaactctcaggggcattactctagtgtgccttaaatgtgatttcctagctgattcttccggcttagatcgtatggctaaacacttaagtcaacgtaaaactcatacttgccaagttataatagagaatgtttccaaaagtacctcaacttctgaacccactactggctgctcattgaaatagattcctgctccatggagttcatgcaacctggtgcaagacaagttggaagttcctaagttcaaagttctgaagtattttctcacacaaagggcagttaaacagccaagtttatgacactagctctcattattcagctcttttcagctttcagatgccactacattgttattccaccttatctttgcgtcaggttaacatatcttaacatatttttttctccagttggctctctccaaaaatgccttttgtttttctctgctatacttgacttgccttcagaatattacattccagataatatgactgttcatctttttctgtctgttttgtctgctttcttaatttcttataagtcttacatgtttaggtcagataaccattttttcttcattccttgttcattactgttctatttttcatatttttcaaatgaagaagcaacacataagtttcaaaaaatatccagggtactcctggacagtgtccccttttgatggacacaactgatacctgttctttctttccaagaaatgtgaattatttgactgtgagacgtcctctagtttgtggccttcagaaatcagatcttggggagagtcccttcctacctgactgacctcccataaggctgatgctgatttggccagagatgacctcaaggcccaccaaatagagcacaacttcccattgggagctttggcttttgatcttaagcttatgggtcgattctaaccaagaaaagtccatgagatcagtgcttcaacatccaggttgacgtttaaccattttggctgctgctctttaattttcctctagcaggcatgcagtccaaggaatatcaaaattctgattgtatgggaaccaaggttactttcttgttcttggataaagaaaatttctacaattacagttcccaaagacacagttgttcatgttatttaaagttttatccagtattctaggaattttcagcaatactaatattctcatttttaaacattttttacattttattttgttttattttggtagcttggttttatattgtttttagatcagtgcttcaacatccaggctgacgtttagccattttggctgctgttctttaatcttcctctagcaggcatgcagtccaaggaatatcaaaattctggttgtattgggaaccaaggttactttcttgtttttggaaaaacaaaatttctacaattacagttcccaaagtcagttattcatgttttcatttaaagttttatccaatattctaggaattttcagcaatactgatattcactttattttttttctttttttaagacagagtcttgctctgtcacccaggctggagtgcagtggcgcgatcttggctcactgcaagctccgcctcctgggttcacgccattctcctgcctcagtctcccaagtacctgggatgacaggcgcctgccaccacgcccggctaatttttaattttttgtatttttagtagagacagggtttcaccatgttagccaggatggtctcgatctcctgacgtcgtgatcagtccgcctcgtcctcccaaagtgctgggattacaggtgtgagccactgcacccgaccgatactcacatttttaaactttttttttaattttattttggtagctaggttttatattgttcttaaatttattttactctattttatttttccatcacttctttgtcccagattcatgaaatttgctgatgtccattttatgtctacttttgaactcttctctttgtgtttgttttgttcttattacaaactccaagacatttcttagaattgtctacagatttcgtgtagctacttattggtagcttcttaatttcatacttgtccagaccattagacattattacatgctctgtcttgggcctatcattaacattagcttagggattctgatttcaaagacataaagaattggcaaaactcttcttacagaacttaaaacaagttttaaagttacatttctatacatctaatacataataccttcttagccattaatgtaattcctctggataaagataatatattcaaaaaatattgggaccaaaaaatgcacttgtttcttgctcatatatatatagatgtatattttttttaatttcttgtttgtttattttggttacattgaatacagatttgctgaacagttttgatgttatttttttaataaaatttgtattgttaaagtgccttggaaatttctaataaataacttcatataaaagctatcatataa

SEQ ID NO: 4426 - DNA, 3222 bp, Homo Sapiens
  NM_017668
cggggccgcaccgcccttcgcagccgcctctgccgccgccgccgcgttggcctcgccgcccctgctcggacaccatgccacaaggagagtgatctcttcccctgttttcacaatggaggactccggaaagactttcagctccgaggaggaagaagctaactattggaaagatctggcgatgacctacaaacagagggcagaaaatacgcaagaggaactccgagaattccaggagggaagccgagaatatgaagctgaattggagacgcagctgcaacaaattgaaaccaggaacagagacctcctgtccgaaaataaccgccttcgcatggagctggaaaccatcaaggagaagtttgaagtgcagcactctgaaggctaccggcagatctcagccttggaggatgacctcgcgcagaccaaagccattaaagaccaattgcagaaatacatcagagagctggagcaagcaaatgacgacctggaaagagccaagcgcgccacgatcatgtctctcgaagactttgagcagcgcttgaatcaggccatcgaaagaaatgccttcctggaaagtgaacttgatgaaaaagagaatctcctggaatctgttcagagactgaaggatgaagccagagatttgcggcaggaactggccgtgcagcagaagcaggagaaacccaggacccccatgcccagctcagtggaagctgagaggacagacacagctgtgcaggccacgggctccgtgccgtccacgcccattgctcaccgaggacccagctcaagtttaaacacacctgggagcttcagacgtggcctggacgactccaccggggggacccccctcacacctgcggcccggatatcagccctcaacattgtgggagacctactgcggaaagtcggggcactggagtccaaactcgcttcctgccggaacctcgtgtacgatcagtccccaaaccgaacaggtggcccagcctctgggcggagcagcaagaacagagatggcggggagagacggccaagcagcaccagcgtgcctttgggtgataaggggttggacacgagttgccgctggttgtccaaatcaacaaccaggtcgtccagctcctgctgaagcctgttcttggtcttttccagtttatcataagcggccgccttctcctcgtactgctgggtgaggttctcgatctccttctggaacctcttcttcccctcttccagagcttccacggtgctggcaaagtcctgcagcttcttcttcgagtcggagagctacaaggacagcgtccagggtagggtgagagggggaccatgagtggcccctgtccctggccccacagactctgagaagcgaagaccatgtctcctcgttggagaaacccaatagcaggggaagctggggggtcaagcaccatcgcaccaacactccaccgcgatctgcctgcgggggatctcagcgcagagaagttgagaggacccatgaaggaagcaaggacacggggcaggcacctggatgttgagagtggagatgtggcgctccaggttctgcttggcctccatctcctcgtccagctggtcttgcaggctgttccgctcctcctccagctggcgcagcttcgtagacacgttgagcttctgccgggtttcttcttgaagcagctcctgcaaaagggatgcaaagaggtcccagggacctgccccgaggaaggccaccccccaggtcccctggatgatgtggcaggacactcacctgggtgtcctggagctgggaactgagggacgccacgtccttggccagcttaatggccttcccctcggcctcgttaagcatccctgtgacgctctcaacttcattctaagggtgccaagagactggttagtcaaagcctctagaaggggatcctcgttgaaaggagccctttttactcaaaacacatgggctagtacttgaggtgttcactgattgagaaaatacccgtgaggtatgggactctgataaaaaaaaaaaaaaacacacacacacacaaaaaaaacagaatctgtggcttgaagggaactccgtcacctatgagttgggaccctggccctagactctgtggttctaagaacttatttgagccccaatggtattgactgggacctgatcccactaaatggatcctagatccctgccaaggttggtagagacaaagcagcaggtctgagagtccagacgaggtgctctggctggtccactctctaaggctggagaagggagaccaggatggtacttgaacgtcccagggatgctgtcccatcccttccttcctcactcctactctttgaccctgatggccaaagccagagacgcaggccctaaaggtaaaaacgtcctctctgtattctctggcttttactccctagtgtctctgcataagtccctttgaggctgttagcctacccctccatctcttccattgacaaggaggatatgaatgatcttgacactgcttatatgagggcggcaaaagccctgctctcaactgcatgtgagaaaaaaacatctcacttaattcttccctcgccccttggtccctggctgtggacatgttaaacatttgtgaaaactttggccacgtccccatgagtggcaaggcagggtaaatggctatgccaagtgaaagaagaccaaagacaaaaagaccatgtcattcagcagcttaaaacccctcaacagcttcacattgcccagagtaaggatcaacatacatgtaataggttctcaaaagccctacatcatctgggtacaagctccccctccaaccccactctgtactatctccccctacccccaaccccagctgggcactccagctctactggctgtatgtctctctcctaatttttctacttaccacagggcctttgcacacgctgttccctctgcctggtagacttatccatgctccttagggaagcctttcgtggctcctcctcccccaggttaggccccctggttatttacacttgggcatcatgtgccttccctttgctgcatcatttgacattcatttgtgtgattattcatgtctttcccttcccttcccttccccttactcggctggagtcctactggggcagcgacagtgtctcttcttccttgctgttggatctcaggattaagcacagtgcctggcatacagcaggtgctcaataaatacttatcaaattggaaaa

SEQ ID NO: 4427 - DNA, 3871 bp, Homo Sapiens
  NM_017673
ggggcggtgagtaggtagtgcggatgcgggcgcagaactacgtttcccagcaggcatacagttggtggggcggggtgtgtgtgtgtgttgggaggcgggggtccctctcctttggcttggggctccggagttgccactgccgccggcgctggtaagcttttcaggatgtccagcaaagaatcctgtgggaaaaaagagacatctcagaggaaagacaccaccacctcatcacccaattttggtgaaaaagacaagaaagagagaaaaaccccagcaagttctactagttcatcttctataagatcagtttcatcagaaaagagaaaactgaaatcagatcatacagatgttctgtactataatataaaaagaagacaaggactgaaaagattgagtgtagaaattgacactctcagaaggagaccaaaaatcggttcttcatcccaaagacctattaaactcaaagaagcatcatattcaaatgataatcaaattattttgcagagtccttcttcaaatggaactaaaaaagacatacataaatgtgtagactttaaacctaaagatatcaaattgacaaatgctgggagcaagcttgaccatggaattaaaagccttagtagtcctaagattgccagtgatgtgaaacctaaagccgaaggccaggcaagtgaaaataaatggtctcatttacttgttcagagagagaagatgaaagaactcaagaaaggaagaaacagtaaatttagagacaattctgaaaaatgtgtcttagagaaatggaagagaaatcaattttctcaggattataactccaacaagataattaaggaacccttgggatctagaagacagaagatcagtttcaaaatccctataaaatcccgtgacaccctccagaaacttgtagaagaaaatgtcttcaacatagattctaataattcgaagactaagcaggaagaaagagaatacctggaaagctcccaggtttcattaaatgtgactaggcagaaaactgaacatttactttcagattttacatataagcggactgttcatgagtggaaacgaaaacatcattatgaccatcaagaaagtaatgattcacattctagggaaaacctaacccagagttttgaagcaccatgttgttccgtgtcatctgaaagtatccaggatgcagatcaagagatgcagatagtagaagagcttcatgctgcacgtgtgggaaaaagtgtggatttacctggagagttaatgagtatggaaattgacttagaagatgatgtacattcctcctctgcaaataatacttcagacagaaagcttctaattgttattgacacaaatattctgatgaatcatctcaaatttgttagaattttgaagacaacagaagtaccaggttttgacaaacttgtgttaataattccctgggtcgttatgcaagagctagatcgtatgaaggaaggaaaactactaaaacgtgcccagcacaaagctatacctgcagttcatttcatcaacgacagtctcaaaaatcaagatagaaagctatggggtcagtcaatacaacttgcatcccaaaaacattatggattgagtgatgagaacaatgatgatcgagtactaaaatgctgtctccagcaccaggaattattcccttgttcttttgttattctgtgcacggatgatagaaacttaagaaacaaaggcctaataagtggtgtgaagtcactcagtaaagaagaattgagtgcagagttattacacttatctctgaacacagatgtgtgtcatcagccttgtattcctaagcaacagttgaaagcagaaacaacacccttgaaagagagctataaggaggaatctacaaattctggactgtccattctgcttgagagcattgtatctgatcttgaaaaatctcttggaacaggtttatcttcaatattagaaacagaaatgaaaattgcttttggaaacctttggatggagatcctgtacctgaaaccaccatggactctactacatttactacagtgctttaaaaaacattggttggctgtatttggattagttatggaaaagaacttgcttttaactattgagagcctatacaaaaatctccgtaaagctaataaggcagtggattttacaacagtcaaattcttgcttcaggattctagaagtttgttacatgctttcagtacaaggtcaaattatgatggtattcttccacagacctttgctcaagtaaacaacctccttcagacatttgcagaggtcaagacaaaacttaagccaaattcttcagaaaacacagtgactaaaaagcaggaaggtacttcattgaagaattctcataatcaagaaatcactgttttctcgagttctcatcttccccaacccagcaggcatcaagaaatctggtctatcctagagagtgtttggattacaatatatcagaacagcacggatgtatttcaaagattgggctcaaattcagctctgactacttcaaatatagcatcatttgaagaagcatttatatgtcttcaaaagttaatggcagctgtgagggatattcttgaaggaattcaaaggattttggccccaaacagtaattatcaagatgttgagaccctctataacttcctaatcaagtatgaggtaaataaaaatgtcaaatttactgcccaggaaatttatgattgtgtttctcagactgagtatagggaaaagttaaccattggatgccgccagctggttgagatggaatataccatgcagcagtgcaatgcatctgtttatatggaggccaaaaacaggggatggtgtgaagacatgctcaactataggatataagtactgatttgtaactttaaaggaattgcatttgtccttaagaataacagagtagttttcaatctggtcactcttttgggccaaacccaagagaattttaagaaatgtttcataggtataaaaaggtgatcgcctattactgacagtctcattgtagctctaaaaagcctaatgtatccactgtggaataaactccatagactcaactcttctggagttcacaatgcctccctacctctattcttgatagtgagccagtatctctaaggaaaggagagccgtatttttagtcatcctagggcaggagccactgtggcatctgaggaagacccagggtacagtattagcatttctttcaaccctaagtatgggcatgtgaccagagacactgccaaaccctaagaaatcattagggcatgatcatgctcaccatatttcacaaatgaaatcttaatgtgggctgttttttatgatcaaactgtcatccatgttgacctgatgaaaataacaccctccttcacctccctcagggtaatgaaagtagaaatttgactgaagctcctacttccttatacagcctttccttctgtgggcttgtcacttttcagtacatttctagtggggaagagcagggcgacccctctgctgggtttctccttaaatgtgaagcaaaataaatttatataatggaatttggtggcagtgactgatgtttgtctctagctaaaaccaactgtttagttgactttttagttataggataagttggaagtccttgtttactggaatatattatgcttttgttaacacattagattaaatagaatttggtattctattataaatgtttattttttaaagcaataaataacttatttttggtaagatttggctttttacttccaaattgtttctgatatgtacataaggtatgattataaaagtgactgtctgcaataaaagagaacttgttcaggaaaaaaaaaaaaaaaaaaaaaaaaaa

SEQ ID NO: 4428 - DNA, 3873 bp, Homo Sapiens
  NM_017693
agtaacgccttctccaagtggatggcggggtggacacgcgtcccggcgccccgggctccctgggatatgtagttcgcgacaggacgagcggaaatactgccaggattttaccacctctcgcccatttatttacttctcggtcaccgctttcgggggacagataaacaccacagatgcccatcaaaggggcgcacgggtctggaggcgcagctcaggtttttgcgttggtcaccctgccctccgcacgtggagagggcaggcataaagcaccttgaaaggaaggtgctgtcaatgctatccgacgacctgtcgccgggcaccgcagcatcctcgctcgctccgatgggacgagggacgccggccccagggtaacaggaggcgcctcgccggccgcgcgctggatgctgtgatccaggtccggagccgggttccgccgcggccgcagcgacccgaccccacccgacaggccagaggaatcagtttagacttgaaattcagtttttcctgaaactgatcagaagttagtgacaccttgattggatccgtttttctgtcaggagctcattttgcagctctcaagcttttatagcatgctgtaaacaattgtcaaagttgtttatcaagaaacagatagagttgcaacttgtttctagtaatagaaacttttacactgcattcaatgcctaacgttgcagaaacagaaaggtcaaatgattctggaaatggtgagcacaaatctgagagaaagtcacctgaagagaatctacaaggtgctgtaaaatctttctgcacaagtgcctcaggagcacccttgggtcccaaaggagatggtcattatccatggagttgtccagtgactcatacacgggaaaaaatttatgccatctgttcggactatgcctttctcaaccaggcgacctcaatctataaaactccaaatccatcccgctctccttgcctccctgatagtacctctttatctgctggaaataattcatcaagatacattggtatcccgactagtacatcggaaattatctacaatgaagaaaatagcttggaaaacttatccaacagcctgggcaagctacctctcgcatgggaaattgataaatctgaatttgatggggtgaccacaaattcgaaacacaaatcaggcaatgcaaagaaacaagtttccaagagaaaaacttcagataaaaagggaagatatcagaaggaatgtcctcagcattctcctcttgaagatattaaacagcggaaagtattagacctcagacgatggtactgcataagccgaccacagtataagacttcttgtggcatctcttcattaatttcttgttggaatttcttatacagcacaatgggagctggaaaccttccacctattacccaagaagaagctttacatattctgggctttcaacctccatttgaagatattaggtttggtcctttcacggggaatacaacacttatgaggtggtttagacaaattaatgaccacttccatgtaaaaggatgctcttatgttctatataagcctcatgggaagaataaaacagcaggagaaactgcttcaggggccctgtcaaagttaacccgtggattgaaagatgaatcgctggcttatatctatcattgccaaaatcattatttttgtccaattggcttcgaagcaacccctgttaaagctaataaagcattcagcaggggacctctctcaccacaggaagttgaatattggatcttaattggagaatcaagtagaaaacatcctgccattcactgtaaaaaatgggcagatattgttactgatctaaacactcaaaatccagaatacctggatatccggcacttagagaggggactgcagtatagaaaaacaaagaaggttgggggaaatttgcattgcatcatagcattccagagacttaactggcaaagatttggcctttggaactttccatttggaaccattagacaagaatcacaacctccaacacatgcccagggaattgccaaatctgagagtgaagacaatatttccaagaagcagcatgggcgtctgggccggtctttcagtgctagtttccatcaggactcggcatggaaaaagatgtctagtatccatgagagaaggaacagtggttaccagggttacagtgattacgatgggaatgattgactatgcttgctactgaacagctggcattatatatgaaactgctatatacaggactgtataaagacagtagaagattttagtaagcctacattaaataggagcagatcttgtggtataaaaaataaccttgtagttctccagatactaagcttgtatatgattatggtgggtgatttcagatatataagcagataagcacagattattgtcctttcaagttaagagtatataatctggacagaaaatttcacaaaattcaataaaattacaactgttgtctaaataagtgaaacacaaattcacttaatagcatcaagatttgaaatacttaagcatgaagtgacttttataatgactcgatccctagacatttgttacagatagttttatgcctaagaccaagatgtaaagtaccatctgcccttaaaaaaaattggggctgtcaatttctagttttcactcatggttaacacgcatttaaaattatttcatgagtctagtagttctttgatttatagcaggatcttgcttgcctcatttgtttcctggttatgttcttaggattctgactaagaggcaaaagagaaaagactcaagaaactgatcctggagatcgagaccatcctggctaacatggtgaaaccccgtctctactaaacatacaaaaaattagccgggtgtagtggtgggcacctgtagtcctagctactcgagaggctgaggcaggagaatggcgtgaacccgggaggtggagcttgcagtgagcggagatcgcgccactgcactccagcctgggcgacagggcaagactctgtctcaaaaaaaaaaaaaaaaaaaaagacggatccttttttttggtgcaaatgggtgacttagtgcattgattcagatttttaaaatttcttgatgtggtttgtaataatcaaatattgacaagaaccttaggtctcgaaagacttttataagtctagatgacgtttgccttaggggtaaagtaaaagaacaattggcaccttaagtttctatacccaaggttatctgtgaaatgagatctcctgatatttgattgctttctcagtatggagtcatatgttgataacagtactgaagatgcataagaaatgcccaagtcactcagaggacaactacccatattccagactctgagctgtttcctttttaaaaatcatatagacaattagctgtttgaagtgagtattaaatatttcagaagtgtgaatttcatgtatttgagctcctctagttgctgttggtttttcttctgctgccaacctgtgactcacaaatgactaggatctcttgttctttaattttagggtcttgttccaggactcaaatcagtaacttggtgattacaaggtgctgaatgtgttggtaaccatatcgcaatacacctcaaggaaaaggttcagatttttatttttaaaatattttcatttttttcttgaattttatatccgtttgttcactcgtacatgcctagcctacagaaggggatatatattatgaaatggtcatttttctgaagagaatattttgcttgaaatgcaaaggactgaaagagatttgtaggttgttgattttgttacttcatactggaacttttaaaaagatttcatcaaataaagttttgttttctacttttaattataaaaaaaaaa

SEQ ID NO: 4429 - DNA, 4797 bp, Homo Sapiens
  NM_017694
gtcgcagccccggaggagcgcgcgagcagcccgggatggtgcgcgctgccccgacagccgccgccccggcgccccgagccgccgccccgtgctccggggacagggctccccgcgccccgcgcagctgagcgctgccgccgccgcagcagacaggatctctctcagttacccaggccggagtgcagtggcgtgatcctagctcactgcagccttgaacccctgggctcaagtgattctcctgccttggcctcctgaatagctagaactacagatcaacagtacaaattctgaagtttgtaaacttgctgatggtggtggtaagccatggcagatgataaagttgctatcttaacggatgatgaagaggaacagaagagaaagtatgtgcttgcagatccctttaatggtatttccagggaaccagaaccaccttcgaatgaaacaccttcctccacagaaacatctgctattcctgaggaggaaatagactggatagagaaacattgtgttaagataaacaacgatcttctaatttccaaggtcttttattttttcttttactctgcctatggctctctctatccccttttgcctgtgtattacaaacagctgggaatgtctccaagccagagtggactactagtaggtattcgttacttcattgaattctgcagtgcccccttttggggtgtagttgcagaccgctttaaaaaaggcaaaattgtcctcctcttttctcttttgtgttgggttttattcaacctgggcattggatttgtcaaacctgctaccttgagatgtgtaccaaagattcgcccaacaactcaccccaccaatgcaagtcaccagttaactatcctgccaacaaattcttcctttacctctttcctcaccatatcaccaaaaatgcgtgagaaaagaaaccttttggaaacaaggctcaatgtctcagacaccgttactttgccaacagctccaaacatgaacagtgaacccactctgcagccccagacaggtgaaattactaaccgtatgatggacttgactttgaactcaagcacagcaacccctgtctccccaggaagcgtaaccaaggagacaaccactgttattgttaccaccaccaaatctttaccttctgaccaagtcatgcttgtttatgatcaacaagaagttgaagctatattcttggtgatcttggtagttgtcataataggagaatttttcagtgcctcttctgtcacaatcgtagacacggtcacactccagtatctgggaaaacacagagatcgctatgggttgcagcgcatgtggggctccctgggctggggcctggcgatgctgtctgtgggcatcgggatcgactacacccacatcgaagtgctcatcgatggaaaggggtgtaagccccccgagtacaggaattaccagatcgtcttcatcgtcttcggcgttctcatgaccatggccttgatcgttgccactcagttccggttccgctacaaccatttcaaaaacgatgattctaaagggaaagaggtggagatcccgcaggtggaaaggaacaactctacagagtcctctgaggagacaccaaccaccacaagccactcgcaggccttcaacttttgggacttaatcaagctgctctgcagcgtgcagtatggctcagtgctgtttgtggcttggttcatgggttttggatatggcttcgtgttcacctttctctactggcatttggaagacctcaatggaactacaaccctctttggggtctgttcagtcctgagtcatgtgtctgagctgacagcatatttttttagtcacaagcttattgaattgatcggccacatcagggttctgtacattggcctggcctgcaatacggctcgctatatttatatttcctacctggagaatgcctggactgttctccccatggaagttcttcaaggagtgacacacgcggccatctgggcagcatgcatttcttacctcagtgcagccgttccccctgagctgaggacatctgctcagggcatcctgcagggccttcacctgggtttgggaagaggatgtggtgccatgatcggaggcgtgttagtcaattattttggggctgctgcaaccttccgaggaattggcatggcctgcttggtgatcctactgctctttgccctgatccagtggctggcagtgccagatgaggaagaagacaagacaatgttggcagaaagaattcctgttccctccagtcccgttcctatagcaaccatcgacttggtacagcaacagacagaagatgtcatgccacgcattgagcccagacttccacccaagaaaactaagcaccaggaagaacaggaagatgtgaacaaaccagcctggggagtcagctcttctccctgggtgacctttgtctatgcactctaccaaattaaagagatgatgcaactcacaagagacaaccgtgcttctgagatacagcctttacaggggaccaatgagaatagggaaaattctcctgctggtagagcccagcctgtcccatgtgagactcactctgacccatctagaaaccagccatcccctgacgcagcagcatctcagacgcagaccagccccgctcaccccagtgtggacccgtgcacagaggagagtgaagagcagcaggctcagctggccgcgggaggacactgagggcatcctgctcatctcacaccctgcatggaatcaggctcctcagccaggacacagggtgaggccccccagccaggatatgcctcccctggaggagcacagcactgcatatgcttctaaatatctaaactcattaacatggaaacacacacacaggagctacagtacatattggcaggaaaaggtaaactttcgtaatctcattggaattacaacagggaaatggagttcaatgaggactttcagttctttgcttggttaggttaaggatgatagaatttctctgccagtgcagtaagagttgaaaccggcagttacactaagtaagtggagggaatgaaagtgtttcgaggtgaatgtggatataatttccctcttctgattatttattcttatttggttcctaacacaaactgggaagagatagaattcatctatactttcttttttcttggagagaaccgtttaaaaaattacaagatatatttaaaaagtaaccagataaaagtagcacatgtgcttttgttaaaaataaagttaaaagttaaagttaaaaaatgaagttaaaagtttcatcagaaactttacatatctttagcaaatatatttttatatgtgtatggcatataatggaaataattctttgagcaacagaagctattattaactactgcaagctaagccgagcttaaaaatgccttttgttttaaatgggctttgagaaaaaaaacagaaacaagcgattatttcaaatcaaccaaccaactcagtatcctgtgttttgatagacaagagtttactaaatatattgatactgtaaatagcctctctcgctatttactatcttatagtaattcaggctctaattagctgagggaatgaaacacacaaaaatcactgaattcctaagagttccttaaataagcagtactagttacaaatcacagtataagatttaagtgcctgggggaaggatacaatttttagaaattacatattgggtcagttttgttttgtttttggtgaggaaaaggtggtaaataggaaaccatgaatgggaaggatggcaataagtagcaactatactttccaatgactaaagaaagaaaatctcagtatattcgttctcatgaagacacagtcagacactggacaatgtaatgtatgcaactgcaaacgttacaactgcagccagaacaatggctgggtggatcgcacgtaaagcttgccactaaaaatcaaagcagaggttaacaggaaacctggggggagtgtggaaaagggaaaactgttttagctgaataaaggtgaattatataatttataatagctgtggatgagcacaggagagagaggaaagaaaagaacagtcgaaatgagcaactcaccttaccctctgaccctgattagacaggatcaattgtaaagtgagggcttctccatgacaccatagttctgcccaatactgcatttgggataagaaattctacacttggatgtctcgcttcacaataaaacacagcttaaaaataaaataactgaaagaaatagaattcagcaaatagttattttttgcacttgaactgaaacgtactgtactgtaaattatgactcattttaagtgacctttaaaatcagatgtatttattatgcttgtgtaattatagaaataaagaaatgggtgacaggcttaacctcacctatgaatgtacagtatgtggatttgtgaaactgactgtaggaagtcaaaaacttgtactgtatcttgtgtttacagttctgatttattcctttgaaaagcctgctgttttggaaatgcacagttgacatgttgaaataaaaatgaataccatttttaaatgtttcttaaatgataaagatgtgaccaaacaaaagtcctatactctaatgaatgagaccaaattcaacatgcctttgttatggaacatttactgtgacagcagaatcgataatgcagtcatttccagccttgtgagctgacaccttcatgggtttgtggactttgtgactttttcttcctgtccccaaagtgccatatgctaccttaaaaaatattaaagtgaattcaaattacat

SEQ ID NO: 4430 - DNA, 5021 bp, Homo Sapiens
  NM_017699
aataaagaaataaaacaggtgtctgaggagaggttctattagagaggggagaatagagagtaattatcgttcagacaggcaagagttctctgcaggtagcagcctgggaaagcgaactcgcgcaccctcttgggggacgggctcttttgctttctatttcttctcctgcagccagggtgcacacgtatttgaaacagaccgaatttcctcctcgatgtggcgtcaggttgacttttcgagactagcgggtatttctttttaatgactccaatgcctttttattattgctgttattgaggttgagggagaagagatcggtctaaattctggctgggtaagtggggggattctcggcgatgagaaacgggggacttagaagccggaggaaaatcagcagccccacatctccacttctccagtccgccctactctccacccgtgacctccagtggagaccccaggcggcagcatcagtatttgatcggcccttcgtcagcacgctgccagccctggccggctgggttcgccaggcatcacccgctcggctctgaagcggacgcctggccctgcaccgggctttggaaggaccctctctgcgctcgccccctccccagggtggctccgctttcgagcccgggcgcggtgcccaccatgcgcggctgcctgcggctcgcgctgctctgcgcgctgccctggctcctgctggcggcgtcgcccgggcacccggcgaaatcccccaggcagcccccggcaccgcgccgcgaccccttcgacgctgccaggggcgccgatttcgatcatgtctacagcggggtggtgaacctcagcaccgagaacatctactctttcaactacaccagccagcccgaccaggtgacagccgtgagggtgtatgtgaacagttcctctgagaatctcaactacccggtccttgttgtggttcgccagcagaaagaggtgctgtcctggcaggttcctctgctcttccaaggactataccagaggagctacaactatcaagaagtgagccgcaccttatgtccctcagaagcaaccaatgagacgggacccttgcagcaactgatatttgtagatgtcgcatccatggcacccctgggtgctcagtacaaactgctagttaccaagctgaagcacttccagctccggacaaatgttgcctttcactttactgccagcccctctcaacctcagtattttctatacaagtttcccaaagacgtggactcagttatcattaaagtggtgtctgaaatggcttatccatgttctgttgtctcagtccagaatatcatgtgcccggtgtatgatctcgaccacaatgtggaatttaatggtgtctatcagtccatgaccaagaaagctgccatcacgctacagaagaaggattttccaggcgagcagttcttcgtggtatttgtgataaagcctgaagattatgcctgtggaggatctttcttcatccaggaaaaggaaaaccagacctggaatctacagcgaaaaaagaaccttgaagtgaccattgtcccttccattaaagaatctgtttatgtgaaatccagtcttttcagtgtcttcatcttcctgtccttctacttgggatgccttcttgttgggtttgttcattatctgaggtttcagagaaaatccattgatggaagctttgggtccaatgatggctctggaaatatggtggcatctcatcccattgctgccagcacacccgaagggagcaattatgggacaatagatgagtcaagctccagtcctggaaggcagatgtcctcctccgatggtgggccaccgggccagtcagacacagacagctccgtggaggagagcgacttcgacaccatgccagacattgagagtgataaaaacatcatccggaccaagatgttcctttacctgtcagatttgtccaggaaggaccggagaattgtcagcaaaaaatataaaatttatttttggaacatcatcaccattgctgtgttttacgcgctgcccgtgatccagctggtcattacctatcagacagtggtaaatgtcactggcaaccaggacatctgttactacaacttcctctgtgctcaccccttgggcgtcctgagtgccttcaacaacattctcagcaatctgggccacgtgcttctgggcttcctcttcctgctgatagtcttgcgccgcgacatcctccatcggagagccctggaagccaaggacatctttgctgtggagtacgggattcccaaacactttggtctcttctacgctatgggcattgcattgatgatggaaggggtgctcagtgcttgctaccatgtctgccctaattattccaacttccaattcgacacctccttcatgtacatgatcgctggcctgtgcatgctgaagctctatcagacccgccacccagacatcaatgccagcgcctactctgcctatgcctcctttgctgtggtcatcatggtcaccgtccttggagtggtgtttggaaaaaatgacgtatggttctgggtcatcttctctgcaatccacgttctggcctcgctagccctcagcacccagatatattatatgggtcgtttcaagatagatttgggaattttccggcgggctgccatggtgttctacacagactgtatccagcagtgtagccgacctctatatatggatagaatggtgttgctggttgtggggaatctggttaactggtccttcgccctctttggattgatataccgccccagggactttgcttcctacatgctgggcatcttcatctgtaaccttttgctgtacctggccttttacatcatcatgaagctccgcagctctgaaaaggtcctcccagtcccgctcttctgcatcgtggccaccgctgtgatgtgggctgccgccctatattttttcttccagaatctcagcagctgggagggaactccggccgaatcccgggagaagaaccgcgagtgcattctgctggatttcttcgatgaccatgacatctggcacttcctctctgctactgctctgtttttctcattcttggttttgttaactttggatgatgaccttgatgtggttcggagagaccagatccctgtcttctgaacctccaacattaagagaggggagggagcgatcaatcttggtgctgtttcacaaaaattacagtgaccacagcaaagtaaccactgccagatgctccactcaccctctgtagagccaactctgcattcacacaggaaggagaggggctgcgggagatttaaacctgcaagaaaggaggcagaaggggagccatgttttgaggacagacgcaaacctgaggagctgagaaacacttgctccttccatctgcagctttgggagtgcaacagggataggcactgcatccaagtcaactcaccatcttggggtccctcccaccctcacggagacttgccagcaatggcagaatgctgctgcacacttccctccagttgtcaccctgcccagaaaggccagcagcttggacttcctgcccagaaactgtgttggcccccttcacacctctgcaacacctgctgctccagcaagaggatgtgattctttagaatatggcggggaggtgaccccaggccctgccctactgggatagatgttttaatggcaccagctagtcacctcccagaagaaactctgtatatttcccccaggtttctgatgccatcagaagggctcaggagtggggtttgtcacacattcctcttaacaagtaactgtcactgggaccgagtcctgggtgcttacatattccttcgtgtcttcatctcactgacctgtgtggacctcatcactctgactctgccttcttggaaaggccctgtcactccacagatgtctggccagcttcaaggcagaaggaaaaacaggaaaagctcttttaacagcagcaggaacaagagaaatgactaaccatactaaaagactggtaacagcagcagcagccagacaggcctcaccttaaggacttgggctgccagagcaaattcagcagagcttatttggcctcccattcacacagctcagttctgtgcccacatcacctttggggaagaaatcagcattctaatcagggacactacttcaggagtcctccacagcgagtccgtcatctgtcactttatgtagatcagggttctagacttcttccctgaggttctcagaagcagctctcaggatgaacgtattgtcctcttcccctcttcttgcaaagtgcacagctaatctaatgttgtctctcggttgcacctgacattctctccccagtaaggtgttggcaagctcagcatctgggttccactctcacactgtctggcagctctgtgtctgagaagttctacattgaccaggcccccttgttgcctggagtatgacgtaatcagaaaatagacgtataaatgtgcacatgcgtatgtatttgcttgtgaaattaaagtcacctcttgcctctgctttcctgatcattcgttagagaaatggatcaggcatttttttaaattattattctttctctaaactatttgcattgtgttcaaaaacccattttagaagtttgaacagcaagcttttcctgattttaaaaacacaaagttgctttcaatgaaatattttgtgatttttttaaagtccccaaatgtgtacttagccttctgttattccttattctttaagcagtgttggcttccattgaccatatgaaggccaccaattaaatggttgtgttaatccaacatgtaaaaaactttttggcagggcacagtggctcacgcctgtaatcccaacactttgggaggctgaggcaggaggatcacttgagcccaggagattgacgccgcagtgaactatgattgtgcccctgcactccagcctggatgacagagtgagaccccatctcttaaaaaataaaaaaaaataaaaatttgaacctgtttcaaaaaaaaaaaaaaaaaaaa

SEQ ID NO: 4431 - DNA, 921 bp, Homo Sapiens
  NM_017702
gctggatccagcgtagcggggcggccgggcggatccagcgcagccgggagacagatgcgaggcggcggtcagcaggtgccgaacccacggccaggcttccgtggccagcagccctagaggaatggccatcctgtccctgcgagcccctgggccctggcaggcgatgcaggtgggatgctatggaatatgatgagaagctggcccgtttccggcaggcccacctcaaccccttcaacaagcagtctgggccgagacagcatgagcagggccctggggaggaggtcccggacgtcactcctgaagaggccctgcctgagctgccccctggggagccggaattccgctgccctgaacgcgtgatggatctcggcctgtctgaggaccacttctcccgccctgtgggtctgttcctggcctctgacgtccagcagctgcggcaggcgatcgaggagtgcaagcaggtgattctggagctgcccgagcagtcggagaagcagaaggatgccgtggtgcgactcatccacctccggctgaagctccaggagctgaaggaccccaatgaggatgagccaaacatccgagtgctccttgagcaccgcttttacaaggagaagagcaagagcgtcaagcagacctgtgacaagtgtaacaccatcatctgggggctcattcagacctggtacacctgcacaggtgggccgagacccagacgaggagtgaggaatgagagagaccaaagttcctgcctccgctgggctcacattcagatgtgagctatccagtgtggtggccactagccaaacatggccagtcaaagttaaattaactaaatatgcatttcctcgttgtactgtctacattggacagggctgttctggatgagaaattaaactagtgaattacaaaaaaaaaaaaaaaaaa

SEQ ID NO: 4432 - DNA, 1876 bp, Homo Sapiens
  NM_017703
aatcacgcctcagccacctcccgcaagcctctcactgcctcagccacgctttccaggctggtttctggtccccatccgcggctggtccggccctgggaccgaatcacttcccagcgagaggaaggtcaaatttctcgaccggctacgggaaggtcgcggccgccgccctgtcagccgcctcggcgcccccaggacccctcgggtctctttaaccggaagcggaagtgcgtgtcggcgggatcatggcgactttggtcgaactgccggactcggtcctgctcgagatcttctcttacctcccggtacgggaccggatccgcatctccagggtctgtcaccgctggaagaggctggtggacgaccggtggctgtggcgacatgtcgacctgacgctctacacgatgcgacctaaagtcatgtggcacctccttcgaaggtacatggcatcccggctccattccctgcggatgggtggctacctgttctctggctcccaggccccccagttgtcccctgctctgttgagagccctgggccagaagtgccccaacctgaagcgcctctgcctgcacgtggccgacctgagcatggtgcccatcaccagcctgcccagcaccttgaggaccctggagctgcacagctgcgagatctccatggcctggctccacaagcagcaggaccccaccgtgctgcccctgcttgaatgcatcgtgctggaccgcgtccccgccttccgtgacgagcacctgcagggcctgacgcgcttccgggccttgcgctcgctggtgctgggtggtacctaccgtgtgaccgagacagggctggatgctggcctgcaggagctcagctatctgcagaggcttgaggtgctgggctgcaccctgtctgccgacagcaccctgctggccatcagccgccacctccgagatgtgcgcaagatccggctgaccgtgaggggcctctctgcccctggcctggctgtgctggagggaatgccggccctggagagtctgtgcctgcagggtcccctcgtcaccccagaaatgccctcccccactgaaatcctctcctcctgcctcactatgcccaagctcagagtccttgagctgcaggggctggggtgggagggtcaggaggcggagaagatcctgtgtaaggggctgccccactgtatggtcatcgtcagggcttgccccaaagagtctatggactggtggatgtaactactccacctgcccttgggacccatcccagttttcatcattgagccccagaccctctgagcagcaccttgaagagggcagataatcagacttgaggaaactgaaagccccaggttgagagaacagaggcctagggacctccagaccattggaatcactgtttgccagctgtgtggccttggtcatatcatcagcctctgggaagcctagttcccacatctggaaataaggatgatcatagctacctcacggttacattgcaaagccttactctaaaagctcccagcctccagaggctctcaatgaagagtcaccttcatggtcgtcttcaggaacaggacggatgaagaaggggtggggttaagactcaggggcacctgagggtctgagcccccttatgagtacccaagaaggactgtctatgcatgcacacccacaagcctatacaccatttatatacctacacgcacgcaagagacgcggagagataggcgatgcagactcgcgattcaatgatcgatatgctcataaaagtgctcaattatattttctgtattttgtatgctgtattttccaagacgtatattattttactattaaagaaaaaaatcatttttttttcccgagaaaaaaaaaaaaaaaaaaaaaaaaaa

SEQ ID NO: 4433 - DNA, 5720 bp, Homo Sapiens
  NM_017709
gcggctcaggggcggggacgggggcgtggtcccgccgtataagaacggagggggcggcggcgggacggctcactcggtgccgctgcctaggggctgtagaggtcgcgccgctcctgctggggcctgcccacgccaaggacctgcctctgtcgcctcctcttctattgcccagtttccccagccagaacatcccctgaagatggcagaggagagcagctgtaccagggattgcatgtccttcagcgtgctcaactgggatcaggttagccggctgcatgaggtcctcactgaagttgtacctatccacggacgaggcaactttccaaccttggagataactctgaaggacatcgtccagaccgtccgcagtcggctggaggaggcaggcatcaaagtgcacgacgtccggctgaatggctccgcagctggccacgttttggtcaaagacaatggcttgggctgcaaagacctggacctaatcttccatgtggctcttccaacagaggcagaatttcagctggttagagatgtggttctgtgttcccttctgaacttcctgccagagggtgtgaacaagctcaaaatcagtccagtcactctgaaggaggcatatgtgcagaagctagtgaaggtttgcacggacactgaccgctggagcctgatctccctctccaacaagaacgggaagaacgtggagctgaagtttgtcgactccattcggcgtcagtttgagttcagtgtggactctttccaaatcatcctggattctttgcttttcttctatgactgttccaataatcccatctctgagcacttccaccccaccgtgattggggagagcatgtacggggactttgaggaagcttttgaccatctgcagaacagactgatcgccaccaagaacccagaagaaatcagaggcgggggacttctcaagtacagcaaccttcttgtgcgggacttcaggcccacagaccaggaagaaatcaaaactctagagcgctacatgtgctccaggttcttcatcgacttcccggacatccttgaacagcagaggaagttggagacttaccttcaaaaccacttcgctgaagaagagagaagcaagtacgactacctcatgatccttcgcagggtggtgaacgagagcaccgtgtgtctcatggggcatgaacgcaggcagactctgaacctcatctccctcctggccttgcgtgtgctggcggaacaaaacatcatccccagtgccaccaacgtcacctgttactaccagccggccccttacgtcagtgatggcaacttcagcaactactacgttgcccatcctccagtcacctacagccagccttaccctacctggctgccctgtaactaaccttgagacctgagggtttccacagtgggaaccccaatagggctagggctctcaggtaggggagcctccttctagatgtaggcatttggcttttaaaggggaactcagctctgattctgcttttttttttttttttcctttgtgtacccattggaatgggtctacagtgtatcatgagccaaccctcaaaggacccgtattacagtgccacgttggaaaacgctacaggaagcatgacctatccacatctttccaagatagacactaacatgtcatgtcccaaacattagcacgtgggggttgagctctgtgcagtaatcgagattgggagaatttgggcagcgcgtgagaagtgctaagctacttgttttctcacttgagcccgggtaggctgtgttggccctcacttgggattctcagcagttacatgaaagttgtgctgataatctcttctcttgtaccaattttagtcaggcagaaaatggtaaacatgagggtgctcttgtgacttaatttttgttcaagggactaaattgcttatgtttattccctgtcagcggagtggagaatgtcattcatcaataaaccaaagccaatagctggagaattgagatctggttgaaagtggtttatggtttacatgctgtactatcctgaggaattgcgagatattgctgaggggaaaaaaaaatgaccttttcttgaaatgtaacttgaaaacaaaataaaatgtggaacataatgtttaattagaattgtggtggtggtagtggaaggggataattgtaaataggaaacatgaatgttcatttttttctttaaagaattcttattaaatggctccctgccttttttttcttttttcctcatcagctctttcatggctgaattttgttttattcttcctaagactgaggattgtgctgagtccagagtcattgtggtaactgacatgagggtcttcccatgttttaactggaaacccactttggtcacattccaagtatgacacagctgttcttctggagtactttagctattttttgtttttgttcttttcgttttttttttttccaaaaatagtgacttccttctccaggtgtgtttgacagcaactcaattcaggaatttcggtagaactgagtgacctgtggaactgctttagaatctaacctgctgtcttcgtgctctgtgtgaaggggaagctggggggttagcatgaagtctggccttgtgtgcattggagcttccaaggcactttgaaatcattccagtatatttgggaagaattgagtgaatgagaatgctcttccttattctggtagatttgacttgtttataattctgcactttagaagaaaaacagtgttaatctgtagttgaaagaaagcttagtagatgagagagttctaggctactgtggctttttccagtagatttagatgagattatgtgttttgaaatgttttgtgggatcccttagaaagcatcacttcagggcagagacactcaatattgccagccagcttgggttctaaagtgatttaatcaaattcatgctcctgatcttttttttcccccttcctttggctatgaaaacccaaagcccggagtgattgttttctccttgctttaagcagtgaagttatcctaatgcaaaagagcttagtagaaaatgagtggtttacctttttttctaaaagtatattttcaagtttattctggaatgtgatgtcttggtcctcttaaaagcagatcagccatgactgaaactcaaggcttagctggtatctatgttgtgctacattaggtgactagaagccacttcttagtgtaatcagctcctgtttccctgtgagccttagttatattttaattcagtggctttgagtcaaggccggttctaattgaggggacccagtgtgcttcagtgttaagagtggggcaatgaagagtgaaccccaatgaagagtgatcccaactttggaaactatctggtcattcatgaccttaaaaagctgccatggtggtcaaatggcatgtgtttgcacaaaaatgaccgatgtgtttaaccaaagctttgaaatgtgatgaagccaccaacataagcacttgcctaacagaaatcagtatttcttctacttagaaggcttggggcccagggtaatgaggcaccagatgaagataagatctgcatcaaggaattaaatttccagtttgtccttggggttctttctgcttatgttttttcccccccatctggtaatagtcctcttctgagaatgaaaggaggcacagaagttgcgagaaagacccagtccccagtctttgccaccattgcaccatggttgtctcggagtcccttcacctgacctttttagtcagctcagatctttttgtagtttgagaatagacctattcaagagctatcagggttaaaagctgcactgaccaaagctgtacttttaaaacacaacccctgggctagtgatgtctctacttgctctatgagccttttgccagcctcagaataggcgaggtaaccttgaatttcagggccctggaaactctagctgaaacctgcctttcctaatgctcacacaagcaccaggtaccctgagcttatactgagtccagtggttcctattttatgtgtgtgtgtatgtgtgtgtgttgagtaacatgaaacttggcagtagcagagagcactgaagttcacatgcaagttctaatctaaagttaagcagtctcttatttgtttcgggactctgatttgactctttttctgatgctttcggcatgtctgcagcctgttctcctagcctgctgcttggagtcaggttgagcatcagtgagatgaagacagtaccttttcctctcacattggcagaatagcacgcactagatgcctgaccttgagctctagtctcccctttaaatcttaccttggcagtaacacattattcctcattcaataatttcaatgctgaaactgaactctattactaatgccttccaatcagagttcctgatggggatgcctgtgggatggcccacacctgggggacctggcagatggggtgagttgggtaaggaagatgatgcttagttcctgatagatgctacagatgtagtttggcatttcagtttttgtccagtttgattttcactggggtttgagtcacagcaagctgtgtatgaacttgtgttttgtggtgacacattaataatcaaattgctaaaaccctgaatctgcttattcttcagcttcacctctgcactaaccccttacccttatggtacgtcaggattttaactagtactgctttgttgactttgggaaatggtgccactcaaaagcaacttcctaacttgaggaataactcctttgtagtttactttctggtactggttggtgccttgtattgggatacagctatattcttagctcaaatgtcctctttttgagagcaaagtagttatccaatggtgagacgagaccctgacgctcatagaggccattccttcctgggtgtcggaccagggctctgtgtcagggaaaaccttctgggtggactttgtaagaatccagtttccaaggttagattcacatccttaatcttgcagagactagaatttcacagctcgctttggaacatattccaattcaaccagttaaaatcagaggaccaagtcgtgggggaggggggcggtgttgaggagaggtatttttaaagatctggcaacttttcaggattatttgtggagaactctaaggttaagatcaggaaataaaagactgtgtgtgtgtgtgtgtgtgcgtgtgtgtgttcaagtgcctaaatcttgtttacctatcactttaaaaaaataattgaagtgtaagctaaataaaatgcttggagttttgcctgggctagtgagagttggtgcaaattcttgtgtgtgtttgcataggaaggtgagatgaccatctactaaagaggaagtagctaaatacagatctgtgggtgtttttaaaaaaactcaacctatctggtgttttattttaatggataaaaatgtaatttttctaaggtagcaacttatttccaaattaatatagatgaaaaatagataccaattagactaaattgaaagctttttgttctatatttgcatagcctttgaaatatttcttagtgcctaggaggtctggggattcctctttcgtggtggtcactaaccttacttgatgcagataaaatcacttgtcaatgcaaaatgtgttagaacttgataaagctttgagtttgagaaataaaggtatatttaaaatttaaataaaacttgtcatttatgctca

SEQ ID NO: 4434 - DNA, 2368 bp, Homo Sapiens
  NM_017714
gggtgactacttccggtgcagtgaaggctcggggctgaagcggggtaattcctctcctgcaattacttttggatggaagtatgcccctttctcagtagaagatggtaatcttggagaatgaccatggagaaggggatgagttctggagaagggctgccttccagatcatctcaggtttcggctggtaaaataacagccaaagagttggaaacaaagcagtcctataaagagaaacgaggaggctttgtgttggtgcatgcaggtgcaggttatcattctgaatccaaagccaaggagtataaacatgtatgcaaacgagcttgtcagaaggcaattgaaaagctgcaggccggtgctcttgcaactgacgcagtcactgcagcactggtggaacttgaggattctccttttacaaatgcaggaatgggatctaatctaaatctgttaggtgaaattgagtgtgatgccagcataatggatggaaaatccttaaattttggagcagttggagcactgagtggaatcaagaacccagtctcggttgccaacagactcttatgtgaagggcagaagggcaagctctcggctggcagaattcctccctgctttttagttggagaaggagcctacagatgggcagtagatcatggaataccctcttgccctcctaacatcatgaccacaagattcagtttagctgcatttaaaagaaacaagaggaaactagagctggcagaaagggtggacacagattttatgcaactaaagaaaagaagacaatcaagtgagaaggaaaatgactcaggcactttggacacggtaggcgctgtggttgtggaccacgaagggaatgttgctgctgctgtctccagtggaggcttggccttgaaacatccggggagagttgggcaggctgctctttatggatgtggctgctgggctgaaaatactggagctcataacccctactccacagctgtgagtacctcaggatgtggagagcatcttgtgcgcaccatactggctagagaatgttcacatgctttacaagctgaggatgctcaccaagccctgttggagactatgcaaaacaagtttatcagttcacctttccttgccagtgaagatggcgtgcttggcggagtgattgtcctccgttcatgcagatgttctgccgagcctgactcctcccaaaataagcagacacttctagtggaatttctgtggagccacacgacggagagcatgtgtgtcggatatatgtcagcccaggatgggaaagccaagactcacatttcaagacttcctcctggtgcggtggcaggacagtctgtggcaatcgaaggtggggtgtgccgcctggagagcccagtgaactgacccttcaggctgagtgtgaagcgtctcagaggcatttcagaacctgagcttttgggggtttttaactgaagttggttgttttatctttcttgttttataattcctattgcaacctcgtgcactgctcgagacacaagtgctgctgtagttagcgcttagtgacacgcgggcctttggtgggtgagcgggactgtgtgtgagtgtgtgcgcgtatgtgcgcacatatgtgtatgtgtggagtatgtgtgtttgcttctccgtggatgaaatagaaactcctcattgtgtgaccaggaatggttaaatcatctttacaaaatgtgtgctttaactgtttacaagtaaaacctaaagttgcaggaaacattttttatttcgtaaagaggtaccaactgtcgctgatgtgatatgtcagaactgaagagtaaatctacttgtttaaatgacttgacagtggtagtgctccatttaataacagtaataagtaataaagtgtttttatttgttaaccagtttaagtggatcctgtggtaacttaaactgttgttctcatcccttatatggggcatttttctttaacaaagaatggtttcagtgaaacaatctagcagagaattaatgtcagaacctttttaaataatagtctgattgatacagtttgtacttatttcatcaagcttttctaagcttaaatattgcatagcttcgagctgtatggactatattatgaaagaatatgtaaagagaacatacagtaatgcacagtccttaatttgtgtataatggaaagttatttacaatataacactgtaaataagaaagcaaagtttatgggaaaattcaatattatctttgtttttgtttaaatatatttttaagataaaggcacaaaaataaaagaagcgtattactgggtatagtatgtgactcctcttctcagactaataaattatcttttgaatccttggttaaaaaaaaaaaaaaaaaa

SEQ ID NO: 4435 - DNA, 2282 bp, Homo Sapiens
  NM_017722
aggacgggctaggcagcgcggggagggattcggactcggggcgggcctgcacgagggcatcggctccacagggaccagtcatccccaaaacgaggggatatcagcttaccgaggccgcaggttttcctagtccctacctcatagatatgtaggacatccccgggcccggaatgcggctctctgaccctctctgtgccctcccccgccccccgaaccaggcttggcgggcggaggcgccagcggatgtctcatgcaaggatcgtctctgtggctaagcctcactttccgctccgcccgggtgctctctagagcccggtttttcgagtggcagtctccagggctgccgaatacagcagcgatggagaacggcaccgggccctacggagaagaacgtccacgtgaagtccaggagacgacagtcaccgagggggctgccaaaatcgcctttcccagtgccaacgaggtcttttataacccggtgcaggaattcaatcgggacctgacatgtgctgtgatcaccgagtttgctcgcattcagcttggggccaaaggaatccagatcaaggttccaggagagaaggacacgcaaaaagtggtcgtggacttgtcagagcaagaggaggaaaaggttgaactgaaagagagtgaaaacctggcctcaggagaccaacctcgcacagcggccgtgggggagatctgtgaggaaggcctgcatgtgctggaaggcctggcagcttcaggcctacgttccattcgatttgccctagaggtgcctgggctcagatctgtggttgcaaacgatgcctccacccgggctgtggatctcatacgccggaatgtccagctcaatgacgtggcccacctggtacagccgagccaagcagatgcccggatgctgatgtaccagcaccagagggtgtcggagaggtttgacgtcatcgatctggacccctatggcagcccagccaccttcctggatgcagctgtgcaggctgtgagtgaaggagggttgctgtgtgtgacctgcacagacatggcggtgttggcggggaacagcggggagacgtgctacagcaagtacggggccatggccctcaagagccgggcctgccacgagatggccctgagaatcgtcctgcacagcctggacctccgcgccaactgctaccagcgcttcgtggtgccgctgctcagcatcagcgctgacttctacgtgcgtgtttttgtccgtgtcttcaccggccaggccaaggtcaaggcctcagccagcaagcaggcgctggtgttccagtgtgtgggctgcggggccttccaccttcagcgtctcggcaaagcgtcaggagtccccagcggccgggccaagttctctgcagcctgtggtccccctgtgacccccgagtgtgaacactgtgggcaacgacaccagcttggtggccccatgtgggcagagcccatccatgacctggattttgtgggccgtgtcctggaggctgtgagcgctaaccccggccgcttccacacctcggagcggatccgaggggtcctgagcgtcatcactgaggagctcccggacgtgcctctgtactacaccctggaccagctgagcagcaccatccactgcaacacaccaagcctcctgcagttgcggtcggccctcctccacgctgacttccgggtctcactctcccacgcctgtaagaacgctgtgaagacggatgcccctgcctctgccctctgggacatcatgcgttgctgggagaaggaatgtccggtgaaacgggagcgactatcagagactagcccagcgttccgcattctcagtgtggagcccaggctgcaggccaacttcaccatccgggaagatgccaaccccagctcccgacagcgaggactcaagcgcttccaggctaacccggaggccaactggggtccccggcctcgtgcccggccagggggcaaggcggccgacgaagctatggaggagagacgcaggctgcttcagaacaagcggaaggagccgccggaagatgtggcccagcgggctgcccggctcaagacatttccttgcaagaggtttaaggagggcacctgtcaacgcggggaccagtgctgctactcccacagccccccgacacccagggtttctgctgatgctgcccctgactgtccagagacctccaaccagaccccccctggacctggggctgccgctgggccaggcatagactgaaccaataaagagatgtcacgtcaccttctcccgataaaaaaaaaaaaaaaaa

SEQ ID NO: 4436 - DNA, 4069 bp, Homo Sapiens
  NM_017723
atttcctgcttggagtctcaggccccagcgtctggcacaggcaggggcctgcggagctgagggcagtggaccagctgcagggagggcgacctgtatgcggagcgccgttcctgcgacatggaccgcggccagcccagcctggagcctgctgccgcggccccccgagcctcgggccggtgcgtgatcgcgcccgtgcgcgctgtgctccgcctgcgccgccgggtgtgtgtcctacgcaaacggcgcctcctgcagccgggtggggggcccgacgtcgggaccggggcgcccaggccgggctgcagcccccgggcaccgcgcgcggacctggaccagccaaagttcttcaccttcgacagccccgcggagctaccctccaggacgccacgcaagaagcgccggcgcagccgcctggtgctttacccggagacctcgcgcaagtatcggccgcgcgtggagcacaggagccgcgcgcagcgctgccttctgctgctagtcgccatcgtgggcttccaagttctcaacgctatcgagaacctggacgataacgcgcagcgctatgacctcgacgggctggagaaagcgctgcagcgcgcggtgttcggccagcccgctgccgtatcgcgcatcgtggcgctgatgcgggactacctggccacgcatgtgcacagtcgtccgctcctcctggcgctgcacgggcccagtggcgtgggcaagagccacgtgggccgcctgctggcgcgccacttccgctcggtgctggaggacagcgcgctcgtgctgcaataccatgcgcggcaccactgccccgaggcgcgcgccgcacaggactgccgcgaggagctggcgcggcgcgtggccgacgtggtggcgcgggccgaagcggaggagaagaccccactcttggtgctggacgacgtggagctcatgccgcggccgctgctggacgagctgcacggcttcctgcagccgcagcgctcccaccacttccacaacgccatctacgtgctcctcagtggcgcgggtggcgccgaggtcacgcgcttcgtgctgcagaacgcgtcccgcgcgctgcccctgcgccccgacggcttccgcagtgccgaggccgcagcggcgcaggcggaagaagacctgcgcgccagcctgctggctgtgctgtcccgggagcatccgctgtggcaggccgcggccatcgtgccgtttctgctgctggacaagcgggatgtggtcagctgcttccgggacgagatggcgggtgagggcttctttcctgaccaggcccgcgcggagaacctggccgcgcagctcagcttctaccgcgtggctggccgcgagtttgccgtcaccggctgcaagcaggtggtggccacggtgaacctcctgtagtggaggcgcaggacgggacgtttgggttgatggcggcagtaggagggcgaccagggaccttgtgggctggtgcaggcccctgaggtttctagtgaatttgtggctgcccggctggtgggtgcggatcagcttggagctctgcttccaggtccacacccgcctcagagtccggagtctgtccctgggggcggcaggacagcagccacctccctcccaaacttgcccattgccctgctgggcgtcccaggcatggtctggtgcgttctccctgtggccccaagaggtgggttcccatggtacaaggatgatctcagggccaacaattcccggggtcacacagctgggacgtgaccccgcctcttgggggtggtcgcgtgttgctcagtgctgaagtggggttctcattccggcccccctggagatgaccccggaggaggccacagccaaccatgacagtgctggggctctggctgccttctccacccaccccacccctcactcaggtcgtgttttcaggagctcaaggctggagtgtcttgacagtaaggggaggggagcggaggcggaggcgcctcaggcagcctctccccctccttcctggaccccccaaccccgggcccgccagccctggcttgggcttactgggtgaccgagagcccgcggggcaagcgggaggtgcctaggcctctccccatccccctcttctccgcacgtgggacccttagcccgtggccagtcccctggtcaccacgattgcgcgacctccctttccctggggccttttgtgccccgagttccgcccacccgcaccctctgcgcagagcgccctccccacgccagtcgaccccacaccccacactccccacgcgccgcctcccggaagccctcctggacgcctcccgtggatgggcccaccgcgcccacgggggctttaggggaaggtgctttgggcgttttttgcgccatgtctcctcggggccggcggttgcctcgggacggttctcgcctcctcccacagccccggtgtctgggacgcacccggcagccccgctgctgccgccttgtggcgcgcccggcccagccggtggcttctgtggtcgccgggggctgagcgcgcggctgggccctgagtcccccaggccgccccgatcctctgtccccgccgccggccccgctgcagtcccaacccgggcctgcccgggaggagcgcaggggcggcgatgaccagtcccgaaaggggctcagagggcagcgaggaggtttcacgccggtgcggggcgccgtcgaggtgggggcaccgcgaaggtggaggcggggccgcgccggaagccccgagtcgagcgcacacggcgggcgcccctggcaagtgggactcctccggccccgaggcctgaactcagcccggagaccgcgcccaccagcgccggtgtccccggaggggccccgctagttccctgagcagaggtcctgcggcttcccggagggtgtcctgttctctcccccgcctcgcatccattctcgccctggtggttggtgtctgtggtcgggggcgagggccgtctagtggagacggggattcaggccgcttgaaagtctgggatctctgggcggatggcagcggctccgcggagctcgagctcggcgcgcaggtcctgggcccagggcgggagcgctagcgagagggctgccccgtcctgcccagagggtcctgaggactcccgctgctcctggagtcttggggaggggtccggctccacggggtgggggtgggggctaccaggaaacctttgcctcctggggctgtgcaggaccggctagccagcgctgggaaccagggctgagttcagcccagctctgtccaccccaaccccagggctaggggaaggagctgggagaaggagccccacctctcccaggcgagtatctgtcccaggagcccacacagagggacacccagctctggtctggccttcgtgttggcttcaaggtggtaacagagagagctgcagagtgggggtgtgtttgccagtccctgcatgggtgaatgttggggtgcccactgctccccaggcaggacccccaggactgtcagctccccttcccacagagcacccacctggaggtgtcacctgccggcaagcgtgggccattcatccacctgtcagtcaacaacacccgctgagcatcggcttgtatcaaaaggtccagacctaaggggaaattttatctctttctttctttctttcttttttttttgacacagagttttgctcttgttgcccaggctggagtgcaatgacacgatctcggttcactgcaacctctgcctcctgggttcaagcgattctcctgcctcagcctcccgagtagctgggattacaggcgcccgccatcacgcccgggtaatttttttgtattgttggtagagacggtgattcactatgttggccaggctagtcacgaactcctgacctcgtgatccgcccacctcggcctcccaaagtgctgggattacaggtgtgagccaccgtgcccggcctctttttatttattcctaaaatattaccttgaggccaaattctgcgcttaaggagaatgtgcaccaagtgctggggtgggggctggtaataaacgaggccacaaatcatgcttgttaataaattgtgtggttcaaatctga

SEQ ID NO: 4437 - DNA, 2863 bp, Homo Sapiens
  NM_017724
gtcgtcgaccctgtggccccgcccatccttcgcctcctcagtcggccgctcaggctgcggctcctcccggggccggttcccgctgtctcagccgcggcgcagagggcacatcggcctgaccgactagccggctgccagtgccgggagccgccgcgtccatccccgcccgcctggccggggacccaggactgagtcgtccagctgcgcccctcgcccatagccccagcgggcgccgggcgggcgagcagctcttcggcccttcccggacagcgacgcagtcgcagcgcgcgccctaacacagatgtgggaagataaatgaaggggtctagatgtaaatgtcagtggaaaggagagctaccatcactaagggctgaaaacacagttaaatcactttcaaagttaaaagactattaagaacacaagatggggactcctgcttctggaaggaaaagaacacctgtgaaagaccgattttctgcagaagatgaagctttgagtaacattgccagagaggcagaggcaaggctggcagcaaaacgggctgcccgggcagaagcaagagatatacgcatgagagaactggaacgacaacaaaaagagttggatgaaaaatctgacaaacagtatgctgaaaattatacaagaccttcatctcgaaattctgcctcagcaacaacccctctaagtggaaactcatccagacgaggaagtggggacaccagcagcttaatagatccagacacttcattaagtgaattgcgggaatctttgtctgaagtggaagaaaaatacaagaaagccatggtttccaatgcacagttagacaatgagaagaacaatttgatctaccaagtagacacactcaaggatgttattgaagagcaggaggaacagatggcagaattttatagagaaaatgaagaaaaatcaaaggagttagaaaggcagaaacatatgtgtagtgtgctgcagcataagatggaagaacttaaagaaggcctgcggcaaagagatgagcttattgagaaacatggcttagttataatccccgatggcactcccaatggtgatgtcagtcatgaaccagtggctggagccatcactgttgtgtctcaggaagctgctcaggtcttggagtcagcaggagaagggccattagatgtaaggctacgaaaacttgctggagagaaggaagaactactgtcacagattagaaaactgaagcttcagttagaggaggaacgacagaaatgctccaggaatgatggcacagtgggtgacctggcaggactgcagaatggctcagacttgcagttcatcgaaatgcagagagatgccaatagacaaattagcgaatacaaatttaagctttcaaaagcagaacaggatataactaccttggagcaaagtattagccggcttgagggacaggttctgagatataaaactgctgctgagaatgctgagaaagttgaagatgaattgaaagcagaaaaacggaagctacaacgagagttacgaacagcactggacaagattgaggagatggagatgaccaacagccacctggccaagcggctggagaagatgaaggccaataggacagcacttctggcccagcagtaggaaaaccacccttcaacctgggtgatgctccttggggccctacctagagggactgacttttgtccattgacacaaaccccttttagtactgttttgagttttgtcattaaaacagccacctttgtattttataatttatgacagaatgaagtcattttgaatctacatgaatgaacactttggattttgttgtagtttgattctagggtagaaccagtccatgctgtttttattttttatctccgtaattgtagaatcatgtttactcaacgtttttccccagctgcctcagtaactgggcactcggaggccttggcacgggttctggaggacagacagcaattctatgagtgctcactgagatacttgctggagacctcagaaaacacaagtgccttctccacggtgcaattcagacttcagtgatctccagtggtcaaaagacatttacccttaatatcagacaacatttatattttagtgaagaaacaagttctcgggtggggaatctatgtttcactcagatttatatgtttggaggaaaaaagcctttttttgtaaaatatttaaatttatataagaaaatgttagaaaaaaatatggggagtgtatataaaacttgctttattgcatggggcaggggaagtccaggcctaatactcctaaagtaagagttgggtcctttttttcttcaatacaactgtgctgtaccttgtaaagtattttatctgctgcttatttgtggaatgaaacctcaaacaaacccaaagggggagggtagggcagggcaggcagattggaaatctgcctgcagattctattaaatacacccttttgccaaccacaattggctactgacatgttcattttgttataggagactttaaaacaaatcatggcaaccacatccctcttcttttgtctccttctcaaggaaaaacaatctggaatgtagaacttttaaagacttgagtttcacctttagaggtaccctgtccaagaggtttttttaaaatcatggagtgcaactactttgcagaatttatgattctcttttgctcttagtacccaggtggttttatagaaatgattattgtatctttaaagtgcttacacagaaaatatattgggggaaaatctagtgactaaaggcacataagataataaaactagactttaaaaaggtaactcaaaagtgaataaaatctctaatatttgttcctttaaaaaaaaaaaa

SEQ ID NO: 4438 - DNA, 3064 bp, Homo Sapiens
  NM_017727
gggcgccgggcgccgggcgcgcggtcctgcgaggagacgtggcagagtgcggcgcgctcgcgccggaccggaaagccggggaagtggccgaggagggagggctgcgagccatggcgaccaagacggcgggcgtggggcggtgggaggtagtgaagaagggtcggcggcctggggtcggcgccggcgccggcggccgaggaggcggcaggaaccgcagggcgctcggggaagcaaacggagtgtggaaatacgacctgacccctgcaatccagaccacaagcaccctttatgagcggggctttgagaatatcatgaagcggcagaataaggagcaggtcccaccccctgctgtggaacctaagaaaccagggaacaagaagcagccaaagaaggtggcaactcctcccaaccaaaaccagaagcagggccgcttccgcagcctggaggaagcactgaaagctctggatgtggcagacctgcagaaggaactggacaagagccagagtgtgttctctggaaacccatccatatggttgaaggacctggccagctatctcaactacaagctacaagctcctctaagtgaacccacgctgagccagcatactcatgattatccctacagcctggtgagccgggagctacgtgggatcatccgagggctgctggcgaaggcagcagggtctctggagctcttttttgaccactgtctgttcaccatgttgcaagagctggataagacaccaggggagtcactacatggttaccgcatctgtatccaggccatcctgcaagacaagcccaagattgccacggcaaacctaggcaagttcctggaactgctgaggtcccaccagagccgaccagcaaagtgtctcaccatcatgtgggccctgggtcaagcaggttttgccaacctcaccgagggactgaaagtgtggctggggatcatgctgcctgtgctgggcatcaagtctctgtctccctttgccatcacatacctggatcggctgctcctgatgcatcccaaccttaccaagggcttcggcatgattggccccaaggacttcttcccacttctggactttgcctatatgccgaacaactccctgacacccagcctgcaggagcagctgtgtcagctctacccccgactgaaagtgctggcatttggagcaaagccggattccaccctgcatacctacttcccttctttcctgtccagagccacccctagctgtccccctgagatgaagaaagagctcctgagcagcctgactgagtgcctgacggtggaccccctcagtgccagcgtctggaggcagctgtaccctaagcacctgtcacagtccagccttctgctggagcacttgctcagctcctgggagcagattcccaagaaggtacagaagtctttgcaagaaaccattcagtccctcaagcttaccaaccaggagctgctgaggaagggtagcagtaacaaccaggatgtcgtcacctgtgacatggcctgcaagggcctgttgcagcaggttcagggtcctcggctgccctggacgcggctcctcctgttgctgctggtcttcgctgtaggcttcctgtgccatgacctccggtcacacagctccttccaggcctcccttactggccggttgcttcgatcatctggcttcttacctgctagccaacaagcgtgtgccaagctctactcctacagtctgcaaggctacagctggctgggggagacactgccgctctggggctcccacctgctcaccgtggtgcggcccagcttgcagctggcctgggctcacaccaatgccacagtcagcttcctttctgcccactgtgcctctcaccttgcgtggtttggtgacagtctcaccagtctctctcagaggctacagatccagctccccgattccgtgaatcagctactccgctatctgagagagctgcccctgcttttccaccagaatgtgctgctgccactgtggcacctcttgcttgaggccctggcctgggcccaggagcactgccatgaggcatgcagaggtgaggtgacctgggactgcatgaagacacagctcagtgaggctgtccactggacctggctttgcctacaggacattacagtggctttcttggactgggcacttgccctgatatcccagcagtaggccctgccttcctggccactgatttctgcatgggtagaccatccaagactgcagcgggtagaaggtggcagttcttcatgggagtctttttaacttggtgcctgagttctctcctaggcaagtggccagttgcctccacctcagttcttccatctttggtggggacagggcccagcagcatctcagcctcctacccacaattccactgaacacttttctggccctactgcacatggcccccagcctccatccttgtgctggtagcctctcacaactccgcccttgccctctgccttccacttccttccatctcatttctaaaccccaaacagctcatctctaaaaagatagaactcccagcaggtggcttctgtgttcttctgacaaatgattcctgcttctccagactttagcagcctcctgttcccattcttggtcacagctctagccacagcagaaggaaaggggcttccagaagaatatagcaccgcattgggaaacagcagcctcacctccacctgaagcctgggtgtggctgtcagtggacatggggagctggatggaaatgcctctcacttcaaaatgcccagcctgccccaaatgcctctaagcccctccctgtcccctcccttgtagtcctacttcttccaactttccattccccatcatgctgggggtcttggtcacaaggctcagcttctctccactgtccatccctcctatcatctgtagagcagagcacaggcagttgtgtgccttgggcccagggaaccctccatcaacctgagacaggactcagtatatggttcttgggtatgccctaccaggtggaataaaggacacagatttgatttctagcaaaaaaaaaaaaaaaaaaaaaaaaa

SEQ ID NO: 4439 - DNA, 3331 bp, Homo Sapiens
  NM_017730
attggctgtgagggttgaatgtaagatggcgcccagggagctgtgaggagaaaaccctgtcggtcttggagcgacgacggcagaaccagggtccctggcggtgcggcggggccggcgggtgcagcggaggcggcggcggcggcggcagtgacgtcgccggaatattagaagtcttaagaactcaggacaagcagcagaaatacatgcaacatggtgactggaaccctaaggactctgcaatatgaataattccctagagaacaccatctcctttgaagagtacatccgagtaaaggcacggtctgtcccgcaacacaggatgaaggaatttctggactcactggcctctaaggggccagaagcccttcaggagttccagcagacagccaccactaccatggtgtaccaacagggtgggaactgcatatacacagacagcactgaagtggctgggtctttgcttgaacttgcctgtccagtcaccaccagtgttcagccacaaacccagcaagaacagcagatccaggttcagcagccgcagcaggttcaggtccaggtgcaggtacagcagtctccgcaacaggtctcggctcagctctccccacaactcaccgttcaccagcctactgagcaacccatccaggtccaggtgcagatccaaggccaggcaccacagtcagcagccccctccattcagaccccgtctctgcagagtcccagtccctcgcagctgcaagcagctcagatccaggtgcagcacgtgcaagcagcccagcagatccaggctgcagaaatcccggaggagcacatcccacatcagcaaatccaggctcagctggtggctggccagtctcttgctggtggtcagcagatccaaatccagaccgtgggtgccctttccccaccaccatcccagcagggctcaccccgggaaggggagcggcgggttggcacggccagtgtcctccaaccagtgaagaagcgcaaagtggacatgcccatcactgtgtcctacgccatctcagggcagccggtggccaccgtgctggccattccacagggccagcagcagagttatgtgtctttgaggccagacttactgacagtagacagtgcccacctgtacagtgccactgggaccattactagccctacaggagaaacctggaccatccctgtttattctgcccagccccggggggaccctcagcagcagagcattacccacattgccattccccaggaagcctacaacgcagttcacgtcagtggctcacccacagccctggcagctgttaagctggaggatgacaaggagaagatggtgggcaccacatctgtagtgaaaaactcccatgaagaggtagtgcagacccttgcaaactctctctttccagcacagttcatgaatggcaacatccacattccagtggctgtgcaggctgtggcaggcacgtaccagaatacggctcaaactgtccatatatgggacccccaacagcagccgcagcagcaaactccccaggaacagacaccaccaccacagcagcagcagcagcaactccaagttacttgttcagctcaaactgtccaggttgctgaagttgaaccacagtcacagccacagccttccccagaacttctgcttccaaattctttgaagccagaagaagggcttgaagtatggaaaaactgggcccagaccaagaatgctgaactagagaaggatgctcagaacagattggcacccattgggaggcgccaactgctgcgattccaggaagatctcatctcctctgctgtggcagagttgaattatgggctctgtctaatgacacgggaagctcgaaatggagaaggtgaaccctatgacccagatgtgctctactatattttcctgtgtattcaaaagtatctttttgaaaatggaagggtagatgacattttctccgatctttattatgttcggttcacggagtggctacatgaagttctgaaggatgttcagccccgggtcactccacttggctatgtcttgcccagccacgtgactgaggagatgctatgggagtgcaagcagcttggggctcactccccctccaccttgctgaccaccctcatgttctttaataccaagtacttcctattgaagacagtggaccagcacatgaagctggccttctccaaggtcttgcgacagacaaagaagaacccctctaatcccaaggataaaagcacgagtatccggtacttgaaggcccttggaatacaccagactggccagaaagttacagatgacatgtatgcagaacagacggaaaatccagagaatccattgagatgtcccatcaagctctatgatttctacctcttcaaatgcccccagagtgtgaaaggccggaatgacaccttttacctgacacctgagccagtggtggcccccaacagcccaatctggtactcagtccagcctatcagcagagagcagatgggacaaatgctgacgcggatcctggtgataagagaaattcaggaggccatcgcagtggccaatgcaagcactatgcactgagatgccttggccatggcacaagagaaaccagccaggaaaaaccagacagactttcacactaaagaagaggcctccatttttttttttcttttttttattggtgtagttacgaagcctttcaggctgcttctgtttaaaatataaaagaaaactttgccccctttgcatcttcataaacctgctgcggcagactcctcagccgatggtggctctgggtttccttgagtgtcatatgtcctagaaagttgctggctgactcttttttgtctggggcctggggaaagggcttggactgtgaaaagaaatgtggcccctttccatcttcaagagagatggaattaatgatggatggaccctggagggaatctccccagccgacttccactgggctgacagactttgctgaccacaggggaacgatgttcttttctttcttcatgatcagacataaacttagcatcttaatggaagaaaaatgaggggaacttcaattatgatttattaaagacaatttctattacaccctcctttatgacaagtgacattttagatgtaaaagtaaaaactttaccatgccttttttttttttgttggcctaacattgaggccttaaaacctgaggctcctgtgcctgatggaattcttgtaacatacacttgtgtatcatataaagataccactctgtttctcttatgtattcttactctagttgtttattaagaatgacaagcacgtcttttcaaaaaaaaaaaaaaaaaa

SEQ ID NO: 4440 - DNA, 2841 bp, Homo Sapiens
  NM_017732
agagggcgtcttcacgcaggcaccgagaagctcccactagtgtatgccttaatggtgccgctcttgtccgcgtctacgcttgggaccttggcttctgacttggagagtgtacagctctgcccgacggcaacccagcttgggaagagaagccccagcgtgggctggggctcaaggcgcaggaaggccgagcccggcgcggacgcaggcggctccgggcgggctcagcacccccaggcaccgtctcctagtgaccgcggcgctcgcgggcctggcggccgttgtccgggcgactgcgcagcgcgggcacccccgcggcccctcccctgggcgcgcgcgcgacctgggtgccatggcggcagcggcggtgacaggccagcggcctgagaccgcggcggccgaggaggcctcgaggccgcagtgggcgccgccagaccactgccaggctcaggcggcggccgggctgggcgacggcgaggacgcaccggtgcgtccgctgtgcaagccccgcggcatctgctcgcgcgcctacttcctggtgctgatggtgttcgtgcacctgtacctgggtaacgtgctggcgctgctgctcttcgtgcactacagcaacggcgacgaaagcagcgatcccgggccccaacaccgtgcccagggccccgggcccgagcccaccttaggtcccctcacccggctggagggcatcaaggtggggcacgagcgtaaggtccagctggtcaccgacagggatcacttcatccgaaccctcagcctcaagccgctgctcttcgaaatccccggcttcctgactgatgaagagtgtcggctcatcatccatctggcgcagatgaaggggttacagcgcagccagatcctgcctactgaagagtatgaagaggcaatgagcactatgcaggtcagccagctggacctcttccggctgctggaccagaaccgtgatgggcaccttcagctccgtgaggttctggcccagactcgcctgggaaatggatggtggatgactccagagagcattcaggagatgtacgccgcgatcaaggctgaccctgatggtgacggagtgctgagtctgcaggagttctccaacatggaccttcgggacttccacaagtacatgaggagccacaaggcagagtccagtgagctggtgcggaacagccaccatacctggctctaccagggtgagggtgcccaccacatcatgcgtgccatccgccagagggtgctgcgcctcactcgcctgtcgcctgagatcgtggagctcagcgagccgctgcaggttgttcgatatggtgaggggggccactaccatgcccacgtggacagtgggcctgtgtacccagagaccatctgctcccataccaagctggtagccaacgagtctgtacccttcgagacctcctgccggcaagtatctcccaactgggggctgccttcaatcctcagaccaggaacacccatgacacaggcacagccctgcactgtgggcgtgccccttggcatggggccaggagatcactgggttatcccggttagtgatgccctcacctctccccacaagttgtttacccaatggctggaaaggggtggctactggtcatcgtgaccactggagtcaacacagactgatgtacccacagacaccaaaacttgccccctgagttctgaagcaaggggcaaggctgggcccctagcttgtcctgcccattcctccaggtgttgatcttgattccacttagagaagctgaagctgtgcctccctcccctgtcaagccagttctttcctcttcaggtggctgttctggcccagccccttcccatccccaaggagcccttcagcgcgccctgttgcttctgctagcctacctttccctgccaggcccttgctcagggccatggcatttaactaagtgcacctgtgatcttggccaaaaaaccattgcaactcacagtaagagactgggtttcggggaaggaggggctagggacattttggcactggcctgccctattgtctcccatcctagtctgtcctggtccctggcaacaggaacctgggcagcttatcctgcccacaggtaagcccctgggagcatccacaactggggacctgctcagtgccccccctgccttacagctacatgacagtgctgttttatttgaacaacgtcactggtgggggcgagactgttttccctgtagcagataacagaacctacgatgaaatgagtctgattcaggatgacgtggacctccgtgacacacggaggcactgtgacaagggaaacctgcgtgtcaagccccaacagggcacagcagtcttctggtacaactacctgcctgatgggcaaggttgggtgggtgacgtagacgactactcgctgcacgggggctgcctggtcacgcgcggcaccaagtggattgccaacaactggattaatgtggaccccagccgagcgcggcaagcgctgttccaacaggagatggcccgccttgcccgagaagggggcaccgactcacagcccgagtgggctctggaccgggcctaccgcgatgcgcgcgtggaactctgagggaagagttagccccggttcccagccgcgggtcgccagttgcccaagatcaggggtccggctgtccttctgtcctgctgcagactaaaggtctggccaatgtcttgccccaccccgccagccgcgatacggcgcagttcctatattcatgttatttattgtgtactgactccatctgccccgtcaaataaaaaaccacaaggttcgagccgccgggcccgacaaactccgggtcggcgaaaaaaaaaaaaaa

SEQ ID NO: 4441 - DNA, 2953 bp, Homo Sapiens
  NM_017735
cccaacaggctccttactcaagctcgggttcttctcctaggcggaagccagaccagagagcgtgcgtgtttttcccagggtgccccgcgctgctgttatggccgcctccttgaggtagtatccgcacatggaattctagggccgcaggtgtatttacggtaactgtcgccactagatttcagcgcctttggactctcctgttttcactttcttttgttgactcccgtgtggccctcgtgggagcctgttttggctgcagcggtgtctggggtgatgtggaccccggagctggcaattctgaggggattccccactgaggctgagcggcagcaatggaaacaggagggggtcgtcggttcagagagtggatctttcctacaattgctgctggaagggaactatgaagccatattcttaaattcaatgactcaaaatatttttaattcaacaacaaccgctgaagaaaagattgatagctacctggagaagcaggtagtaacattcctggattactcaacagatttggacacaacggaaagacaacagttgatatttctacttggtgtgagcagtttgcaactttttgttcagagcaactggacggggccccctgttgacttacaccctcaggactttttgtcatctgttttgttccagcaattcagtgaggttaaaggactggatgcatttgttctgagcctgctcactctagatggtgaatcaatctacagcctgacctcgaagcctatactactgttattagcacgcattatcctagtgaatgtaagacataaactgacagctattcagagcttgccatggtggactttgagatgtgtgaatattcatcagcatttgcttgaggaacgctcacctctgctttttactcttgccgaaaactgtattgatcaagtgatgaaactacagaatctgtttgtagatgattcaggtcgatatttggctattcaattccatctggaatgtgcatatgtgtttttatattattatgagtacagaaaagcaaaagatcagttggatattgctaaggacatcagccaattacaaattgatttgacaggtgctttgggaaaaagaacacggttccaggaaaattatgtggcacaactgattctagatgtaagaagggaaggggatgtcctttcaaattgtgaattcactccagcacccactcctcaggaacatttaaccaagaatcttgagctcaatgatgacaccattctgaatgacataaagttagcagattgtgaacagttccagatgccggatctgtgtgctgaagagatcgctattattcttggaatctgcactaattttcaaaagaataacccagtgcacacattaactgaagtggagcttctggcatttacatcatgtttgctttcacaaccaaagttctgggccattcagacatcagccttgatcctccggacaaaacttgagaaaggaagtactcgccgagtggaacgggcaatgaggcagacacaggctcttgcagaccaatttgaagataaaactacatctgtattggaacgcctgaagattttctattgctgtcaagtaccacctcactgggccattcagcgccaacttgcaagtttgctctttgagttgggatgtaccagttcagcccttcagatatttgaaaagctagaaatgtgggaagatgttgtcatttgttatgaaagagccgggcagcacggaaaggcagaagaaatccttagacaagagctggagaaaaaagaaacgcctagtttatactgcttgcttggagatgtcctcggagaccattcttgctatgacaaggcctgggagttgtcccggtaccgcagtgctcgtgctcagcgctccaaagccctccttcatcttcggaacaaggagtttcaagagtgtgtagagtgcttcgaacgctcggttaagattaatcccatgcagctcggggtgtggttttctctcggttgtgcctatttggccttggaagactatcaaggttcagcaaaggcatttcagcgctgtgtgactctagaacccgataatgctgaagcttggaacaatttgtcaacttcctatatccgattaaaacaaaaagtaaaagcttttagaactttacaagaagctctcaagtgtaactatgaacactggcagatttgggaaaactacatcctcaccagcactgacgttggggaattttcagaagccattaaagcttatcaccggctcttggacttacgtgacaaatacaaagatgttcaggtccttaaaattctagtcagggcagtgattgatgggatgactgatcgaagtggagatgttgcaactggcctcaaaggaaagctgcaggagttatttggcagagtgacttcaagagtgacaaatgatggagaaatctggaggctgtatgcccacgtatatggaaatgggcagagtgaaaagcctgatgaaaatgaaaaggcattccagtgcctctcaaaggcatacaagtgtgacacccagtccaattgttgggagaaagatattacatcatttaaggaagttgttcaaagagccttaggacttgcacatgtggccataaaatgcagtaaaaacaaatccagttcccaagaagctgtacaaatgctttcttctgttcgactcaatttacggggcttgttatctaaagcaaagcaactttttacagatgtggcaactggagaaatgtccagggaattagctgatgacataacagctatggacaccttagtgacagagctccaagacctaagcaaccagtttcgaaatcagtattgattctgctggaagcagattctggaaaaggtgctttcacctgctggtaaaagatacatctgtatatctgaaatgcaagatattgatttttaaaataaatttgttttatgacttaaaaaaaaaaaaaaaaaaaaaaaaaaaaaaaaaaaaa

SEQ ID NO: 4442 - DNA, 4416 bp, Homo Sapiens
  NM_017736
gcagcacggaatgaggcttcgaggccggctaggggaggccgtcgctcatatccgacgtcaccagttcgcgccggcggtagacgaggacgccaacagcagcggagaaacgtttctctttcctctcagtttgcgcacaccatggcggcccctgcccagcagactactcagcctggcggcgggaagcgcaaaggcaaggctcagtatgtgctggccaagcgcgctcggcgctgcgacgctggcgggccccgtcagctagagcccgggctacagggcatcctcatcacctgcaatatgaacgagcgcaagtgcgtggaggaggcctacagcctcctcaacgaatacggcgacgacatgtatgggccagaaaagtttacagacaaggatcagcagccctctggaagtgagggagaggatgatgatgcggaggctgccttgaagaaagaagttggtgacattaaggcatctacagagatgaggttaagaagattccagtcagtggaaagtggagcaaataacgttgtcttcatcaggacacttgggatagagcctgagaaattggtgcatcatattctccaggatatgtacaaaaccaagaaaaagaagactcgagttattttgcgaatgttacccatctcaggcacatgcaaggcttttttagaagatatgaaaaaatatgcagaaacatttttggaaccctggtttaaagctccaaacaaagggacatttcagattgtgtacaaatctcgaaataacagtcatgtgaatagagaagaagttatcagagaattggcaggaatagtgtgcaccctcaattcagaaaataaagtggatctcaccaatccacagtacacagtggtagtagaaatcatcaaagctgtctgttgcctgagtgttgtgaaagattacatgttgtttagaaaatacaatctccaggaggtggtgaagagccctaaggatccgtcacagcttaactcaaagcagggaaatgggaaagaagctaaactggaatctgcggacaaatcagaccaaaacaacacagcagaaggaaaaaataaccagcaggtaccagagaatactgaggagctggggcagacaaaaccaacgtctaatccacaggtggtaaatgagggaggagccaaacctgaacttgcaagtcaagccacagaaggatccaagtcaaatgaaaatgacttctcataggaagtcatttggtgttggaggtgggtttctcacctggggctctacgagatgttgctggggctccaccttaaattgtgactaaaaacagttttttatttgtgtgctgcattatgctgttctcacagtagtgagcaatgattgcgcagccctgttaacagtttttttagggatctttcagcctttatggtattacgtagaggcagacccatgtgctgctgttgcaaagaggggaggataggagggggatgttggcctctcccaggctcctcttctgcagtgccagctgacttaagggagtgaactacctgtgaagtagaaaatcagagggaagttttcattctaaggaaggagtttttacatgccacagctcagctgtctgcctgccactttgttgtaaacattgcaaaaatgtggatcatgtaggttagaagtgaattgtttagtgaagtttttgtacttttgtgattttcttgtttatgtctgttttttttttttttttttaacatttgtgtgtaatatagctgacagtccagtgtcgcaattttggaaggcaagatgtgagagagacgagaaccattttaggcatagaactacagacatttctgaaaaggttggtgatgaagaacttcagtcttctgagtatacttcagtatactagtgcaacaagggacacaaagaaattctgtcttaataaagaaagctacttctcaagggtattatgtggactcagtccaagctctcctgtcccattgtgcattgtctgtgacatgcaacttacaaaactagcaattgtaacaataaatcacagccacttgacaagaaaggatattcattattttcaaatggcttttggactatcaaaaacagtaaggcttttgttcagaaatcacctttagtcaaaaggtttaagaagcaaattatttagtagcagaacttatctcaggaaaggaaaatatgcatggttggtgagaatctaataacattaaaatgctggggcaagatgcagtacaaagttgaagagactttattctcaataagttgatttactgatgatatgtcatatgatgcaaaaaaggttttgtgtcattaactgaaaagtagcagcttctctatccaggatgatgagtcaacaggtttcactaatatttgtcatgctgtagcatttgtaagatttgtaaatgatgaaattcaaagaaaactttttctattgctaggagcctgccagaacaaaggccaatatataatgttgtgacatcatatctgataaccagaggtctggtatctacactcctggtgccccatcagtggttgtctccataagtcattttgcgttattaaaaaaaaaaaaagaaatcctgatgttgacattatagcacactgctttctccacagagatgctgatatcaaaaacttgaagatacagtgaagttctgaataatgttacaaaactggttacctgtatcaaagacccatttatgcaaaaatgttaaaaaaaaaaaaaaacacccaaaacaaaaacctggacagacagcacataaacctcctgcaccatacagacatccagtggcttctcagaggaagcgttctctacaggatatttgaattgaaaggtgaattgccagagtacttacaataaaacagccagcttttgctgagtgctttggaaatgaaaaatgactacagaaagtagcctattttgcagacgtttttcatcacatgaacaaatggacaagtctctgaaaggttctggggaaaaaaatttttcttaaagcgacaagactcttagatctaaaaggaaactgacttgccaccttgccagaggaattcttgaaatgtttctgcagccacttggccttgaaaataaagggtgcaactctcaaatcttgttctaacccggctggaggaaccacaagacccaatgaaatagcattttctctccttttcccagcactagtatataacctatgaggaacccttgtctctgaatctgctcagcttgaaattttgtctctgaaggaagagaatgaactcagccctagtctgacagtcctagatttctgtgaaataagagtattcttcaacttagtgctcacactcacataccatgagggttctctgcaggggtttaggggtttcctgaatttgaaagttttttcaaggcctctttttgggtaaaacaattgaaaaggcagacaccaacaaagtctgcaaaattaactgtccagattaagaatattaaggagctgtaaaattagcttgtagaaatggacttatccttaagttttaaaaagttaggaaatcctaaaaatgttaggcttcctgcacaagtggctatgttcatttaatggctagtgaacatgggaatgtatttttatcctcctagctggtggttctgtttggtaaaccagactagaatgatttgagaggggcaaagagaataggcaggaccttccttctatagctttacatatttagaatgttaatacttaatgacattgaagttaccttgcaatgattgataagaggattattaatatcagttaggggaatagggaggataggattttggtgccttcttcagcagacttgctccaagacaaagattctattttgatagtgcaagacaaaaggactcggaagaaaattggccatatgcctacagagcatacaactctgtggaactaaattgtttttactttgtgaaagctgctattttacggaaagattttgattatacagtttgtttttaaattgtcttttatatttatttgtatttggtaagaatcggttgttacacaagctgttctttcccagttacaaaatcctgtgttcggttgtaacctgaactcattaaaagacttgttttcaggtttatcaactgtttattttcactgacatttgagcatgttattttataaatgacgggattccagggtaggaagtgctttttattccccttttgttttttcttttaaaaaattacgtcagttaaaaaaataaaaaaactgcagtcttatggtttagaaaacttgtttagctccatagaggaaagaatgttaaactttgtattttaaaacatgattctctgaggttaaacttggttttcaaatgttatttttacttgtattttgcttttggtacggccagaaatcgagcttgttttttcatagttcctgatattttcagaaaaatcaaaataaatttgttccctaaaaa

SEQ ID NO: 4443 - DNA, 2753 bp, Homo Sapiens
  NM_017739
gggccaggccggggcggggccgcaagcggcatggaggaggcggaggccgcggcgagccgggccgagcagtgagggccctagcggggcccgagcggggcccggggcccctaagccattcctgaagtcatgggctggccaggacattggtgacccgccaatccggtatggacgactggaagcccagccccctcatcaagccctttggggctcggaagaagcggagctggtaccttacctggaagtataaactgacaaaccagcgggccctgcggagattctgtcagacaggggccgtgcttttcctgctggtgactgtcattgtcaatatcaagttgatcctggacactcggcgagccatcagtgaagccaatgaagacccagagccagagcaagactatgatgaggccctaggccgcctggagcccccacggcgcagaggcagtggtccccggcgggtcctggacgtagaggtgtattcaagtcgcagcaaagtatatgtggcagtggatggcaccacggtgctggaggatgaggcccgggagcagggccggggcatccatgtcattgtcctcaaccaggccacgggccacgtgatggcaaaacgtgtgtttgacacgtactcacctcatgaggatgaggccatggtgctattcctcaacatggtagcgcccggccgagtgctcatctgcactgtcaaggatgagggctccttccacctcaaggacacagccaaggctctgctgaggagcctgggcagccaggctggccctgccctgggctggagggacacatgggccttcgtgggacgaaaaggaggtcctgtcttcggggagaaacattctaaatcacctgccctctcttcctggggggacccagtcctgctgaagacagatgtgccattgagctcagcagaagaggcagagtgccactgggcagacacagagctgaaccgtcgccgccggcgcttctgcagcaaagttgagggctatggaagtgtatgcagctgcaaggaccccacacccatcgagttcagccctgacccactcccagacaacaaggtcctcaatgtgcctgtggctgtcattgcagggaaccgacccaattacctgtacaggatgctgcgctctctgctttcagcccagggggtgtctcctcagatgataacagttttcattgacggctactatgaggaacccatggatgtggtggcactgtttggtctgaggggcatccagcatactcccatcagcatcaagaatgcccgcgtgtctcagcactacaaggccagcctcactgccactttcaacctgtttccggaggccaagtttgctgtggttctggaagaggacctggacattgctgtggattttttcagtttcctgagccaatccatccacctactggaggaggatgacagcctgtactgcatctctgcctggaatgaccaggggtatgaacacacggctgaggacccagcactactgtaccgtgtggagaccatgcctgggctgggctgggtgctcaggaggtccttgtacaaggaggagcttgagcccaagtggcctacaccggaaaagctctgggattgggacatgtggatgcggatgcctgaacaacgccggggccgagagtgcatcatccctgacgtttcccgatcctaccactttggcatcgtcggcctcaacatgaatggctactttcacgaggcctacttcaagaagcacaagttcaacacggttccaggtgtccagctcaggaatgtggacagtctgaagaaagaagcttatgaagtggaagttcacaggctgctcagtgaggctgaggttctggaccacagcaagaacccttgtgaagactctttcctgccagacacagagggccacacctacgtggcctttattcgaatggagaaagatgatgacttcaccacctggacccagcttgccaagtgcctccatatctgggacctggatgtgcgtggcaaccatcggggcctgtggagattgtttcggaagaagaaccacttcctggtggtgggggtcccggcttccccctactcagtgaagaagccaccctcagtcaccccaattttcctggagccacccccaaaggaggagggagccccaggagccccagaacagacatgagacctcctccaggaccctgcggggctgggtactgtgtacccccaggctggctagcccttccctccatcctgtaggattttgtagatgctggtaggggctggggctaccttgtttttaacatgagacttaattactaactccaaggggagggttcccctgctccaacaccccgttcctgagttaaaagtctatttatttacttccttgttggagaagggcaggagagtacctgggaatcattacgatccctagcagctcatcctgccctttgaataccctcactttccaggcctggctcagaatctaacctatttattgactgtcctgagggccttgaaaacaggccgaacctggagggcctggatttctttttgggctggaatgctgccctgagggtggggctggctcttactcaggaaactgctgtgcccaacccatggacaggcccagctggggcccacatgctgacacagactcactcagagacccttagacactggaccaggcctcctctcagccttctctttgtccagatttccaaagctggataagttggtcattgattaaaaaaggagaagccctctggggaaaaaaaaaaaaaaaaaa

SEQ ID NO: 4444 - DNA, 4548 bp, Homo Sapiens
  NM_017741
cggaagtagcgtcggcgcgggagctgagcggagtggccttgccaccggaggggaagggctgctggcgttaggcctggctgggtcgtgcggctgagcgtgaggctagaaagaaaaagcgatcctccaagagtgagaacgggagatctgccgaggataacaacctcccttgtggccgaagggcgggggatccccacacgagggctccgcttcgagagacggcgacaaaggaaagttcgtagcgcgttccggaggcccggccacctctgagaagggagacgacgctgctgggtccgctgagcggggcgacccgagcttatatagaattggtgataggatcacaacttctgaggtcccagcaagagtcctaacatctagcagctctaccaccaggacaggccccctaaaactaattccaacaagcacctctgaagtcttctcattcacaggttaaggctacctttccagataatccaacagctaaatcaccagtttccaagggcatttgcatcacctatggaaagcatcggatccttatacaccagatgttcttgacagctcatcccgtcattcccccctgcacaaaagttgctataccagcggacaagcaagacaactactgagcttcttttgattgtcaagtagatataatatcactgccagcaaaacagcacaaaaagtgtctcttcacagtatcactaccagttgggactatgctaagtaaatcagcttgcctagatgaggaccccttctattcttgggtagccaggatttgaaggagatactctgacctgtgccagtggtaagtgactaatacttttacacactgaactggtcctggaaactgagatgtcttctttgtaagtgaagaatatacaacataatcttgaagaacggcacagtggtatgggccacaagcatactttatgtgtgtaacggactgaaagacaaattaatcttggtgaaaggatttttcatctcttatttctatttgccagtgttagtcagtgttctgctggcttagattattacctttttctggttccttactgtgttttattctgatgggtcctagaaatccctctcctgaccacttgtcagaatcagaaagtgaggaagaagaaaatattagttacctaaatgagagttctggggaagagtgggattcctctgaagaagaggactctatggtgcccaacttatcgcctcttgagagtcttgcctggcaggttaagtgccttttaaaatattccacaacttggaaacctttaaatcctaattcctggttgtatcatgctaaactgttggatccaagcacaccagtccatatacttcgagagataggtctaagactctcccattgttcccattgtgtccccaaactggaaccaattcctgaatggccccctctggcctcttgtggagtcccaccttttcaaaagcctcttacaagtcccagccggctctctagagatcatgccactctaaatggagcactgcaatttgccaccaaacagctaagccgaacattgagtagagccactcccatacctgaatacctaaaacagatccctaattcatgtgtttctgggtgttgctgtggctggctgactaaaacagttaaggaaacaactcgtactgaacccatcaacactacttattcttacactgacttccaaaaggcagttaacaaactcctaactgcatcactgtaaagatctaccatttgctctgatatctctgatgttgctaattgagaaagtggtacaaagttagtcattacacagcccactaatgccttctcagtcaaactctcttatgccctggcaagccaatgaggataccctttgacaaaccctgtggataaaatgataatatcaaggtcaggcatggtggctcacacctgtaatcccagcactttgggaggctgaggcgggtggatctgctgaagtcagaagtttgagaccagccttgccaacacagtgaaaccctgtctctactaaaaataaaaaaattagccgggcgcagcagtgcacgcctgtaatccctgctactcgggaggctgaaacaggagaatcacttgaacccaggagacggaggttgcggtgagttgagattatgccactgtactccagcctgggtgacagagcgagactcagtctcaaaaaaaaaaaaggagaattagttaaggggaccatattacaaaagatagttgaatattcttcacactcacttctcaccctccccaccccaatttactctgcctttctgaatggctttaatgagatacctgattattaatgaagaaaagtagaccaccaccccttttgttatccagactttagaacagccattgttgaaagcaagaagttagctacccacaataatacctttctgagcatactcttctctaacatacatttctgtggaagtagttgaattaaattgagtaactacacaaaggaaaatggcagggctatgaatttctttcccagcttttatatagatgtgcctacatatgacactctttagggttccttttattttttctttttttttttttttgaggtagttgaattaaactgggtaactacacaaaggaaaatggcagggatatgaatttctttcccagcttttatatagatgtgcctgcatatgacactctttagagttcctttcactttttcttttttttggaagggggcggggaggcaggaggagtgcagttttaagcctagcctatactactacaaacttattatggtacttaaaattacagcatgaacgttctatatcggagtctcccaccaggctgtctctgactaaatcagcctataagatcatcccttgggattaaacaaacacctgttctgtagggaatgtgtttcctgaatcttggtactcagacttttgtcaagagtaaataacatttcaaaagatgaatggaaaaatgattaagagagcatttctgctttcagcattaactgctaatggattaaaattttaatctgtatagcatttcctggagtaaaagctcaagtactttccacatccattgcaaacttttcaggaacccttctaattttttttttttttttttttttgagacggagtcttgctctgtcgcccaggctggagtgtagtggcatgatctcagctcactgcaagctctgcctcccgggttcgtgccattctcctgccctgcctcccgaatagctgggactacaggcgtccaccaccactcctggctatttttttgtatttttagtagagacagggtttcaccgtgttagccaggatggtcttgatctcctgacctcgtgatccacctgcctcggcctcccaaagtgctgggattgaacccttctaattttaaagaaccttgttattagaaaatctcagcctaatacaatctgaagttaagagttttagcagcattgtttttctaagtagatttagctatagattttcttctggccaaacaaggaagagtatatgcccttgtaaatgagtcttgttttgtttatttaaatagtcagtcaaaacgtagaaatcagtatacgtaaaataaaatgcatgagactattaaatcttttcatatactctacaaataaaatgaaatctgtgtgtggtcctggttgactgggcatctaaagggaatcagaaaagagattgtgaaaagttatatatatatcctcttccttattttagttttgctttttcctattttccataattaagtgccgtttacaaagtggcatcaaaaaattgaagcaggccaggcatggtggctcatgcctgtaatcccaacagtttgggaggctgagggcaggtggatcacttgagatcaggagttcgtgaccagcctggccaacatggtgaaagcccatctctactaaaaatataaaaattagccgggcgtggtggcatgtgcctgtaatcgcagctacttgggaggctaagacaggagaattgcttgaacctgggaggtggaggttgcaatgagctgagatcgcgccactgcactccagcctgggcaacagtgagacaccgtctcaaaaaaaaaaaaggttaggaatcacaaattgtgtaaatatatagcaactttaagaagagagaagaatgcttataacctagtgaatatttctgctgagccttagttgtcttgtctaaaggaaaaaagagggaattgtagaataaaagtatttgttagtggaaattattgacctgaaaccatatcatattgttagtgtaactgaatgtatcagaaattgttcctatgtaggtattctgtgaaactggtttctaaaatgttacaggaaactgtttcctttttttttgtttgtttgtttaagtggaggtgggaggaggtagggaagaggtctgaatattaaaatatgtttatgttcatgtgttcataatacgttcctttttctctctgtgtgtgtataaaagtgccttgctcatgaatgcatttttgctattcacttcgaaaggaagcctttccccagcttggcagctgaataaaccaatagctttgtacatgctgaa

SEQ ID NO: 4445 - DNA, 6334 bp, Homo Sapiens
  NM_017745
gggagtcgagtgagcgcggcgccgcgagcgggctgcgggcagccggggaccgcaaactttgctgctcgccgcgcttctccggcccggctccttctccgctcgttaacgtcgccaaccccccccacccctcatatctctctccacccacccaaccgccccccgctccttctcgccgcctcgagtccgcttgggggaaaacttcaaagagccggatcgcaggctccctgcctactcccccaccggggatttcagactagacgcttgaagcaaagctgccatcccagaagacgacatgctctcagcaacccccctgtatgggaacgttcacagctggatgaacagcgagagggtccgcatgtgtggggcgagcgaagacaggaaaatccttgtaaatgatggtgacgcttcaaaagccagactggaactgagggaagagaatcccttgaaccacaacgtggtggatgcgagcacggcccataggatcgatggcctggcagcactgagcatggaccgcactggcctgatccgggaagggctgcgggtcccgggaaacatcgtctattctagcttgtgtggactgggctcagagaaaggtcgggaggctgccacaagcactctaggtggccttgggttttcttcggaaagaaatccagagatgcagttcaaaccgaatacacccgagacagtggaggcttctgccgtctctggaaaacccccaaatggcttcagtgctatatacaaaacaccgcctggaatacaaaaaagtgctgtagccacagcagaagcgctgggcttggacaggcctgccagcgacaaacagagccctctcaacatcaatggtgctagttatctgcggctgccctgggtcaatccttacatggagggtgccacgccagccatctaccctttcctcgactcgccaaataagtattcactgaacatgtacaaggccttgctacctcagcagtcctacagcttggcccagccgctgtattctccagtctgcaccaatggggagcgctttctctacctgccgccacctcactacgtcggtccccacatcccatcgtccttggcatcacccatgaggctctcgacaccttcggcctccccagccatcccgcctctcgtccattgcgcagacaaaagcctcccgtggaagatgggcgtcagccctgggaatcctgttgattcccacgcctatcctcacatccagaacagtaagcagcccagggttccctctgccaaggcggtcaccagtggcctgccgggggacacagctctcctgttgcccccctcgcctcggccgtcaccccgagtccaccttcccacccagcctgctgcagacacctactcggagttccacaagcactatgccaggatctccacctctccttcagttgccctgtcaaagccatacatgacagttagcagcgagttccccgcggccaggctctccaatggcaagtatcccaaggctccggaagggggcgaaggtgcccagccagtgcccgggcatgcccggaagacagcggttcaagacagaaaagatggcagctcacctcctctgttggagaagcagaccgttaccaaagacgtcacagataagccactagacttgtcttctaaagtggtggatgtagatgcttccaaagctgaccacatgaaaaagatggctcccacggtcctggttcacagcagggctggaagtggcttagtgctctccggaagtgagattccgaaagaaacactatctcctccaggaaatggttgtgctatctatagatctgaaatcatcagcactgctccctcatcctgggtggtgcccgggccaagtcctaacgaagagaacaatggcaaaagcatgtcgctgaaaaacaaggcattggactgggcgataccacagcagcggagttcatcatgcccgcgcatgggcggcaccgatgctgtcatcactaacgtttcagggtcagtgtcgagtgcaggccgcccagcctccgcatcacccgcccccaatgccaatgcagatggcaccaaaaccagcaggagctctgtagaaaccacaccatccgttattcagcacgtgggccagcccccggccactcctgccaagcacagtagcagcaccagcagcaagggcgccaaagccagcaacccagaaccgagtttcaaagcaaacgagaacggccttccaccaagctctatatttctgtctccaaatgaggcattcaggtccccaccaattccctaccccaggagttacctcccttacccagcccctgagggcattgctgtaagtcccctctccttacatggcaaaggacctgtctaccctcacccagttttgttacccaatggcagtctgtttcctgggcaccttgccccaaagcctgggctgccctatgggcttcccaccggccgtccagagtttgtgacctaccaagatgccctggggttgggcatggtgcatcccatgttgataccacacacgcccatagagattactaaagaggagaaaccagagaggagatcccggtcccatgagagagcccgttacgaggacccaaccctccggaatcggttttccgagattttggaaactagcagcaccaagttacatccagatgtccccaccgacaagaacctaaagccgaaccccaactggaatcaagggaagactgttgtcaaaagcgacaagcttgtctacgtagaccttctccgagaagaaccagatgctaaaactgacacaaacgtgtccaaacccagctttgcagcagagagtgttggccagagcgctgagccccccaagccctcagttgagccggccctgcagcagcaccgtgatttcatcgccctgagagaggagttggggcgcatcagtgacttccacgaaacttatactttcaaacagccagtcttcaccgtaagcaaggacagtgttctggcaggtaccaacaaagagaacctagggttgccagtctcgactccattcctggagccacctctggggagcgatggccctgctgtaacttttggtaaaacccaagaggatcccaaaccattttgtgtgggcagtgccccaccaagtgtggatgtgacccccacctataccaaagatggagctgatgaggctgaatcaaatgatggcaaagttctgaaaccgaagccatctaagctggcaaagagaatcgccaactcagcgggttacgtgggtgaccgattcaaatgtgtcactaccgaactgtatgcagattccagtcagctcagccgggagcaacgggcattgcagatggaaggattacaagaggacagtattttatgtctacccgctgcttactgtgagcgtgcaatgatgcgcttctcagagttggagatgaaagaaagagaaggtggccacccagcaaccaaagactccgagatgtgcaaattcagcccagccgactgggaaaggttgaaaggaaatcaggacaaaaagccaaagtcggtcaccctggaggaggccattgcagaacagaacgaaagtgagagatgcgagtatagtgttggaaacaagcaccgtgatccctttgaagccccagaggacaaagatcttcctgtggagaagtactttgtggagaggcagcctgtgagcgagcctcccgcagaccaggtggcctcggacatgcctcacagccccaccctccgggtggacaggaaacgcaaagtctcaggtgacagcagccacactgagaccactgcggaggaggtgccagaggaccctctgctgaaagccaaacgccgacgagtctctaaagggctccatcctaaaaaacaacgccacttgctgcaccttagagaacgatgggagcagcaggtgtcggcagcagatggcaaacctggccggcaaagcaggaaggaagtgacccaggccactcagcctgaggccattcctcaggggactaacatcactgaagagaaacctggcaggaaaagggcagaggccaaaggcaacagaagctggtcggaagagtctcttaaacccagtgacaatgaacaaggcttgcctgtgttctccggctctccgcccatgaagagtctttcatccaccagtgcaggcggcaaaaagcaggctcagccaagctgcgcaccagcctccaggccgcctgccaaacagcagaaaattaaagaaaaccagaagacagatgtgctgtgtgcagacgaagaagaggattgccaggctgcctccctgctgcagaaatacaccgacaacagcgagaagccatccgggaagagactgtgcaaaaccaaacacttgatccctcaggagtccaggcggggattgccactgacaggggaatactacgtggagaatgccgatggcaaggtgactgtccggagattcagaaagcggccggagcccagttcggactatgatctgtcaccagccaagcaggagccaaagcccttcgaccgcttgcagcaactgctaccagcctcccagtccacacagctgccatgctcaagttcccctcaggagaccacccagtctcgccctatgccgccggaagcacggagacttattgtcaataagaacgctggcgagacccttctgcagcgggcagccaggcttggctatgaggaagtggtcctgtactgcttagagaacaagatttgtgatgtaaatcatcgggacaacgcaggttactgcgccctgcatgaagcttgtgctaggggctggctcaacattgtgcgacacctccttgaatatggcgctgatgtcaactgtagtgcccaggatggaaccaggcctctgcacgatgctgttgagaacgatcacttggaaattgtccgactacttctctcttatggtgctgaccccaccttggctacgtactcaggtagaaccatcatgaaaatgacccacagtgaacttatggaaaagttcttaacagattatttaaatgacctccagggtcgcaatgatgatgacgccagtggcacttgggacttctatggcagctctgtttgtgaaccagatgatgaaagtggctatgatgttttagccaaccccccaggaccagaagaccaggatgatgatgacgatgcctatagcgatgtgtttgaatttgaattttcagagacccccctcttaccgtgttataacatccaagtatctgtggctcaggggccacgaaactggctactgctttcggatgtccttaagaaattgaaaatgtcctcccgcatatttcgctgcaattttccaaacgtggaaattgtcaccattgcagaggcagaattttatcggcaggtttctgcaagtctcttgttctcttgctccaaagacctggaagccttcaaccctgaaagtaaggagctgttagatctggtggaattcacgaacgaaattcagactctgctgggctcctctgtagagtggctccaccccagtgatctggcctcagacaactactggtgagcaagctggacccaccatgtacagtgtgttatagtgttaatccttgtgcatatgtgtcataatacaactatttctgtaaagaaaggacactattacatatgaaaatatctcttctttatataagagaaattactccagtcagaaggacttagaaacatgtttttttccttttaaacttttaagtcagtttttatgaagttgttataatgtttctttacttttcaatgcacacatgctttgggatacgtttgtttttacttggaacatttgtttcttttcttttttaaggagaaaaaaaaatgagtaaaaggagctccacactttgacttaatttcatacaaagctctgatgacaggccatgactgtagagtggtcagaactgtgtggttggtttgagggagcgaattcggggaaggcacttggtgatataactttgttttgtttacagagtacctgctcgggccaggtaaatgctattggatgtaatccagtagtgtgtaatataaattcaaaccatatccacacacaacaactaattgtatgaaacttttatatcctaatttaaaagctgtgaaattagttttcacgcatcaaaccggattgtttatatgtttaaacattttatgctcttatttaaagaagactttgagctatttttttctgtaccctgtaaaatattgaaaactaacataatatgttgaggttgcttggaaatgtacataaaactaaaattttctgaatcgtgtgtttatgtttgaaatctgtgttttaactttgtaagtaaattctctgcctttgtatttatattttacaaaaattttcttaaaaggcaataaaactgttgaggaaaggagaaaattgaaaaaaaaaaaaaaa

SEQ ID NO: 4446 - DNA, 3129 bp, Homo Sapiens
  NM_017746
gcgatcacgtgagcacagcagggagggggaggggccctgatttccgggcggcggaaggagacgcggccgcgtgaggacgaggctatttgaaaacacgctccgggagctagagcctgaggtcggcggcgcacgctgttgccccgtgggcttctgctccctcgcttgtcttctcgggcttctcgccccggccgcggccgggtcctcagtagtcgagaatgactaaaaaaagaaaacgccaacatgattttcaaaaagtaaaattgaaagttggtaaaaagaagcccaagttacaaaatgctactcctacaaactttaaaacaaagactatacatctgcctgagcaactcaaagaggatggaacacttccaacaaacaatagaaaacttaacataaaggatttgctgtcacagatgcatcactacaatgctggggttaaacaaagtgctcttcttggacttaaagaccttttgtctcaatacccatttataattgatgcacacctttcaaacatattaagtgaagtgactgctgtgtttacagataaagatgctaatgtacgattagcagcagttcaacttcttcaattcctggcccccaaaatacgagctgaacaaatttctccattttttcctttggtaagtgcccatctctctagtgccatgactcacattactgaaggaattcaggaggactctttaaaagttttggacattctgctggaacagtacccagctctaattactggccgtagcagcatattgcttaagaattttgtagaacttatttctcatcagcagctgtccaaaggactgataaatagagacagatcccagtcctggatactttctgtaaatcctaatcggagactcacttctcagcaatggaggctgaaagtcttagtgagactcagtaaattccttcaggccttggcagatggatccagtaggttgagagaaagtgaaggacttcaggaacagaaagaaaatccccatgccactagcaactccatttttatcaactggaaggaacatgccaacgaccagcaacacatccaggtttatgaaaatgggggttcacagccaaatgtcagttcacagttcaggctacggtatctggttggaggactgagtggtgtggatgaaggcctgtcatctactgaaaacctgaaaggatttattgagataataattccattgctaattgaatgctgggttgaagctgtacctccacaactagctactcctgttgggaatggtatagaacgagaacctctacaggttatgcagcaagttcttaatattatttcccttctgtggaaactctctaaacaacaggatgaaacccataaattggagtcatggcttcgaaagaactaccttattgattttaaacaccattttatgagtcgttttccatatgtcttaaaagaaataaccaagcacaaaaggaaagagccaaataaaagcatcaagcattgcacagttctctccaataacatagatcatctcttactgaatttaacactgtctgatatcatggtctccctggcaaatgcgtcaactttgcagaaggattgcagttggatagaaatgataaggaaatttgtaacagagacccttgaagatggctctaggctaaatagtaagcaactgaacagattgctgggagtatcctggaggttaatgcaaatacagccaaacagagaggacacagagactcttattaaggcagtttatacattatatcagcagaggggccttatccttccagttcggactttgttattgaagtttttcagtaaaatctatcagacagaagaactgagatcttgtagattcagatatcgtagtaaagtgttatcccgttggctggctggcttaccattgcaacttgctcatcttggctcccgaaatcctgagctctctacacagcttatcgatatcattcataccgctgcagcacgagcaaataaagaattactaaaaagtttacaagctactgccctccgaatttatgatccacaagaaggtgctgtggtggttctccctgcagactctcagcagcgtttggttcagcttgtatatttcctacccagtctgccggctgatttgctttctcggttaagtcgttgctgtattatgggaagactcagttcaagtttggctgccatgcttatcgggatactgcacatgagatcatcattttctgggtggaagtattcagctaaagactggttgatgagtgatgtagactatttcagcttcttattttccacacttacagggttttcgaaagaggagttgacttggcttcagagccttcgaggagttcctcatgtcatccagacacagctttcccctgtgcttctctaccttacagatttggatcaatttttacaccactgggatgtaacagaggcagtttttcacagtttattggttattcctgcccgaagtcagaactttgacatcttgcaaagtgccatcagtaagcatttggttgggttgactgtaattcctgacagcacggctggctgtgtttttggtgttatctgtaagctcctggatcatacttgtgtagttagtgagactctactgccatttctggcttcttgttgctacagtcttctttattttctgctcactatagagaaaggggaagcagaacatctaagaaagagggacaagctgtggggggtctgtgtctccatcctggctctcttgcctcgagtcctcaggttgatgctgcagagcctgcgggtgaacagagttgggcctgaggagctgcctgttgtgggccagctgcttcgactgctgcttcagcatgcacccctcaggactcatatgttgaccaatgcgatcttggtgcagcagatcatcaagaatatcacgacattgaagagtggaagtgttcaggaacagtggctcacagacttacattactgcttcaacgtgtatatcactgggcatccccaagggcccagtgcactggctacagtgtattgaagaggccatagtacctcctgtttgaagttgtttattcacatctatcttatttgaagaaaaagactgatgtaatagatctttgtcattaaagctgaacttttaaagaagtttacgaaaaaaaaaa

SEQ ID NO: 4447 - DNA, 8233 bp, Homo Sapiens
  NM_017747
gggaggcagcaggttaggcagtgagaagttagtggcgctgctgggacgggggaaaggagacgcttcttcctcttgctgctcttctcgttcccgagatcagcggcggcggtgaccgcgagtgggtcggcaccgtctccggctccgggtgcgaacaatgctgactgatagcggaggcggcggcacctcctttgaggaggacctggactctgtggctccgcgatccgccccagctggggcctcggagccgcctccgccgggaggggtcggtctggggatccgcaccgtgaggctctttggggaggccgggccagcgtcgggagtcggcagcagcggcggcggcggcagcggcagcggtacgggcggaggggacgcggcgctggatttcaagttggcggctgccgtgctgaggaccgggggtggaggtggtgcctctggcagtgacgaggacgaagtgtccgaggttgaatcatttattttggaccaagaagatctggataacccagtgcttaaaacaacatcagagatattcttatcaagtactgcagaaggagcagacttacgcactgtggatccagagacacaggcacgactagaagcattgctagaagcagcaggaattggcaaattgtcaactgctgatggtaaagcttttgcagatcctgaggtactccggagactgacatcctcagttagttgtgcactggatgaagctgctgctgcactgacacggatgaaagcagaaaacagccacaatgcaggacaagtggacactcgcagtctagcagaagcttgttcagatggggatgttaatgctgttcgtaaattgctagatgaaggcagaagtgtaaatgaacatacagaagaaggagaaagcctgctgtgtttggcttgttcagcagggtattatgaattagcacaagtattgcttgctatgcatgctaatgttgaagatcgagggaataaaggagacataactcccctgatggcagcttccagtggaggttacttagatattgtgaaattattacttcttcatgatgctgatgtcaactcccagtctgcaacaggaaacactgcgctaacttatgcatgtgctggaggatttgttgacattgttaaagtgctccttaatgaaggtgcaaatatagaagatcataatgaaaatggacatactcccttaatggaagcagccagtgcaggtcatgtggaagttgcaagagttcttttagatcatggtgcaggcatcaacactcattctaatgaattcaaagaaagtgctctaacacttgcttgctacaaaggccatttggatatggttcgctttctacttgaagctggtgcagatcaagagcacaaaacagatgagatgcacactgccttaatggaggcctgcatggatggacatgtagaggtggcacgtttgcttttggatagtggtgctcaagtgaacatgcctgcagattcatttgaatctccattgacgctagctgcctgtggaggacatgttgaattggcagctctacttattgaaaggggagcaaatcttgaagaagttaatgatgaaggatacactcccttgatggaagctgcccgggaaggacatgaagaaatggtggcactactcttagcacaaggagcaaatataaatgcccagacagaagaaactcaagaaactgctcttactttggcttgctgtggaggattttctgaagttgcagactttcttattaaggcaggggctgatatagaacttggctgctccacacctctgatggaggcatctcaggagggacacctggaattggttaaatatttgctggcttctggcgctaatgtgcatgctacaacagcaacaggagacacagccttaacctatgcttgtgaaaatggacatacggatgttgcagatgttttacttcaagcaggggctgatttagaacatgaatctgaaggtggaagaacacctttgatgaaagctgcaagagctggtcatttgtgcactgtgcagtttcttattagcaaaggtgccaatgttaacagggctacagccaataatgatcatacagtagtgtcgctggcatgtgcaggaggccacctggcagttgttgagcttctcttggctcatggggctgaccctactcatcgactcaaggatggttcaacaatgctcattgaagctgcaaagggtggccatactaatgtagtttcttatctgttggattatccaaataatgttctgtcagttcccaccacagatgtgtctcagctccctccaccttctcaagatcagtctcaggtgccacgtgtgccaacgcatacacttgccatggttgtacctccccaggaacctgacagaacttcacaggagaactctcctgcccttttaggagtgcaaaaaggtacatccaagcagaagtccagttccctccaggtagcagatcaggacctactgccatcttttcacccataccagcctttggagtgcatagtagaggagactgaaggcaagctgaatgaactgggacaaagaattagtgctattgaaaaagcacagcttaagtcactggagttaattcaaggtgaacctctgaacaaagataagatagaagaacttaaaaagaacagagaagagcaagtccagaagaagaagaaaatattgaaagaactgcagaaagtggaaaggcagttgcagatgaaaacacagcagcaatttaccaaagaatacttggaaaccaaaggtcagaaagacacagtgtctctacaccaacagtgctctcatagaggagtcttcccagaaggggaaggagatggtagtctcccagaggatcacttttcagagttacctcaggttgacacaatcttatttaaagataatgatgttgatgatgagcaacagtctccaccatcggcagaacagattgattttgtcccagtccagcctttatcatctccacagtgtaacttttccagtgacttaggttctaatgggacaaattctcttgaacttcagaaagtatcaggtaatcagcagattgtaggacagcctcagattgctattactggacatgatcaggggctgttagttcaagaaccagatggactaatggttgcaactccagctcagacgcttaccgacactcttgatgacctgatagcagctgtgagtaccagagtgcccactggttccaacagttcttctcagaccacagagtgtcttacacctgaatcctgttcgcagactacaagcaatgtggcttcccaatcgatgcctcctgtgtatccttcagttgacattgatgcacatactgagagcaatcatgacacagcattaacactagcttgtgcaggtggtcatgaagaacttgtatctgtgctcattgcacgggatgccaaaattgaacacagagacaaaaaaggtttcacaccactaatcctggcagcaacagcagggcatgttggagttgttgaaatccttttggataaaggtggagatatagaagcacagtctgaacgaactaaggatactccgctttcattggcatgttctggtggacgtcaggaggtggtagacttgctgctggctcgaggtgcaaataaagaacataggaacgtatctgattatacaccactgagtctagctgcgtctggaggatatgttaatatcattaagattctgcttaatgctggggcagaaattaattcaaggactgggagtaaactaggtatttctcccctgatgttggctgcaatgaatggacatgttcctgcagtaaaattgctgctcgatatgggttcagacattaatgcccaaatagagaccaatcggaacacggctctcaccctggcctgtttccagggccgagcagaagtagtgagtttgcttctggaccgaaaagccaatgttgaacatagggcaaagacgggtcttacccccttgatggaagcagcttctggagggtatgcagaggttggaagagttcttcttgataaaggagcagatgttaatgctccccctgtgccttcctcaagagatactgctttaacaatagcagcagacaaaggtcactacaaattttgtgaactcctgattcataggggagcccacattgatgttcgtaacaaaaagggaaatacgccactttggctggcatccaatggaggtcattttgatgttgtgcagttgctagtgcaagcaggtgctgatgtggatgcagcagataaccggaaaatcacacctcttatgtcagcatttcgcaagggtcatgtaaaagttgttcaatatttggtaaaggaagtaaatcagttcccttctgatatagaatgcatgagatacatagcaacaattacagataaggaactgttgaaaaaatgtcatcaatgtgtcgaaaccattgtgaaggctaaagaccagcaagctgcagaagcaaataagaatgcgagtattcttttaaaggaacttgatctggaaaagtcaagagaagagagcagaaagcaggctcttgctgctaaaagagaaaaaagaaaagaaaagagaaaaaagaaaaaagaggaacagaaaaggaaacaggaagaagatgaagaaaacaaacctaaggagaattcggaactaccagaggatgaagatgaagaggagaatgatgaagatgtggagcaagaagttcccatagaacctcctagtgcaaccaccaccactacgattggaatctctgcaacatctgcaacattcacaaatgtgtttgggaaaaaaagggccaatgtggtgacaactcccagcaccaatcggaaaaataagaagaacaaaacaaaagaaacccctcctacagcacatttaattttaccagaacaacatatgtctttagcccaacaaaaggcagataaaaataaaataaatggagaacctagaggtggtggtgcaggtgggaatagtgattcagataacttggacagcacagactgcaacagtgagagtagcagtggtggtaaaagccaagagttaaattttgtgatggatgtgaattcctctaaatacccctcactgctccttcattcccaagaagaaaagacaagtactgctacttccaaaactcagacacgacttgaaggtgaagtgactcctaattccttgtcaaccagctacaagacagtgtcattgccattaagctctccaaacataaagctgaatctcactagccctaaaaggggtcagaaaagagaagaagggtggaaagaagttgtacgaaggtcaaagaaattgtctgttccagcctcagtggtgtcgaggataatgggaagaggaggatgcaacatcactgcaatacaggatgttactggtgcccatattgatgtggataaacaaaaagataagaatggcgagagaatgatcacaataaggggtggcacagaatcaacaagatatgcagttcaactaatcaatgcactcattcaagatcctgctaaggaactggaagacttgattcctaaaaatcatatcagaacacctgccagcaccaaatcaattcatgctaacttctcatctggagtaggtaccacagcagcttccagtaaaaatgcatttcctttgggtgctccaactcttgtaacttcacaggcaacaacgttatctacgttccagcccgctaataaacttaataagaatgttccaacaaatgtacgttcttctttcccagtttctctacccttagcttatcctcaccctcattttgccctgctggctgctcaaactatgcaacagattcggcatcctcgcttacccatggcccagtttggaggaaccttctcaccttctcctaacacatggggaccattcccagtgagacctgtgaatcctggcaacacaaatagctctccaaagcataataacacaagccgtctacctaaccagaacgggactgttttaccctcagagtctgctggactagctactgccagttgtcctatcactgtctcttctgtagttgctgccagtcagcaactgtgtgtcactaatacccggactccttcatcagtcagaaagcagttgtttgcctgtgtgcctaagacaagtcctccagcaacagtgatttcttctgtgacaagcacttgtagttccctgccttctgtctcctctgcacctatcactagcgggcaagctcccaccacatttctacctgcaagtacttctcaagcacagctttcttcacaaaagatggagtctttctctgctgtgccacccaccaaagagaaagtgtccacacaggaccagcccatggcaaacctatgtaccccatcttcaactgcaaacagttgcagtagctctgccagcaacaccccgggagctccagaaactcacccatccagtagtcccactcctacttccagtaacacacaagaggaggcacagccatccagtgtgtctgatttaagtcctatgtcaatgccttttgcatctaactcagaacctgctccattgactttgacatcacccagaatggttgctgctgataatcaggacaccagtaatttacctcagttagctgtaccagcacctcgagtttctcatcgaatgcagcccagaggttctttttactccatggtaccaaatgcaactattcaccaggatccccagtctatttttgttacgaatccagttactttaacaccacctcaaggcccaccagctgcagtgcagctttcttcagctgtgaacattatgaatggttctcagatgcacataaacccagcaaataagtctttgccacctacatttggcccagccacacttttcaatcacttcagcagtctttttgatagtagtcaggtgccagctaaccagggctggggagatggtccactgtcctcacgagttgctacagatgcctctttcactgttcagtcagcgttcctgggtaactcagtgcttggacacttggaaaacatgcaccctgataactcaaaggcacctggcttcagaccaccttcccagcgagtttctactagtccagttgggttaccatccattgacccatcaggcagctccccatcttcctcttctgctcctctggcaagtttttccggcataccaggaacaagggttttcctgcaagggccagctcctgttgggactcctagtttcaacagacaacatttttctccccatccttggacaagcgcctcaaactcatccacttctgccccaccaacgttgggccaaccaaaaggagtcagtgccagtcaagatcgaaagatacctcccccaattggaacagagagactggcccgaattcggcaaggagggtctgttgcacaagccccggcggggaccagttttgtcgctcccgttggacacagtggaatctggtcatttggtgtcaatgctgtgtcagaaggcttatcaggttggtcgcaatctgtgatggggaaccatccaatgcatcaacaattatcagacccaagcacattctcccaacatcagccaatggagagagatgattctggaatggtagccccctctaacatttttcatcagcctatggcaagtggttttgtggatttttctaaaggtctgccaatttccatgtatggaggcaccataataccctctcatcctcagcttgctgatgttccaggaggccctctgtttaatggacttcacaatccagatcctgcttggaaccctatgataaaagttatccaaaattcaactgaatgcactgatgcccagcagatttggcctggcacgtgggcacctcatattggaaacatgcatctcaaatatgtcaactaagttagaaggtctttactctttagccttgtttaagaaacctatgaccttggaagaaccatggggatttttttttaatgtgcctaagaaattttctctgaggctttagcaatggaaatttgattgcccattgtataagaacaaattgatttcctatccacctgattatgttctctggttagtttagccattttgaacttaagatcatatgaccttagtgcttttggctaaacatacagaatactacttgtatgcagaagagaattagttgattacatgtttcaaccttttagggtgataaatacatgtataattgtttacatacttaaaaggaaaaagttgagtaaatttcttgtcatatagtggctctacgtaatgtagcctgtattaatgtgaaatatttaccagaatattcaataaaaagatgaacagtctttagaaaaaaaaaaaaaa

SEQ ID NO: 4448 - DNA, 3389 bp, Homo Sapiens
  NM_017755
ggacctgcaagcgccccacccacgccggggccgcagtaaccccgcgccgctctgcgcacgcgcggcttcaggctgtccgcggagctccttgagcccgcgtgggaaacctgggcgcttcgcgcggagacgcctttgtggctgcttcctggagcatttttttccccttagagctgttcgctgttttccctgtcacgccgcttttctgaaagacgggttgtgcgctttgggcttattcctggacggtccccaaaggtccccgaaaggaccaggcccggacacgtggggccttggtttccggccggaagtcccgggaggtgtagggctagagttctggccgtggcgggccggtttctgcgtgctgcgtgcgcggccgcgtgggctatggggcggcggtcgcggggtcggcggctccagcaacagcagcggccggaggacgcggaggatggcgccgagggtggtggaaagcgcggcgaggcgggctgggaaggaggctaccccgagatcgtcaaggagaacaagctgttcgagcactactaccaggagctcaagatcgtgcccgagggcgagtggggccagttcatggacgctctcagggagccgctcccggccactttaagaattactggttacaaaagccacgcaaaagagattctccattgcttaaagaacaaatattttaaggaattggaggacctggaggtggacggtcagaaagttgaagttccacagccactgagttggtatcctgaagaacttgcctggcacacaaatttaagtcgaaaaatcttgagaaaatcgccacacttggaaaagtttcatcagtttctagttagtgaaacagaatctggaaatattagtcgtcaagaagctgttagcatgatcccaccactgctcctcaacgtgcggcctcatcataagatcttagatatgtgtgcagcacctggctcaaagaccacacagttaattgaaatgctacatgccgacatgaatgtcccctttccagagggatttgttattgcgaatgatgtggacaacaagcgctgctacctgctcgtccatcaagccaagaggctgagcagcccctgcatcatggtggtcaaccatgatgcctccagcatacccaggctccagatagatgtggacggcaggaaagagatcctcttctatgatcgaattttatgtgatgtcccttgcagtggagacggcactatgagaaaaaacattgatgtttggaaaaagtggaccaccttaaatagcttgcagctacatggcttacagctgcggattgcaacacgcggggctgaacagctggctgaaggtggaaggatggtgtattccacgtgttcactaaaccctattgaggatgaagcagtcatagcatctttactggaaaaaagtgaaggtgctttggagcttgctgatgtgtctaatgaactgccagggctgaagtggatgcctggaatcacacagtggaaggtaatgacgaaagatgggcagtggtttacagactgggacgctgttcctcacagcagacacacccagatccgacctaccatgttccctccgaaggacccagaaaagctgcaggccatgcacctggagcgatgccttaggatattaccccatcatcagaatactggagggttttttgtggcagtattggtgaaaaaatcttcaatgccgtggaataaacgtcagccaaagcttcagggtaaatctgcagagaccagagaaagcacacagctgagccctgcagatctcacagaagggaaacccacagatccctctaagctggaaagtccgtcattcacaggaactggtgacacagaaatagctcatgcaactgaggatttagagaataatggcagtaagaaagatggcgtgtgtggtcctcctccatcaaagaaaatgaagttatttggatttaaagaagatccatttgtatttattcctgaagatgacccattatttccacctattgagaaattttatgctttggatccttcattcccaaggatgaatttgttaactcggactacagaagggaagaaaaggcagctctacatggtttctaaggagttgcggaatgtgctgctgaataacagtgagaagatgaaggttattaacacggggatcaaagtctggtgtagaaataacagcggtgaagagtttgactgtgctttccggctggcacaggagggaatatatacattgtatccatttattaactcaagaattattactgtatcaatggaagatgttaagatactgttgacccaggaaaatcccttttttagaaaactcagcagtgagacctacagtcaagcaaaggacctggcaaagggaagcatcgtgctgaagtatgaaccagattctgcgaatccagacgctctgcagtgtcccatcgtcttatgcggatggcggggaaaggcctccattcgaacttttgtgcccaagaatgaacggcttcattatctcaggatgatggggctggaggtattgggagaaaagaagaaggaaggggttatcctcacaaatgagagtgcagccagcaccggacagccagacaatgacgtgactgagggacagagagcaggagagcccaacagcccagatgcagaagaggccaacagtccagacgtgacagcaggctgtgacccggcgggggtccatccaccccggtgagcaggcccaaggcagcgggggcccacacccctcacacgcaaaactggcttcttctggtcactggtgtctgaaaccaaatccagagcagcctgtggcctgtaaagcatatatttctaatgactgcagactggtgggatcataggagccttctgaatgaccaggactgctttctttggagctgatgaaaatgtactcttttagcgtgttagaaatcacttgttttattttgtttctttggccaagctgggtctagtgtttcttttgctgggaatagactttcaaaagttgtacttctatcaagaaacaaaactgcccttgcagaaatttcaggtcttttgttaagcctgtattggtcttaaggtgcagtattttttaaattattatttatagaaagaatctataaattcttggggaagtgtgttataagctttaataattacattgagctgcacctcagtggtgtgtcattaacatgcagtggggttaatatctgaggcctcagatgactttgtgccttttggaataaagggtaaaataaactctcccagagtaagagctgtatcgtgaattgtcatactaattattgagggggacttatgtgcttttattgaatggagtgctttacaatttttatttttaaatggggttgggatccttggaatatttcaataaaattgataaaatataaaaaaaaaaaaaaaaaa

SEQ ID NO: 4449 - DNA, 4969 bp, Homo Sapiens
  NM_017762
agaaagggcctgggcggccgcactgagagctttacgcccggaggcgtcggcgctgccactggcccgcgacgggaacggggcgaaaaggcggcggcaccatgttctccctcaagccgcccaaacccaccttcaggtcctacctcctgccaccgccccagactgacgataagatcaattcggaaccgaagattaaaaaactggagccagtccttttgccaggagaaattgtcgtaaatgaagtcaattttgtgagaaaatgcattgcaacagacacaagccagtacgatttgtggggaaagctgatatgcagtaacttcaaaatctcctttattacagatgacccaatgccattacagaaattccattacagaaaccttcttcttggtgaacacgatgtccctttaacatgtattgagcaaattgtcacagtaaacgaccacaagaggaagcagaaagtcctaggccccaaccagaaactgaaatttaatccaacagagttaattatttattgtaaagatttcagaattgtcagatttcgctttgatgaatcaggtcccgaaagtgctaaaaaggtatgccttgcaatagctcattattcccagccaacagacctccagctactctttgcatttgaatatgttgggaaaaaataccacaattcagcaaacaaaattaatggaattccctcaggagatggaggaggaggaggaggaggaggtaatggagctggtggtggcagcagccagaaaactccactctttgaaacttactcggattgggacagagaaatcaagaggacaggtgcttccgggtggagagtttgttctattaacgagggttacatgatatccacttgccttccagaatacattgtagtgccaagttctttagcagaccaagatctaaagatcttttcccattcttttgttgggagaaggatgccactctggtgctggagccactctaacggcagtgctcttgtgcgaatggccctcatcaaagacgtgctgcagcagaggaagattgaccagaggatttgtaatgcaataactaaaagtcacccacagagaagtgatgtttacaaatcagatttggataagaccttgcctaatattcaagaagtacaggcagcatttgtaaaactgaagcagctatgcgttaatgagccttttgaagaaactgaagagaaatggttatcttcactggaaaatactcgatggttagaatatgtaagggcattccttaagcattcagcagaacttgtatacatgctagaaagcaaacatctctctgtagtcctacaagaggaggaaggaagagacttgagctgttgtgtagcttctcttgttcaagtgatgctggatccctattttaggacaattactggatttcagagtctgatacagaaggagtgggtcatggcaggatatcagtttctagacagatgcaaccatctaaagagatcagagaaagagtctcctttatttttgctattcttggatgccacctggcagctgttagaacaatatcctgcagcttttgagttctccgaaacctacctggcagtgttgtatgacagcacccggatctcactgtttggcaccttcctgttcaactcccctcaccagcgagtgaagcaaagcacggaatttgctataagcaaaaacatccaattgggtgatgagaagggcttaaaattcccctctgtttgggactggtctctccagtttacagcaaaggatcgcacccttttccataaccccttctacattggaaagagcacaccttgtatacagaatggctccgtgaagtcttttaaacggacaaagaaaagctacagctccacactaagaggaatgccgtctgccttaaagaatggaatcatcagtgaccaagaattacttccaaggagaaattcattgatattaaaaccaaagccagatccagctcagcaaaccgacagccagaacagtgatacggagcagtattttagagaatggttttccaaacccgccaacctgcacggtgttattctgccacgtgtctctggaacacacataaaactgtggaaactgtgctacttccgctgggttcccgaggcccagatcagcctgggtggctccatcacagcctttcacaagctctccctcctggctgatgaagtcgacgtactgagcaggatgctgcggcaacagcgcagtggccccctggaggcctgctatggggagctgggccagagcaggatgtacttcaacgccagcggccctcaccacaccgacacctcggggacaccggagtttctctcctcctcatttccattttctcctgtagggaatctgtgcagacgaagcattttaggaacaccattaagcaaatttttaagtggggccaaaatatggttgtctactgagacattagcaaatgaagactaaaatagggtgttttctgaacattttgagggaagctgtcaacttttttcctctgaattaacattgctaacctaggcgtttgaatctctaataactttatatgtaagaataatagttggaatttgcactaatatttaaaaacatgttgaatcatgcttctttcacacttattttaagagagatgtaaattttgttcctgtcctctttctgtcattacaggtctggctcttgtaaccgtgatcaaactgttcatgttgtctgctacatttttgtctccatccatttttcctaccacctcctgaaggctatctgatagtcagtcacattagcagccccaggcagcagacaacaggaaagttaggaaatttgtgtttcgtgtcatttttaggagcatctgataaaacctccagcaggttttaggaagtattcatgtatttttctggttactttctgtcgtctctaattgaactcacctgatgaaggttcagtgttctggggccagaatttatgattttagatcaccttctttggaaccttagatcactgtgttttgaaatcatgagtttgcttttaacttcatagggtcaactttaaaatgatatgcactgttaattttaaagcatttgctgcagataattaaacttagaagtgcctttgactttaggatacaaatattacagaagaaaatataatttcactttttaaaattggggtgggaaaatcccattgcatatttgaaataggcttttcatactaagcttcatagccaggagtccccagagtcttgttcctctgaaagccactggggagtggcctctggggtgctgattccacagaggtgtatgctgtagacaggagagtgccatctatgccaaaactcgccctcaaaaacaaacaaggcttgctgggaggcgtgctgggcttggccatcagtatttccagtgtggtaaactattgctggcacttccccctggaaataactaatgaggttacgagttgggcacctgcacagatgtccttctctcatagttcctaatgcttaggaatagaggagaaataaaaaaatggattctctcaaaacactgccatttgaatagcgacagaagtgctcccccagcccccaactttggacagcaaagttgaggagaatgagcagacacagttgtttgcttgatctgaatctctctaaagtaaagtatttccaaactgtgtgacaagagcctacctaccactgtagcggtcaaagctgaagcttcttacagcagtgaaacggggcaccacctcccccacactcctcattccccgcttaaaacatggatactttcaaatttgactgtttcttaaactgccatcctaagatatggaaaatttttatagtaaagtgtctagttagcttatttccttttctaaaacaagtgttttcaagataactgtattttacctttatatgtactgaatagctgtttctttttgaattatttgccttttaaaatttgataatgtctctggatataacaggacaggagttcttaaaaaatatcttaagaaattcactttatgggtaaacccaaggtttttgccaacttgttgcctagaaaataagggctagtttcagtttatacaaatagaattattaaacattttacagtccttgattagaaaccagacccaatctccttataacaccacagcgtatcctgccattgacagtgtaatcacaattctccctttttcatttagctgcttttttattattactaaatgttttggattgagcatttttccctctgtaattttcttccttcacgtttattttaactcttgtagtattttattgttgttaatttacaagtttaaaaatattaggtactattaataatggttaaaaatagaaaaatgcatatttttgtatgataatcaaatgtaaaatacttttatttttgctggacagttgttatatcatgattattgtgctacagtttattgtgcataatatgaaaaacaactatgacagccttcagtcgggccagggtgaagctgcttataccacctctgccgtcagagggacatgtggtgacagcagtggtgtggctgcacagggcgcactagagagagctcagcacccctgctgcccgccagcagagcccgtgctgagggaatgccgcacagatgctgatgcactgggtgaaatttctagtattgaacgtaaaggtgtacagtgtcttgctgttattttatgatggaaactgattttgaaaccaaaaatagctaactaactttatttaaggaaaggatattaatttgtactaacagagggtgaaagctgttcacatttgtcaacaaaatctgcttgctgcagtagtaacctcaagtggttaaaacttgatttcccgagaaaactaaaacctttgtgcctaaaattgatgacttgagttcaagtgggatgagcaagaagatgtgttatcttgttgttcaacagtattgaatgtgaaggaaattttgatggcttaataaaattccacagcgactgttaaaaaaaa

SEQ ID NO: 4450 - DNA, 4421 bp, Homo Sapiens
  NM_017766
gcatgcgcgcccgcggcgctccatcccaaacacacacacatttttcccccggacttggaaagtcacccaaagccgccccaagtgcaggcaaacagaccttgctgactgaaggcaaagactcctccatcccacctgccctcccagctgccacggccatcgacccctcctttacaaggggctcctgcaactccccagcagcacgtgttggaatggacttcggaccctggcctcttgggatgcaaaggatgaagtgacacccccagctacatccgaggaggttctaggacctgctacgagagtttgggaccaaggagaagagaatggatcttggaacagctgagggcacccggtgcacggacccgcctgcaggcaagcccgccatggcgcccaaacgcaagggtggcctgaagctgaacgccatctgcgccaagctgagccgccaggtggtggtggagaagcgagctgacgccggctcccacacggagggcagcccatcgcagccccgggaccaagagcgcagtggccctgagtctggggcagcccgggccccccgcagcgaggaagacaagagacgggcagtgatcgagaagtgggtgaacggggagtacagcgaggagccggcacccacacccgtgttggggcggattgcccgcgagggcctggagctgcctcccgagggtgtctacatggtgcagccccaggggtgcagcgatgaggaagaccacgcggaggagccctccaaggacggcggtgccctggaggagaaggattcggacggggcagcctccaaggaggacagcggccccagcaccaggcaggcttcaggagaggcctcctcgctgcgggactacgcggcctccaccatgaccgagttcctcggcatgtttggctatgatgaccagaacacgcgggacgagctggccaggaagatcagctttgagaagctgcacgcgggctccaccccggaggcagccacctcctccatgctgcccacctccgaggataccctcagcaagcgggcgcggttctctaagtatgaggagtacatccgcaagctcaaggctggcgagcagctctcctggccggcccccagcaccaagaccgaggagcgggtgggcaaggaggtggtgggcaccctgcccggcctgcggctgcccagcagcacggcccacctggagaccaaggccaccatcctgcccctgccgtcgcacagcagtgtccagatgcagaacctggtagcccgggcctccaagtacgacttcttcatccaaaaactgaagaccggcgagaatctgcggccccagaacgggagcacctacaagaagccatccaagtacgacctggagaatgtcaagtacctgcacctcttcaaacccggggagggcagccccgacatgggcggggccatcgccttcaagacaggcaaggtggggcgcccttccaagtacgacgtccggggcatccagaagccaggccccgccaaggttccgcccacccccagcctggctcccgcacccctcgccagcgtgcccagtgcccccagcgcccccgggccagggccagagcctcctgcctccctgtccttcaacactcccgagtacctgaagtcaaccttctccaaaacagactccatcaccacggggaccgtctccactgtcaagaacggactgcccacagataaaccagccgtcactgaagatgtaaacatttaccagaaatatattgccaggttctcgggcagccagcactgtggccacatccactgtgcctaccagtaccgcgagcactaccactgccttgaccctgagtgtaactaccagaggttcacgagtaagcaggacgtgatccgccactacaacatgcacaagaagcgcgacaactccctgcagcacggcttcatgcgtttcagcccgctggacgactgcagcgtctactaccacggctgccacctcaatgggaagagcacccactatcactgcatgcaggtgggctgtaacaaggtgtacacgagcacgtctgacgtgatgacccacgagaacttccacaagaagaatacccagctcattaacgacggcttccagcgcttccgagccaccgaagactgtggcacagccgactgccagttctacggacagaagaccacgcacttccactgcaggcgccccggctgcacattcactttcaagaacaagtgtgacatcgagaagcacaagagctaccacatcaaggacgatgcctacgccaaggacggcttcaagaagttctacaagtacgaggagtgcaagtacgagggctgcgtgtacagcaaggctaccaaccacttccactgcatccgcgccggctgcggcttcaccttcacctccaccagccagatgacctctcacaagcgcaagcatgagcgccggcacatccgctcctcgggcgcgctggggctgccgccctcgctgctgggcgccaaggacacggagcacgaggagtccagcaacgacgaccttgttgacttctccgccctgagcagcaagaactccagcctgagcgcctcccctaccagccagcagtcctctgcgtccctggctgccgccactgccgccaccgaggctgggcccagtgccaccaaacctcccaacagcaagatctcggggctgctgccccagggcctgcctggctcaatccccctggccctggccctctccaactcgggcctgcccacccccacgccctacttccccatactggctggccgtgggagcacctccctgcctgtgggcacccccagcctcctgggtgccgtgtcgtctgggtcagcagcctcagccacccctgacacacccacgctggtcgcctcgggagctggagactcagcccccgtggctgccgcctctgtcccggcaccacccgcctccatcatggagaggatctctgcaagcaagggcctcatctcgcccatgatggccaggctggctgcagctgccctcaagccctctgccacctttgacccaggaagcgggcagcaggtcaccccagccaggttccccccggcccaagtgaagccggaacccggtgagagcaccggcgccccaggcccccacgaagcctcccaggaccgcagtctagacctgactgtgaaggagcccagcaacgaatcaaatggccacgcagtcccggcaaattcatctcttttatcctcgcttatgaataagatgtctcagggcaaccctggcctgggcagcctgctgaacatcaaggcggaagcggaggggagccccgctgcggagccctcgcccttcctaggcaaggccgtgaaggcgctggttcaggagaagttggcagagccctggaaggtgtacctgcgcaggtttggtacaaaggacttctgtgacggccagtgtgacttcctccacaaggcccacttccactgcgtggtggaggaatgcggcgcgctcttcagcaccttggacggggccatcaagcacgcaaacttccacttccggacagagggaggagcagcaaaaggaaacacagaggctgcctttccggcctcggccgccgagaccaaacctcccatggccccctcgtcccctccggtccctcctgtcaccacggccacggtgtcctctctggaggggcccgctcccagcccggcctccgtgccctccacccccaccctgctcgcctggaagcagctggcttccaccataccccagatgcctcagatcccagcgtcagtgcctcacctgcccgcctcgcccttggcaacgacttctctagagaacgccaagccccaggtcaaacccggattcctccagttccaggagaagtgagtccctcgatgagccgggagtcccgcgttcccctcgcgtctcgggagtaggtgctagcaagggcgctaggaggccctgttcctcactgcggatggtgctgctgtccccagcctctctggggcatggccatcgggtgatgtccttctagccaaagatgctgctgctcctacctcactgcctgtcccagagcaggccagcccgcgtgggccgatggtggcggcagtggctactgctcctgcagggcatgtggtgatcctgccagggccaggtggggtggactgggcgtggtggtcctcagaggacaactcccagcctgacaaggagggctgcgtctccctccgagcctccgtattggcctcctctgtggctcacacccatggctgaatctctgcagggcacgtgaagtcacgggtaggggccaggcccctccaggccgtcactggcctgcacagtggtctgagctcttgggtggaagggaccctcctcactggatggtggtggctccttgcagggagaacggtgactttgtattgtcatgtgtgcggcttcctgttctcaataaaagtaataaattggattatttaaaaaaaaaaaaaaaaa

SEQ ID NO: 4451 - DNA, 2048 bp, Homo Sapiens
  NM_017771
gtgttgacagcggcggcggtggaaccgggcgggcggcgggagtcggcgcctcgggttcctacctcgcgtccctaggcggcggcggccgggcgtcccgggatggccttcatggagaagccgccagccggcaaggtgctgctggacgacacggtgccgctgacagcagccatcgaggcgagccagagcctgcagtcccacacggaatatattattcgagtgcaaagaggaatttctgtggaaaacagctggcagattgttagaagatacagtgactttgatttgcttaacaacagcttacagattgcaggcctaagtctacctcttcctcccaaaaaattgattggtaacatggatcgtgaattcatagctgaaaggcagaaaggtcttcagaactatctcaacgtgatcacaacaaatcatatcttgtctaattgtgagctggttaagaagtttttagatccaaacaactattccgcaaactatactgagattgccttgcaacaggtttccatgttcttccgatcagaaccaaagtgggaggtggtggaacctttgaaagacataggttggagaataaggaagaaatatttcttgatgaagattaaaaatcagccaaaggaacggctagtgttaagctgggctgaccttggcccagacaagtatttgtcagataaagattttcagtgtctaatcaaacttctgccttcttgtttgcacccttacatctatcgggttacctttgccacagctaatgaatcctcagcgttgctaattaggatgtttaacgaaaagggaacattgaaggatctgatctacaaggcaaaaccaaaagacccatttctaaagaagtactgcaaccctaagaagattcagggcctggaactccagcaaataaaaacatatggacggcaaatattagaggtactgaagtttcttcatgacaagggattcccttatgggcatcttcacgcctccaatgtgatgctcgatggggacacttgccggctgctggaccttgagaattccttattgggcctgccttccttctaccgatcttatttttcacaattcaggaaaatcaatacattggaaagtgtggatgtccactgctttggccacttactgtatgaaatgacttatggacgaccgccagactcggtgcctgtggactccttccctcctgccccgtccatggctgtggtggccgtgttggagtctacgctgtcttgtgaagcctgtaaaaatggcatgcctaccatctcccggctcttacagatgccattattcagcgatgttttactaaccacttctgaaaaaccacagtttaagatccctacaaagttaaaagaggcattgagaattgccaaagaatgtatagagaagagactaattgaggaacagaaacagattcaccagcatcgaagactgacaagagctcagtcccaccatggatctgaggaggaaagaaaaaaaagaaagattttagctcgaaagaagtcaaaacgatctgctcttgaaaatagtgaagagcattcagcgaagtacagcaactccaataattcagcaggatctggggccagctcacctctcacgtccccgtcatcgccaactccaccctctacatcagggatatctgcattacctccacctcctccacctccaccaccaccagcagctcccttgcctcctgcgagcaccgaggcacctgcccagctctcgtctcaggctgtgaatggcatgagccgaggggccttgctcagctccatccagaatttccaaaaaggaactttgaggaaagccaaaacctgtgatcacagtgctccgaagatcggctgaagcttcctgtttacacttggagggaaaagttcttttttattcctactcacccctaccccccaaactaccctcttcctgggaaagtaattgctgagccagtacagccacaaacagtactattttgcagatgctcatgtaagcagcttttcgagagaaataattctttaagcagaataaagttaggctggcatgcaaaaaaaaaaaaaaaaaaa

SEQ ID NO: 4452 - DNA, 3477 bp, Homo Sapiens
  NM_017772
acatccaagatggcgtccccaggagctgggagcgggtgaccggcggcggggaagcggcctgggttggccctcagattgcggggtctgggggcatctcgccgggcaaacccttggcccgcctacaaggacttcccccggccagagcaatggccgctgagaacagcaagcagttttggaagaggagcgctaagctgccggggagcattcagcctgtatatggagcacagcatcctcctcttgacccacggctcaccaaaaatttcattaaagaacgatcaaaagtcaacacagttcctctgaagaataagaaggcctccagttttcatgagtttgcacggaataccagtgatgcttgggacattggcgatgatgaggaagaggacttttcctcaccttctttccaaactctgaactcaaaagttgctttggcaactgcagcccaagttctagaaaaccacagcaagctgagagtaaaaccagaacggtcccagtcaacgacatcggacgtccctgccaactacaaggtcataaagtccagcagtgatgcccagctgtccagaaactctagtgatacatgcctgaggaacccactccacaaacagcaatcactccctctccggcccatcatccccctcgttgcccggatctcggatcagaacgcttctggggcccccccaatgactgtccgggagaaaacccgcctagaaaaattccgtcagcttctctccagccagaacactgacttagatgaactgaggaagtgtagctggccaggggttcccagggaggttcgacctataacctggagactcctgtcgggctatctcccagcaaacactgagaggaggaagttgaccctgcagcggaagcgggaggaatattttggcttcattgaacagtattatgactctcgaaacgaggaacatcaccaggatacctacagacagattcacattgacattccaaggacgaatcctctcattccgttgttccagcaaccacttgtacaggagatctttgaaagaattctatttatttgggccatccgccaccctgccagtgggtatgtccagggaattaatgacctggtcactccattctttgtcgtcttcctctcagaatatgtggaagaggatgtggagaactttgacgtgaccaacttgtctcaagacatgctgcgaagcattgaggctgacagcttttggtgcatgagcaagctgctggatggaatccaggataactacacctttgcacaaccaggaatccagaagaaggtgaaggcactggaagagcttgtcagccggattgatgagcaggtacataatcacttcaggaggtacgaggtagaatacctgcagtttgccttccgctggatgaacaacctgcttatgcgggagcttcctcttcgctgcaccatccgcctgtgggacacatatcagtctgaaccagaagggttctcccactttcatctctacgtgtgtgcagccttcttgatcaagtggaggaaagagatcttggatgaggaggattttcagggtctcctcatgctgctacagaacctacctacaatacactggggcaacgaagaaattgggctgcttctcgccgaggcatacagactcaagtacatgtttgccgatgccccaaatcactaccgccgataggtgctgtctcctccggggacccagactgccttcatctctgatggcagtctgatcactgtggccactgtgcgagccgtggaccccggccaggaaccactcctgttgtacaaagctcacacccaccgcccaggtcttaactttctggcatccaccactccatgtctctggatgtgtcacttggaccactgtcagtattccatgccgcgtggatgggcccagttctgggagaggacagaaaaggtggtacagggttgtctgcccctttaaaagaaactggacaaagaaggggaaggctcagggtctcacctcacattgtccctacaaggacaggccccaactgataaccgttgcttttttttttttgtgaacatagtttgatttgatcacaggtcaaaaacgccttatattttcgaaagactcctggcccctcttccctcttcctggtttcctagccgttccccttctgccccagtctgagccagtgaggggtagctttttaaaaccattattctagatggaggaggcactgatgcttgtaactctggaaagaggcctacacccaagggctaggaattttatttttccttttctcaccaggtgtctgcatgtgtgtgtgggtgtgaatgtgtatacatgcccatcagcatttagtcacatgtctgaatttctgtgtccagacgagccccatcaaactagttgggaagggccccagtgaccaagtgtataagcatcccttgaagagggattggggcaggggaggcagaaggggctctccagaccccttttccatgatgacccactccaagatattatgtgtaaattgtgttattatgtatatgggtaaagatgtacaaatatatgtcctctttgtagcagatatgattttatatttataatgtgcatcaacatgtgaaagcaatctaggtcactagcacagaggaagttgccaggaaggtggcttcagcacctccaggttggttctgggtgtcctgctgtgaggggtagaacgggaggctgctgaagtgagtagctgagcagctggagccatcccaagcatcagtgtctcagagtcctcctcgcccctttcttcaccccgccccccaacccccagactttcctggagcatctgccctttgctcctagcagcctccccaggaagggactgcagaggcgggcaagccctctctatgtgtttttatccccaccttccccggaatctggggagggcttttgtttttacgttttcaagttcagcattgtattcggacagaagctgtgactgaagactcagtgccaaggaaaggggcttcttgtgtgtccctcgggtttggggctcttctcagagagcagcactccatatcccttactgtcaccttcactccccacacagctcatgagatgtgtgacccctgtttgagttttggtatttggtagtggagggtggggggatgggggccagcagctgtcatcctcctgggaagccgagcagtgtccctggtgggtaacaccctcaagtctctttgccagtgaggccccaccacatcggtgtgagttaggtttctcatctggagctgtttctcaggcattcttcccaaccctcttccttttccccttcggtgtgcctcagtggtctccttcatagagtgagagggcttgagaccctccctcaaccggactaattaaagaaagacacttgtgttcccaagtggtggttttatttttttagtttttatgtttgtatgggaaattgtggataaagtgaaaagaattgtaaataaatggtgtatttcctcctccaaaaaaaaaaaaaaaa

SEQ ID NO: 4453 - DNA, 3298 bp, Homo Sapiens
  NM_017773
attctggcaaagtggtttgctcttttcactctgctttgggtgttgaaggaagacgagcttctcacggagcctctcttgagcctcttggcagtttccccctctgtgcccctcacgtttccaccagaaacgtgaaggcagaggccacagattctccctgagccacctcacttggaagcaccatgtccggatgagatcgcacttcctgcagtgggcattagccacgtccaggtagaaccaaacctgttgcttttgtatgttgggtcaacttggcctgacgtttcagaggtagacacgagatagggagtttgttgcgggggtggggagaagtggtagacatgctggctaactgattatgattaagagaaacttagaagctgaagccagagagcatctcaaaggttcctgatacaatggatggtgtcactccaaccctttcgacaatcagagggaggaccttggagtccagcactctgcatgtgactccccgcagcctggacagaaataaagaccagatcaccaacatcttttccgggtttgcgggactcctcgccatcctcctggtcgttgcggttttctgcatcttgtggaattggaataaacggaagaagcgacaagttccttacctccgagttaccgtcatgcccttgctgactttgccacaaaccagacaaagagccaaaaatatttatgacatcttgccttggcgacaggaagacctggggagacatgagtcgaggagtatgcgcattttcagtactgagagcctcctctccagaaattctgagagcccggagcatgtgccctcccaagcaggcaatgccttccaggagcatacagcccacatccatgccacagagtacgcggtgggtatctatgacaacgccatggtcccccagatgtgtgggaacctcactccctcggcacactgcatcaatgtcagagcttccagagactgcgcaagcatttcttcagaggattcgcatgattatgtcaatgtccccacagcagaagagattgctgagactctagcttctaccaaaagcccttccagaaatctctttgttcttcccagtacccagaagctggagtttactgaggaaagagatgagggctgtggagatgctggtgactgcaccagtttgtattctccaggagctgaggacagtgattcactcagcaatggagaaggttcttctcagatctcaaatgactatgtcaacatgacagggttggatctcagtgccatccaggaaaggcagctctgggtggcttttcagtgctgcagagactatgaaaatgttccagcagcagatcccagtggaagccagcagcaggctgagaaagatgtgccatcctcaaacataggtcatgtcgaggacaagacagatgatcccgggacccatgtccaatgtgtcaaaaggacattccttgcttcaggggattatgcagactttcagccattcacacagagtgaggacagtcagatgaaacatagagaagagatgtcaaatgaggactccagtgactatgaaaatgtgctaactgccaagttaggaggcagggactctgagcaggggcctggcactcagctccttcctgatgaatgaagacccaggtacccagccataaagccacattgagtagtctatcccataggattgactactgcagagtctagtgcagacccgtgatcaccttagtgcttcagtggattcactggttagattaaaaagaggctgagatgagcagtgaactaagaggccacacaaaagcagaggtttgggaattccagaagggaattcttctcaagcagagtgtggttatctcctgtaccagcctaagaatgtttgctgaaactgcttcctagaactgtgaagaaagcaggaaagtagtgcacagtagtctaagattattaccttcattaataccaacaggctgcaaagcaagagtatagattattgtataatccagtcagaggtcaaaaggaaggaagaagttggagtggagtggggtgggcaatttccattttaaagagtgtaggcaggccaggtgcagtggctcatgcctgtaatcccagcattttggtaggccgaggagggcagatcacttggtgccaggagttctagaccagcctggccaacatgacccatctttactaaaaatacaaaaattagccaggcgtggtggtgtgcccctgtaatcccagctactcaggaggctgaagcaggagaatcgcttgaacccgggaggtggaggttgcagcaagccgagattgtgccactgtactccagcctggtgacagagcgagactccctctcaaaaaaaaaaacaaacaaaaaagaagtgtgggcaaccaaatgtaggtaaggatgaagaagaacaggaactctcactggtggctgatgggattgcaaagcgtcagggcagctttgaaaaacttttcagcagtttcttataagcataacttatcatatggcccagccatttcactactagaaattgacgcaagtgaactgaaaacttatgttcacacaaaaactcgcacatgactgtttatagcagcttcattcataattaccaaaaactagaaataacccagatatccttcaacaggtgattggataagctgttgatatccattccttgagtttatccatactcaacagtaaaaaatgaactcttggttcacacaataatatagacatatcttaaatccattttgctaagtgaaagaagctaggcctaaaagtctacatgttgggcgattctatttatatgacattctggaaaaggcaaaactatagggatgaagaacagatcagttgttgtcaggtttgagaaaaggagggaagtttgctacaaaggggctgcaaagggaataggctgatggagctgttctgtatggtactgtgtggtggatacatgacaatatccatttgcaaacacaagaactatacacatggccaggcgcggtggctcacacccgtaatcccagcactttgcggggccgaggcaggggaacacaaggtcaggagatcaagactgtcctggacaacatggtgaaaccctgtctctactgtctctaacatttgtaaacctgtctctaatttgtaatttgtaaaccctgtctctcatatttgtaaaactacaaaaattagcttggcatggtggtgtgcgcctgtagtcccagctactaggaggctgaggcaggagaatcacttgaaccaggaaggcggactgcattccagcctgggcaacagagaaagactctgtctcaaaaaaaaaaaaaaaaaaaaaa

SEQ ID NO: 4454 - DNA, 3272 bp, Homo Sapiens
  NM_017774
aaataaacgtggcgggacgtatgtgtcatggcgctctccatctaaagtctgtgcagcttccggagagtggcgggttgattttctcactttggactggtttttacttcccgacttctggactcatctttcaagaggactttagactaattgcagataattaagagaatatgccttctgcatcctgtgatacactactggatgacatcgaagatatcgtgtctcaggaagattcaaaaccacaagataggcattttgtaagaaaggatgttgtcccgaaggtacgaaggcgaaatacccaaaaatatttgcaagaggaagaaaacagtccaccaagtgacagcactattccaggcatacagaaaatttggatacgaacatggggttgttctcataataattcagatggagaatatatggctggacagctagctgcttatggctataaaattacagaaaatgcatccgatgcagatttatggctcctgaacagttgcactgtaaaaaacccagctgaagaccactttagaaactcaattaaaaaagctcaagaggagaacaagaaaatcgtactggctggatgcgttcctcaagcccagcctcgccaggactaccttaagggactgagtatcattggggttcagcagatagatcgtgtggtagaagttgtggaggagacaattaaaggtcactctgtgagactgctgggtcagaaaaaggataatggaaggcggcttgggggagcacgattggatttgccgaagattaggaagaatccactgatagaaatcatttccatcaataccgggtgtctcaatgcttgtacctactgcaaaactaaacacgccagaggaaatttggccagttatccaattgatgaactagtagatagagccaaacaatcttttcaagagggtgtttgtgagatatggttgaccagtgaagacacgggggcttatggcagagatattggcaccaatctccccacactcctgtggaaactggttgaagtgattcctgagggagcaatgctgaggcttggcatgacaaatccgccctatattttagagcatctggaggaaatggcaaaaatccttaatcaccccagagtctacgcttttctgcacataccagtccagtctgcctccgacagcgtactcatggaaatgaaaagagaatactgtgtggctgacttcaaaagagtagtggattttctgaaagagaaagttcctggaataactattgctacagatattatctgtggttttcctggagaaacagatcaggattttcaagaaacagtgaaacttgttgaagagtacaaattcccaagcctgtttattaaccaattttacccaagaccaggaactcctgctgcaaaaatggaacaagttccagcacaagtgaaaaagcaaaggacaaaagatctttctcgggtgtttcattcttacagtccatatgatcacaagattggtgaaagacaacaagtgttagtaacagaagaatcttttgattccaagttttatgttgcacacaatcaattctatgagcaggttttagtgccaaagaaccctgcgttcatggggaagatggttgaagtggacatctatgaatcaggcaaacattttatgaaagggcagccagtatctgatgccaaagtgtacacgccctccatcagcaaaccgctagcaaagggagaagtctcgggtttgacaaaggacttcagaaatgggcttgggaaccagctgagttcaggatcccacacctctgctgcatctcagtgtgactcagcgagttccagaatggtgctgcccatgccaaggctacatcaagactgtgcgctgaggatgtccgtgggcttggctctgctgggtcttctttttgctttttttgtcaaggtctataattagaatacaactaatggaaacatctataaagaagaatacatttctaattaaaatcttcaatgaacaggaaagcgacatctccattctccaagggcaataatttgtactggtcatgctgcctccttctcagccactcttcttaatgaggctccccctgtctcacattgagttgggcccattggttatttgacctaaaacctaatcaccgctaccatagcacatccttcaaattaaactgcttttggtttacttttagcaagaaatgcaagcggttgcatttttttctgtttgtttcaatctctaatctttaagtcagaacctaattgtacagtggctctggccatcttttcctcatgtggaagaattttctatctttaataaactttttctttgttttttttttccagatggagtttcgctcttgtcccccaggctggagtggtgcagtggcacgatctcaggtcactgcaacctctgcctcctgggttcaaacgattctcctgcctcagcctcccaagtagctgggattacaggcatgcgccaccaagcccagacaatttttttgtgttttcagtagagacggagtttcaccatgttggccaggctagtctcgaactcctgacctcaagtgatccgcccgcctcggcctcccaaagtgctaggattacaggcgtgagccactgcgcccggcctctttaataaatatttttaagtgcatcttccccttcaggctttgtttggagtcccagtgctacaaacattgtatttttcacagcagatgtgttcctgaaaagtgtatagaaacctgttctgggaacctgaatgcttttggaatgcacggggagagtctgccagctaaaggactcctggcaacattctgtgaaatatgaaactggaaaactggatttgtcgaaaactaattgtgcccattttctcacatttttgatccattggggttttttttttgtttttgtttttttttttttttgagtcaaggtctcactctgtcaccctggctggagtgcaatggcactatcttggctcactgcagccttgacctcctggactcaagcagtcctcctacctcagcctccctaatagccaggggctacaggcatataccaccatgcccaactaattttttaattttttgtagagatgagtgtcactatgttgcccaggcttgcctggaactcctagcctcaagcagtcttcttgcctcagcctcccaaagtgctgggattacaggcgtgagccactccacccagcccagattaaatgtttttatttctacctgccatcattggtctttactaagtgaagtgacttctttctttaacaataaatagaattggtatactaagcaaa

SEQ ID NO: 4455 - DNA, 2784 bp, Homo Sapiens
  NM_017775
gatgccccgcccgcgcccatggcgcagccacacacgacctcggtcccgtacttcgcgcgctctcctgcaccgccgccgccatctcgctcaggagctcctccacaaccgccggcaacactacggccatcgcgccgcaggacacgccctccacgaccggcggaccgccgcgacgctccagctgactgcgcctacctgtggaggatcctgaccccccgccggggcagggcgagacggagtgacgtcggggcgcgtcatcgcgcgtgcggacgcagggatgtcctgctcagtcgtcagggcccggccaatccggagggcgctcggcgcgtggtcgggggccaggagcgcgtctggcctgcagtgcgcagaggacgcggcgggagcatgttccggctcctgagctggagcctgggccgaggcttcctgcgggccgcggggcggcggtgccggggctgctccgcgcgcctgctcccggggctggcaggaggtccggggcccgaggtgcaggtgccgccatcccgagtcgcgccgcacggccggggcccaggcctgctgccgctgctggcagcgctcgcctggttctcgaggcccgctgcggcagaggaggaggagcagcagggagccgacggggccgctgccgaggacggggcggacgaggccgaggcagagatcatccagctgctgaagcgagccaagttgagcattatgaaagatgagccagaagaggctgagttaattttgcatgacgctcttcgtctcgcctatcagactgataacaagaaggccatcacttacacttatgatttgatggccaacttagcatttatacggggtcagcttgaaaatgctgaacaactttttaaagcaacaatgagttacctccttggagggggcatgaagcaggaggacaatgcaataattgaaatttccctaaagctggccagtatctatgctgcgcagaacagacaggaatttgctgttgctggctatgaattctgcatttcaactctagaggaaaaaattgaaagagaaaaggaattagcagaagacattatgtcagtggaagagaaagccaatacccacctcctcttgggcatgtgcttagacgcctgtgctcgctaccttctgttctccaagcagccgtcacaggcacaaaggatgtatgaaaaagctctgcagatttctgaagaaatacaaggagaaagacacccacagaccattgtgctgatgagtgacctggctactaccctggatgcacagggccgctttgatgaggcctatatttatatgcaaagggcatcagatctggcaagacagataaatcatcctgagctacacatggtactcagtaatctagctgcagttttgatgcacagagaacgatatacacaagcaaaagagatctaccaggaagcactgaagcaagcaaagctgaaaaaagatgaaatttctgtacaacacatcagggaagagttggctgagctgtcaaagaaaagtagacctttgacaaattctgtcaagctctaaatccatttttgtgtagggagaataatgtctagtaatgtggaagaatagctatcattcctgtctctgtggcacccgatcaatggcttaaatctgtcgtttttgatattcaggtttcctcaatttagccttagtgaaggaggggttgtacacactgccatttttgtattttaaaggaaaaatgactttcattcccaactgattatgacctttcaggatgtcgtcaagtgatgctttcagttgtaacacgtgacttggtgctgtccctgctggtctaagtagaactgtagattcatatgggctggtgttcctgtgcgctgtgggtgtggtgattcagcctggcatttctaccataagtttttggtctgctgatttgctgccctgtcttctcttactttactttatcaatacctggcaaactgaccagaattaccttcctcatggcaaagggggattatggtgaattgttgttcttatagtctgtttcatgaagcacaagtggaatttaatacataaaagagaaaaatatcttagtttgctaccagcatccagcatgaagttgtaaagtggggattaggcacgtgacagtatagcacccatttgaatttaaataaaagtgaaccatatttatctggttatataaaactaaaaatgggggtgtttatataaaactaaaaactaagaatgatgtaaccttttgtctgtgttatctgaacactctacttcctttgcagccttagtcacacaactgagtcatctcaagtactctttaaggacacacagcccaggctgttctgagtcagaataggcccctacaggtatattttaaaactcttcgtaattctaatgtgtactgctggtatagctgaactactgacctggatcttagtcctagcctttttgcttttgcaatttcagtatcttcatctctaaactagggaaacactgggattctttcttagctgtgggggaaggtatttggttagatgactttgaatgaatagactgctgtgctgaaagagctttatcacactgtctcaaagtatgtaaagatacataggtggatgctcttactgcagcagtcatgaatacatttttagccatttacctaaggaaaaagacagtttttctaggtaccatgaaggaagattgaccctgttggtatgcctgtgggggtgggatgtgagtgggactgataaactgatacttttggttcgtatgtacatactggaagaatcttcataataaatgagactacacaac

SEQ ID NO: 4456 - DNA, 2443 bp, Homo Sapiens
  NM_017776
ctactgcgcgtgcgcggcgctgcgacacactccgaccccatcccgcgttcccagggggcggtgggaagcggaagtgctccgctgacccgggagggcggtccctagttcacactggctgttgtcagcggcctctgaggtttcaggctcttggcggtgaaggtcagagtgcagacctgagaccactgctcaccgacttcagactccagtttatctgtgccccagcttcctcacttagtctcagaagacttaggctgaggcctcagaaggagatctccatcctttgtccagagcagaacaggatggccatgtcccaggaatcattgaccttcaaggacgtgtttgtggacttcaccctggaggagtggcagcaactggactctgcccagaagaacctctacagggatgtcatgcttgagaactacagccacctggtgtccgtggggtatctagttgcgaagccagatgtgatcttcaggttgggaccaggtgaagagtcctggatggcagatggggggaccccggtacggacctgtgcagaagtctggcaagttgatgagcagatagatcactacaaggaaagccaagacaaacttccttggcaagctgcattcataggcaaggaaacactgaaggatgaaagcggtcaagaatccagaacatgtagaaaaagcatttatctgagcacagaatttgattctgtaaggcaaagactccctaaatattattcgtgggaaaaggcattcaaaacatcatttaaactttcttggtcaaaatggaagctatgtaagaaagaaagatgatggatgtaaagcatattggaaagtatgcttccattataatcttcataaagctcaacctgcagagagattttttgaccctaatcaacgagggaaagccctccaccaaaagcaagcccttagaaaaagtcagagaagtcaaactggggagaaactctacaaatgtactgaatgtggaaaagtgtttatccagaaagcaaacttagttgtacatcaaagaactcacaccggagagaaaccttatgaatgctgcgaatgtgcaaaagccttcagccagaagtcaaccctcatagcacaccagagaactcacacaggggagaagccctatgaatgcagtgaatgtggaaaaacctttatccagaagtcaactctgattaaacataagaaaattcatatggagagagaccctataaatgcagtgtctgtgagaaagccttcagtaggaagtcaactctcattaaacatcagataattcatatgggagaaaccttatgaatgtaataaatgtgggaaatcttttagtgttaaatcaactctcattgtatgtcacagaacataaatgcataagttgcatgctattgtgaatagtgtgatgaaattttgcactgtcctgctctttcctgctcaggatgcaaatcagtgaatctttttttttttttttttgagacagagtcttgctctgtcatccaaactggagtgcagtggcacaatcttggctcactgcaacctccgcctcttgggttcaaccgattctcctgcctcaacctcccaaatagttgggattacaggcacatgccaccatacgcagctaatttgtatttttagtagagacagggtttcaccatgttggccagcctggtcttgaactcctgacctcaagtgatccgcctgcctcagcttcccaaagtgctgggattacaggcatgagccactgcacccggcttgaatcatccttttgtccagtattatatccatgctgtatatgctacccgcccactagtcccttagctgtctcagttgtcagattgactgtcatgggattgcagtgcttgcattaaagctacccttattgtataatgaccccaaagtgcaagagtagtgatgttggcaatttgcatacaccaaaaataagttataaagtgcttccttaaagtgaaatggttaaagttcttgacttaataaagaaaaaaaatgtatgctgaggttgttaagatttacagtaagaatgaatcttctatccaagaaattgtgaaggaggaaaaagaaacttgtgctagttttgctgtcacatctgaaactgcaaaagttgtggccacagtgcatcataagtgctaagacgaaaaagacattaaatttgcggatggaaggcgtgaatagaaatgggttctgacagcaatcaggttcggtactattcacagtttcaggcatccgctagggatcttggaacatatcccccatggataagggaggggtactgtaccttgtcatattgtgcattaaagaattcattgagtgtaatcatgtaagtctaacacacatttaaaaagctctcagatatcatttcgccttcggttgatgtaagaaaattcaaaagctactcaaatcattcaataaatgataaaattatttaaaaaaaaaaaaaaaaa

SEQ ID NO: 4457 - DNA, 2408 bp, Homo Sapiens
  NM_017777
ccgatccagcgtctccgttgccaggaaaacagagcggcgcgctttccggcgcagtcgcggcgcgtcgcagctgtcatggcggagaccgtctggagcactgacaccggggaggcagtgtatcgctcccgggaccccgtgcgcaacttgcgcctccgagtccacctgcaaagaatcacatcaagcaactttcttcattatcagcctgctgccgagctcgggaaggacctcatagacttggccacttttaggcctcagccaactgccagtggacaccgcccagaggaagacgaagaggaggagattgtgattgggtggcaggagaagctctttagccagtttgaagtagatctgtaccaaaatgaaacagcctgtcagagtcctttggattatcagtaccgtcaggagatcctgaagctggagaattcgggtggcaagaaaaaccgacgaatctttacctacactgactctgatagatacaccaatttggaggagcactgtcagagaatgaccactgcagccagcgaggtgccttcattcttggtcgagcgaatggcaaatgtcaggcgtcgccggcaggacaggcgagggatggagggcggcatcctcaagtcacgcatcgtcacctgggagccctcagaagagtttgtcaggaacaaccacgtcattaacacccctcttcagacaatgcacatcatggcagacctggggccctataaaaagcttggctataagaagtatgaacatgtcctgtgtactctgaaggtggatagcaatggtgtgatcacagtaaagcctgacttcacgggcctcaaaggaccctacaggattgagacggagggggagaagcaggagctgtggaaatatacgatcgacaatgtttccccccacgcacagccggaggaggaggagcgggaacggcgagtgttcaaggatctttatggccggcacaaggagtatctcagcagcctcgtaggcaccgactttgagatgactgtcccaggtgccctccggctctttgtaaatggagaggtcgtttcagcccaaggctatgagtatgacaatctctacgtccacttctttgtagaattgccaactgctcactggtcaagcccagcattccagcagctctcaggagtaacacagacctgcaccaccaagtccctggcaatggacaaggtggctcacttctcctacccattcacgtttgaagccttcttcctccatgaggatgaatcttctgatgcactcccggagtggcctgtgctctactgtgaggtcctctcgctggacttctggcagaggtaccgtgtggaaggctatggggctgtggtgctgcctgccactccaggctcacacaccctgacagtctccacgtggagacctgtggagcttggcacggtggctgagctgaggaggtttttcattggcggttctctggaactggaggacctctcctatgtacggataccaggatccttcaagggggaacgcctgagccgctttggactccgcacagagaccacaggcactgtcaccttccgcttgcactgtctgcagcagtccagggccttcatggaatcgagctcccttcagaaaaggatgcggagtgtgttggaccgtctggaagggttcagccagcagagttccattcacaatgtgctagaggccttccgtcgagcccggcgccgcatgcaggaggcccgggaaagcctcccgcaggacctagtgagcccctctggaaccctggtctcctagctcacagcagccctggcccacagtgcaagaggacaagatgggggatatctgaggccagtgctctcctgcctcttcgtctttctgattagagaccacgttggtctgctgagaaccagaaaagctgggaaattcccggctggcccctctgcctagccttctgcagggtcttctccctaccctgtggaaataaagccagagaccctgtggccccccctttatatttgcagccactgtcaatgggcatcacagcaaggcaggctttttgatctgaagctgtttggggtgaccccatagtgagtctggccttgactcacttttctggcttgtctcacagtagcaggggatctgctgttctccaccctttaaaaatggagcctttcatcttccaagaccaaagaaggaaggaaggtggacggtgagagggtcttaaatccccagcctgtgagtctcagcctctttccagggaagcctcattctactgcttggggcttgctgaggttgagatatgagttatttctgagtaagtgaaggctgaaggcagtgctgagtcctttctgctagctgggtggtatcttttactgtgtttttttgtttgtttgtttttttgttttttgttacataaaccccttttattttgactgataaaaaaaaaa

SEQ ID NO: 4458 - DNA, 10469 bp, Homo Sapiens
  NM_017780
gcggcggcggcagcggcggcggcggcggcggcgcgggggttgagtcgtggtggtgcggacgcgctcgtgctcgggaactatcggattaaacttgaatcgagtgaaattacacaaaggagcgccgcggaggaggcggcccggggacccggacaccctgaaactcaccagagacccgttcgcccccggccaactccgtgcccgtggattcagccccctggccgcagctgccgagccaactccggagcccgctctgcgttttgttttcccctcggcactaggcagcggaggagcccgaccgacccggacctatatccagactttgcctgacactgcagggtccaagagaattaaagaaatatggaatgacatgaagaagattagttaaggattataggctttgagggcaaacacctcagtgaagtgaagcacaggcaagctcctgagctgtggtttggaggagccgtgtgttggaagaagatggcagatccaggaatgatgagtctttttggcgaggatgggaatattttcagtgaaggtcttgaaggcctcggagaatgtggttacccggaaaatccagtaaatcctatgggtcagcaaatgccaatagaccaaggctttgcctctttacagccatcccttcatcatccttcaactaatcaaaatcaaacaaagctgacacattttgatcactataatcagtatgaacaacaaaagatgcatctgatggatcagccgaacagaatgatgagcaacacccctgggaacggactcgcgtctccgcactcgcagtatcacacccctcccgttcctcaggtgccccatggtggcagtggtggcggtcagatgggtgtctaccctggcatgcagaatgagaggcatgggcaatcctttgtggacagcagctccatgtggggccccagggctgttcaggtaccagaccagatacgagccccctaccagcagcagcagccacagccgcagccaccgcagccggctccgtcggggccccctgcacagggccaccctcagcacatgcagcagatgggcagctatatggcacgtggggatttttccatgcagcagcatggtcagccacagcagaggatgagccagttttcccaaggccaagagggcctcaatcagggaaatccttttattgccacctcaggacctggccacttgtcccacgtgccccagcagagtcccagcatggcaccttccttgcgtcactcggtgcagcagttccatcaccacccctctactgctctccatggagaatccgttgcccacagtcccagattctccccgaatcctccccaacaaggggctgttaggccgcaaacccttaactttagttctcggagccagacagtcccctctcctactataaacaactcagggcagtattctcgatatccttacagtaacctaaatcagggattagttaacaatacagggatgaatcaaaatttaggccttacaaataatactccaatgaatcagtccgtaccaagataccccaatgctgtaggattcccatcaaacagtggtcaaggactaatgcaccagcagcccatccaccccagtggctcacttaaccaaatgaacacacaaactatgcatccttcacagcctcagggaacttatgcctctccacctcccatgtcacccatgaaagcaatgagtaatccagcaggcactcctcctccacaagtcaggccgggaagtgctgggataccaatggaagttggcagttatccaaatatgccccatcctcagccatctcaccagccccctggtgccatgggaatcggacagaggaatatgggccccagaaacatgcagcagtctcgtccatttataggcatgtcctcggcaccaagggaattgactgggcacatgaggccaaatggttgtcctggtgttggccttggagacccacaagcaatccaggaacgactgatacctggccaacaacatcctggtcaacagccatcttttcagcagttgccaacctgtcctccactgcagcctcacccgggcttgcaccaccagtcttcacctccacaccctcatcaccagccttgggcacagctccacccatcaccccagaacaccccgcagaaagtgcctgtgcatcagcattccccgtcggagccctttctagagaaaccagtgccggatatgactcaggttagtggaccgaatgctcagctagtgaagagtgatgattacctgccatcaatagaacagcagccacaacaaaagaagaagaaaaagaaaaacaaccacattgtagcagaggatcccagtaaaggttttggtaaagatgacttccctggtggggtagataaccaagaactaaataggaactcactggatgggtcccaagaagaaaaaaagaaaaagaaaaggtcaaaggcaaaaaaagacccgaaggaaccgaaagaacccaaggagaaaaaagagcccaaggaacccaagaccccgaaagcccctaagattcccaaagagccaaaggaaaagaaagcaaaaactgccacgccaaaacccaaatccagcaaaaagtcaagtaataagaaacctgactcagaagcaagtgctttgaagaaaaaggtcaacaagggaaaaacagaaggttctgaaaattcagacttagacaaaacacccccaccatctcctcctcctgaagaagatgaggacccaggtgttcagaagagacggtccagcagacaggtgaagagaaagcgctacactgaagacctggagttcaagatttctgatgaggaggcagatgatgcagatgctgctgggagggattccccctccaacacctcccagtcagaacagcaggaatctgttgatgcagaaggcccagtggtagaaaaaattatgagcagtcgttcagtaaaaaagcagaaggaatctggagaggaggtagaaattgaggaattctatgtgaaatacaaaaacttctcttatcttcattgtcagtgggcatctatagaagatctggaaaaagataagagaattcagcaaaaaattaaacgatttaaggcaaagcagggccagaacaagttcctttcagagattgaggatgagctttttaatccagattatgtggaggttgaccggataatggactttgcacgtagcacagatgaccggggagagcctgtgactcactatctggtgaagtggtgttcacttccttatgaagacagcacgtgggagcggaggcaggacatagatcaagcaaagatcgaggagtttgagaaactaatgtccagggagccggaaacagagcgtgtggagcgacctcctgctgatgattggaagaaatcggagagttccagggagtataaaaacaataacaaactcagggaataccagttggagggagtaaactggctacttttcaattggtacaacatgcgaaactgcattttagcagatgaaatgggtttgggaaaaactatccagtccattacatttctctatgagatatatttgaaaggaatccatggcccttttttagtaattgccccattgtccacaatccccaactgggaaagggaattccgaacctggacagagttgaacgtggttgtgtatcatgggagtcaagctagtcgtcggaccattcagttgtatgaaatgtacttcaaagatccccagggtcgagtgataaaggggtcctataagtttcatgccatcatcactacatttgagatgattttgactgattgtcctgagctgcggaatattccatggcgctgtgtagtcattgatgaagcccacaggctgaagaacaggaactgcaagctgttggagggactcaagatgatggacttggaacacaaagtgctgctgacgggaaccccactccagaacactgtggaagaactcttcagcttgcttcatttcttggaaccaagtcgcttcccttcagaaaccacatttatgcaagaatttggtgatctaaaaacagaagagcaggtgcaaaaacttcaagctattctaaagccaatgatgttgagacgtctcaaagaggatgtagaaaagaacttggcccccaaagaagaaactattattgaagttgagctaacaaacattcagaagaaatattaccgagccatccttgagaagaatttcacatttctttccaaaggcggtggtcaagctaacgtacctaacctattaaacactatgatggaattgcggaagtgctgcaatcatccgtaccttatcaatggtgctgaagagaaaattttggaagagtttaaagaaacacacaatgcagagtctccagattttcagctccaggcaatgatccaggctgctggcaagctagtgctgattgacaagctgctgccaaaactgaaggctggtggccacagggtgcttatcttttcccagatggtgcgctgcttggacatactggaagactacctcattcaaagacggtacccatatgaaaggatcgacggccgagtaagaggcaacctccgccaggcagctatcgacagattctccaaacctgattctgataggtttgttttcctcctgtgtacaagggcaggaggtttaggcattaacctcactgctgctgatacctgcatcatctttgattcagactggaatccccaaaatgacctccaggctcaggctagatgtcatagaataggacagagcaaatctgtgaaaatctacaggctgattacaagaaattcctatgaaagggaaatgttcgacaaggctagtttgaaactgggcctggataaagctgtgctacagtctatgagtggaagagaaaatgctaccaatggggtacaacagctttccaagaaagaaatagaggatcttctacgaaaaggggcctatggtgcactcatggatgaggaggatgaagggtctaaattctgtgaagaagatattgatcagatcctcctacgtcgaacccacaccattaccattgagtcagaagggaaaggttccacatttgctaaggccagttttgttgcatctggaaataggacagatatttccttggatgatccaaatttctggcaaaagtgggctaagaaggctgaattggatattgatgccttaaatgggaggaacaacctggttattgatactccaagagtgagaaagcagaccaggctctacagtgcagtgaaggaagatgagctgatggagttctcagacttggaaagtgattctgaagaaaagccctgtgcaaagccacggcgtccccaggataagtcacagggctatgcaaggagtgaatgtttcagggtggagaagaatctgcttgtctatggttggggacggtggacagacattctttcccacggacgctataaacgccaactcactgagcaagatgtagaaaccatctgcagaaccatcctggtgtactgtcttaatcattacaaaggggatgagaatatcaaaagcttcatctgggatctgatcacacccacagcggatggccagactcgagccttggtcaaccattccggtttgtcagctcctgtgccaaggggaaggaagggaaagaaggtgaaagcccagagcacacagccggtggtgcaggatgccgactggctggccagctgcaacccagatgccctgttccaggaggacagctacaagaaacacctgaagcatcactgtaacaaggtcctgctgcgtgtccgcatgctgtactacctaagacaagaagtgataggagaccaggcggataagatcttagagggtgctgactcaagtgaagccgatgtgtggatccctgaacctttccatgctgaagttcctgcagattggtgggataaggaagcagacaaatccctcttaattggagtgttcaaacatggctatgagaagtacaactccatgcgagctgaccccgcgctgtgctttctggaacgagtcggtatgcctgatgccaaggccatagctgccgagcaaagaggaacagacatgctagcagatggtggtgacgggggagaatttgatagagaagatgaagacccagaatataaaccaaccagaacaccgttcaaagatgaaatagatgaatttgcaaattctccttcagaggataaggaagaatccatggaaatacatgccacaggcaagcacagtgagagtaatgctgagttaggccaactttactggcctaacacttcaaccctgactacacgtctgcgccggctcattactgcctatcagcgcagctataaaaggcaacagatgaggcaagaggccctaatgaagactgaccggcgcagacggcggcctcgagaggaagtgagagctctggaagcggaaagggaagctattatatctgagaagcggcaaaagtggacaagaagagaagaggctgatttttaccgtgtggtatccacctttggggttatttttgaccctgtgaaacagcaatttgactggaaccaatttagagcctttgccaggcttgacaaaaaatctgatgagagtttggagaaatacttcagttgttttgtggccatgtgtaggcgagtatgtcgaatgcccgtcaagccagatgatgaaccgcccgacctctcctccataattgagccgatcacagaggagcgagcctctcgaactctgtaccgcattgagctgctacggaagatccgcgagcaggttctccatcacccccagctgggagagaggcttaagctctgccagccaagcttggatctgccagagtggtgggagtgtggacggcatgaccgagacttgctggttggtgctgctaaacacggggtcagtcggacggattatcacatcctcaatgaccctgagttatccttcttggatgcacataaaaactttgctcaaaacagaggggcaggtaatacatcttccttgaacccactggcagttggatttgtccagactcctccagtcatctcatctgctcatattcaagatgagagggtactggaacaagccgaaggcaaagtggaggagcctgaaaacccagctgccaaggagaaatgtgagggcaaagaagaggaagaagaaaccgatggcagcgggaaggagagcaagcaggaatgtgaggcagaggccagctctgtgaaaaatgaactgaaaggtgttgaggtcggcgcagacactgggtccaaatctatttcagagaaaggttccgaagaggatgaagaggaaaagctggaggatgacgataagtcggaagagtcttcccagcccgaagcaggagctgtctctagagggaagaattttgatgaagaaagcaatgcttccatgagcactgctagagatgaaacccgagatggattctacatggaggacggagatccttcagtagctcagctccttcatgaaagaacatttgccttctcgttttggcctaaggatagagtaatgataaaccgcttagacaacatctgtgaagcagtgttgaaaggcaaatggccagtaaataggcgccagatgtttgatttccaaggcctcatcccaggttacacacccaccacagtggacagccccttgcagaagaggagctttgctgagctctccatggtcggccaagccagcattagtgggagtgaggacatcactacgtctcctcagttgtcaaaggaagatgccctcaacctctctgtccctcgccagcggaggaggaggaggagaaaaatcgaaattgaggccgaaagagctgccaagaggcgaaatctcatggagatggttgcccagcttcgagagtctcaggtggtctcagaaaatggacaagaaaaagttgtagatttatcaaaggcctcaagagaggcaacaagctctacctcaaatttttcatctctttcttcaaagtttatcttgcctaatgtctcaacaccagtgtctgatgcctttaagactcaaatggaactgctccaagcaggcctttcgcgcacacccacaaggcatctccttaatggctccctagtggatggagagcctcccatgaagaggaggcggggaaggaggaaaaatgtggagggacttgatctgcttttcatgagccacaaacggacgtcattgagtgcagaggatgctgaggtgaccaaagcttttgaagaagatatagagaccccaccaacaagaaacattccttctcccggacagctggacccagacacacggatccctgttatcaatcttgaagatgggactaggctggtgggggaagatgctcctaaaaataaggatttagttgaatggctgaagctgcaccctacttacactgttgatatgccaagttatgtaccaaagaatgcagatgtgctgttttcctcatttcagaaaccgaaacagaaacgacatagatgtcgaaaccctaataaattggatataaacactttgacaggagaagaaagggtgcctgttgtcaataaacgaaatgggaagaagatgggtggagctatggcgcctccaatgaaggatctacccaggtggctggaagaaaatcctgaatttgcagttgctccagactggactgatatagttaagcagtctggttttgttcctgagtcgatgtttgaccgccttctcactgggcctgtagtgcggggagagggagcgagcagaagaggaagaaggcccaaaagtgagatcgccagagcagccgcggccgccgctgctgtggcctccacgtcagggatcaaccctttgctggtgaacagcctgtttgctggaatggacctgacgagccttcagaatctccagaatctccagtcgctccagctggcaggcctcatgggcttccctccaggactggcaacagctgccaccgccggaggcgatgcgaagaaccctgctgctgtgctgcccctgatgctgccaggaatggcgggcctgcccaacgtgtttggcttgggcgggctgttgaataaccctctgtcagctgctactggaaacaccactactgcttctagtcaaggagaaccggaagacagcacttcaaaaggagaggagaaaggaaatgagaatgaagacgagaacaaagactctgagaaaagcacagatgctgtttcggctgctgactctgcgaatggatctgttggtgctgctactgccccggctggattgccctcaaacccgctagccttcaaccctttcctcctgtccacaatggccccgggcctcttctacccatccatgtttctacctccaggactggggggattgacgctgcctgggttcccagcattggcaggacttcagaatgccgtgggctccagcgaagaaaaggctgctgacaaggctgagggaggaccctttaaagatggagagacccttgaaggcagcgatgccgaggagagcctggataagactgcagagtcctccctcttagaagacgaaatagcacagggtgaagagctagactcacttgatgggggggatgaaatagaaaacaatgaaaatgatgaataaccagtaccagttccagttcaagtgtttaaaacttttgacaagtggtagtcctactgtttacactcacagttaatgttcatacctagttttataagctgttctgtaacatagtgtagcaaaaaaaaaagttcaagtcatgttatacaggtgtgtcaaaaggtatcttggtcattaagtattgtgcagtgcattatttattatccctaggagagatgaaatttgagaggtgatcatgtctttttaaggaaacttacataatgctctgctttttttttttctcttggtaccattggtattataataaagagcaatttgtaactgagtggcactaatggaagaaagtgctgctcaaaggaagtatgaagttatatatttaattttttaattttaatttttaatttttttgctgtgaaggtcaagctgaaatttaccatacatatcatacttgctcatttgtttccctttttgactgtatgggggttcccacactcgtgcatacacacacatccatacactctgacaatctccacgctagtgtgaacgcctctgtcccgaggcgcagcaataataaggcagctgttgaatgtgaagggtccctttggaaaattaacctactgggagggttcttgccagacagaactacagttccattgtctcgtggtcttgtaatgcactggtaaaaacaaaataaatagatgaataaataaagagtgagagaagagagaatcaggtaccttttttaaattaaaggactttgttactttagccacaaagctaaaacagcattacctcagctctaaactagccttgaagtttacagacatgactttgtaaatgtattgtttttctttgttgtgatgtccttttatttttttctttgaaaactgctatcatgtaagataaaatgtaaattgctgccaactgtagtaatgatgcttttaataaaagtgacccatgatatgcagagatgtaaaaaaaaaaaaaaaaaaaaaaaaaaa

SEQ ID NO: 4459 - DNA, 4231 bp, Homo Sapiens
  NM_017784
ccctgagctgtgactttgctccgccggtgataatttccaggttactgtgtaggagcgtctggcgcagcatcgtgtgcggaagaccgagagagggagtgtgcgtgtgagcctgtcaggccgggcgggtccatatccgggtggaccgggtgggtggggctgcccctccctccaggtcccgaggtggataaggggtggggagtgacgtgcagagattccctttcgccccttcggatccaagagagggtggcagaaggaatgcgtgggtgacttggcgtggatttagggcgtgcccaccctgcagatcggcctcctagagtgtcccgagggcctgagaggccgcagggacacgaaggaagagaaggaggaacccgaagagggctcgcctagccggccacccgctccgaacttgcccgggaaactagtgcggagggaggggccgggccctggccgcggcgggaggaggggcggccgcagctgcatccagccccgttggcttccttcccagctctccttcgcctcctcctcctcttcctcctgtatgagtcaggcatttcccggggatttggagcaggcacgcgcggcccgggcgtccggagctgtagcagcagcagcagccgccgtgccggggccgccaccgcggcgggcacccgcgtcccgggcgcccacggaccatggagagggcagtccagggcacagacggcggcgggggtagcaacagcagcagccgcagcagcagccgtgctacctcggcgggctcctcgccctcctgctctctggcgggccggggggtctccagccggtcggcggcggccgggctcggcggcgggggaagccgcagcagcccgggctctgtggccgctagcccgtccgggggaggcggccgcaggagggagccggcgctcgagggcgtgctcagcaaatacaccaacctcctccagggctggcagaacaggtacttcgtactggatttcgaggctggcatcctgcagtattttgtgaatgagcaaagcaaacaccagaagcctcgaggagtcctgtctttatctggagccatagtgtccctgagcgatgaagctccccacatgctggtggtgtactctgctaatggagagatgtttaaactgagagctgctgatgcaaaagagaaacaattctgggtgactcagcttcgagcttgtgccaaataccacatggaaatgaattctaagagtgctccaagctcccgaagccgaagtctcactttgctcccacatggaacacccaattctgcgtctccctgtagccagagacacctcagtgtgggggcccccggtgttgtcacaatcacgcatcacaagtcgcctgcagccgcccgaagagccaagagtcagtattccggccagcttcacgaagtcagagagatgatgaaccaggtggaagggcagcagaagaaccttgtgcacgccattgagtccctgccagggtccggccccctcactgccttggaccaggacctgctgctcctgaaagctacctctgctgccaccctcagctgccttggggagtgcctcaacttgttacagcagagtgtgcaccaggcgggccagcccagccagaagccaggagcctcggaaaacatcctgggatggcacgggtccaagtcacattccacagagcagctgaaaaatgggacacttggctctttgccatcagccagtgccaacataacctgggcaattttaccaaactctgctgaagacgaacaaacctcacagccagagccagagccaaactcaggctctgaattggttttgtctgaagatgaaaaaagtgacaatgaagataaggaagagacggaattgggcgtcatggaggatcagcgtagtataattcttcatctcatttcacaactcaaacttggaatggatttgaccaaggtggtgcttcccacctttatcctggagaagcgatctttgctggagatgtatgcagatttcatggcgcacccagacctactgctggccatcaccgctggggccacaccagaggagagagtcatttgcttcgttgagtattatctcacagcctttcacgagggccgcaagggcgctttagccaagaagccctacaaccccatcataggcgagacatttcactgctcctgggaagttcccaaggacagggtcaagcctaagaggactgcttcccgctctcctgccagctgtcacgaacacccaatggccgatgacccttccaaaagctacaaactaaggtttgtggctgagcaagtgtcccatcacccacccatctcctgcttctactgtgagtgcgaggagaagagactgtgcgtcaacactcatgtatggaccaaaagcaagttcatgggcatgtccgtgggggtctctatgataggggaaggtgtgttgaggctcctggaacacggggaggagtacgtattcaccctgcctagtgcctacgcccggtccattctcaccatcccgtgggtggagctcggaggaaaagtcagcatcaactgtgccaagactgggtactcagcgacagtgatattccacacgaagcctttctatggagggaaagtccacagggttaccgcagaagtgaagcacaacccaaccaacaccattgtttgtaaagcccatggggaatggaatggtactttagagttcacctacaacaatggagaaaccaaagtcatcgacacaaccacactgccagtgtatcccaagaagatcagacctcttgagaagcagggacccatggagtccaggaacctctggcgggaggtgacccgatacctgcggctgggggacattgacgcagccaccgagcagaagcggcacctggaggagaagcaacgggtggaggaacggaagcgcgagaacctccgcacaccatggaagcccaaatattttatccaggagggcgatggctgggtatacttcaatcccctctggaaagcacactgatggggtggaggtgcagagctttccagtatagccctgtttttgtaggaatattaaagtagtagagtatcagggttttgttggcattcactgagaccttgtattagcatccaagaaatgatgagagagagagaaattatatactatgaaaagtgcacccccacactctgctagaggaatgaatttattcaagagccattcggggcacgtgtgtgtacacaccgtatacgttcacacacatgcactatgtaaacatctgagtatgattacacatttaaatactgcactcaccaaggttaaagtgggtaatcataagctcctttttatcaatgaagtttgaagtttttctatttttcactttgccaaaaatgttttacactcacaaagatattctcacttagtcaactcctgtcaaaatgaaggtgaactggcatggcccgatcactgtccataagggagaaagtggctcattcctggtagaagtatgggtggttatcatttcaaaattattgtgattctcacctccctccccacctcagtgttttgtctgtccgcgcccaagaaagataagcaagtatttcctgctggatgggggttggcaggaagctgttaaagatttatgccagagccttgcaggatggagcacctctgggacaactaagagccaaggcccaccaaggagttttccacccgtctctcatggtcacagcgctagtcattcatttttgagaagttgcttcttttacatcagaaaaccagtcaatcatatggagacttcttttgtgatgaaaaagggctttagaagttaaatacatgcatgcacatgaaaacatgcacaaccacagcctcaatcttgtatttagtttggggaaagagaagagaatttcctgtggattattttttcctcaagtgcacctctctggttaacccaaactctgcaagaaagcactgtgactaaaacatacataacgcctgcataaatattccatggtttcagttaaatttcagtttttagcctttacacatgaggtcaaaggagtgacgaaaatacaaagcaaggaaaaaatgaaatatctggtttttgctgaatgcttaatttattttttactgtgccactccaatatttatcaaatccaaatagcatgaatgcttctctgtagtaatactaattttgtgccttttgtctgctttcttaagaccagttgttcacactttgtagatattagacaaatatatttcgattgaatacaaaaaaaaaaaaaaaaaaa

SEQ ID NO: 4460 - DNA, 2683 bp, Homo Sapiens
  NM_017785
acatgcgcagtagctgtaggagggggtgggcgctccattgggcgtttctcttggtttttcctttccgcgcggcttgggcggacgtctcgtgagacgtgggacttctcgcgggaactgcattcaaatatcccaggcgcttactcgagagctagctgagcgaatgggccggcgactgtggagttagcgtcctcaatgtggacgccctgagctcccattaggagccgctggctgcggcagcaggggactagcgtgagagttggctaaaaaaaagaaaagaacatggaggcagatataatcacaaatcttcgatgcaggctcaaagaggctgaagaagagcgactaaaagctgcacagtatggtttacaactagtagagagtcaaaatgaattacagaatcaattggataaatgtcgtaatgaaatgatgaccatgactgagagttatgaacaagaaaaatatacccttcaaagagaagttgaactcaagagtcgaatgttagaaagtttgagctgcgaatgtgaagctattaaacaacaacaaaaaatgcacctggagaaattggaagaacaactaagcagaagccatggacaggaagtgaatgaactaaaaactaagatagaaaaactgaaagtggaattagatgaagccaggcttagtgaaaagcagctgaagcaccaagtagatcatcagaaggaactcctctcttgtaaatcagaggaactgcgcgtaatgtctgaacgtgtgcaggaaagcatgtcttcagagatgctggctcttcaaattgagctgacagaaatggagagtatgaagaccaccctcaaagaagaagtgaatgaactacaatacagacaagaacagctagaacttcttattactaacctaatgcgccaggtagaccggcttaaagaggaaaaagaggagcgagagaaagaagcagtttcttactataatgccctagagaaagctcgtgtagcaaatcaagatcttcaggtacagttggaccaggcactccagcaagccttggatcccaatagtaaaggcaactctttgtttgcagaggtggaagatcgaagggcagcaatggaacgtcagctcatcagtatgaaagtcaagtatcagtcactaaagaagcaaaatgtatttaacagagaacagatgcagagaatgaagttacaaattgccacgttgctacagatgaaagggtctcaaactgaatttgagcagcaggaacggttgcttgccatgttggagcagaagaatggtgaaataaaacatcttttaggtgaaattagaaatctggagaaatttaagaatttatatgacagtatggaatctaagccttcagtcgactctggtactctggaagataacacctattatacagatttacttcagatgaagctggataacttaaacaaagaaattgaaagcactaaaggtgaattgtccatacagcgaatgaaagcattatttgagagccagcgggctctagatattgagcgaaaactttttgcaaatgaaagatgcctccagctttcagaaagtgaaaatatgaaactgagagctaaactagatgaattgaaactaaaatatgaacctgaagagacagttgaagtgcctgtactgaaaaagaggcgtgaggtgctccctgtggatataaccaccgctaaagatgcatgtgtcaacaacagtgctctcgggggagaagtttatcgattaccgcctcagaaagaggagacacagtcctgccctaacagtttagaagataacaacttgcaattagaaaaatcagtttctatatacacaccagtagtcagtctctctcctcacaaaaatctgcccgtggatatgcagctgaagaaggaaaagaaatgtgtgaaactcataggagttcccgctgacgctgaggccttaagtgaaagaagtggaaacacccctaactctcccaggttagctgctgaatcaaagcttcaaacagaagttaaagaaggaaaagaaacttcaagcaaattggaaaaagaaacttgtaagaaattacaccctattctatatgtgtcttctaaatctactccagagacccagtgccctcaacagtaaagacttgtctttaataagagtacggtgccacttgcctcaaaagttactatggtgcttaagattgtcttgatctgacatatatcaccttctgggttatttactcattgtgccaggacctggcattttcatgtgcctttgaccaagtgttcagaatttgcttgactctaacctggagagcttcttaagtgatgccccttcatggagcttctatgacagtgaataaactattaattgaaggaaaatgttataattaatgtatctatttgctgcattgtatatggattaaatgataaaaaacaagtaatctaccctcagagccatgtatttgagaatgcttcaatcatattttcctatgtacttttttttataaacttagttttagactatgttgtaaaaatgggaaggttgtaaactatgttgtaaaaataggaaatgtggcttaaaatatatacattatattgtttcaggattttgtcagtgtttaaagaaccaatgttcatctttgtatttatatacatgatttaaattttgtctaaaattttaaataaaactgcagtgatttatccttaaaaaaaaaaaaaaaaaa

SEQ ID NO: 4461 - DNA, 3669 bp, Homo Sapiens
  NM_017791
gcgaggccccaagctggcccgggagaggactctgcgggcgaagtggctgcgcaaggagagaacttttcctgcacaaggaacgcctcgtggggagacccaaggcaggagcggtccggagccggctgcggcgtgtgcggccggccttgggacagcgatcgccgcgggtggcaacagagagccccaagcaaaagtgggagcaggagcttggaggtgagcacaggaagccccacttgaggcttttacgcagcctctagtctctgtttcttctggaataggcaagtgtcctttcaactctaagagaccagcagaggccactgtcccttaagactgccggagtcctcaccacttctccaggattccagaggagactgtggcgatggtgaatgaaggtcccaaccaggaagagagcgatgacacccctgtgccggagtccgcactccaagcggaccccagcgtctcggtccatcccagcgtctcggtccatcccagcgtctccatcaaccccagcgtctctgtccaccccagcagttcggcccaccccagtgccttagcccaacccagtggcttggctcaccccagtagctcgggccctgaggacctcagcgtgatcaaggtgagcaggcgccgttgggccgtggtcctggtgtttagctgctactccatgtgcaactcctttcagtggatccagtacggctccatcaataacatcttcatgcacttctacggtgtcagtgcctttgccattgactggctgtccatgtgctacatgctgacttacatccctctgctcctgccagtggcttggctgctggagaagttcggcctgcgcaccattgctctcactggctcggctctcaactgcctgggggcctgggtgaagctgggcagcctgaagccgcatctctttccggtcaccgtggtgggccagctcatctgctctgtggcccaggttttcatcctgggcatgccctcccgcatcgcttccgtctggttcggggctaatgaggtttcaacagcctgctccgtggctgtctttggcaatcagcttggaattgcgattgggttcttggtccctcctgttttggtacccaacattgaagaccgggacgagcttgcctaccacatcagcatcatgttctatataataggaggtgtggccactctcctcctcatccttgtcatcattgtgttcaaggagaaacctaaatatccccccagcagggcccaatccctgagctatgccttgacctctcctgatgcctcatacttaggttccatcgcccggctcttcaaaaatctcaactttgtgctgcttgtcatcacctatggtctgaatgctggtgctttttatgccttgtccactcttctgaatcgcatggtgatctggcactacccgggggaagaagtgaatgctggaagaattggcctgacgatcgtcattgcaggaatgcttggggctgtgatctcaggaatctggctggataggtccaaaacctacaaagagacaaccctggtagtctatatcatgacactggtgggcatggtggtgtacacgtttaccttgaacctgggacacctgtgggtagtgttcatcactgctggcacaatgggcttctttatgactggctatctcccactgggatttgagtttgctgtggagctcacgtacccagaatcagaaggcatctcctccggcctcctcaacatatctgcacaggtatttgggatcatctttaccatctcccagggccagattattgacaactatggaaccaagcctgggaacatcttcctgtgtgtgttccttactcttggagcagccctcactgcattcattaaggcagatctccggagacagaaagcaaacaaagaaactcttgagaacaaactccaagaggaggaggaggagagcaacaccagcaaagtgcccactgctgtgtcagaggatcatctctgagaggaaggtggtgacaactcagggaacacgaacaccccaccttttccttcagcacagctctcaccgccagcacaaagggcttcgctagagatgtttttggagggaatcagtgggactatttgtggcatggatggcctattcctcctagaacccacgtaagagcttggatgatttagttggagaaaattgcacctatcaccaaatgcaaatttgattcccacctccacccccttttaggttatgggagttggtgttgggacagggtggcagagaatattggagtcaatcctagcttggtctcttgccttccctcttttcctccatccatcgtggacaatgcctgcaaaattttcacaggaagaaagcctattcaggatattaacttgaaatttccagtgtcctaagagcctctcatgaagcccagttctaataagtggcaagctgctctgccggggtcatctcctgggtcatcggactgattgctcaagttctgcaggagaggaagcaccattagaacaactccatcagaacagctccaccgggacttgtgggcctaaattttcctggcctaacgggtctgtctccaaaccctctttcctaagagctgagcaaaccaaccataataaacttgacaaaagactttgttgtggccatgacagagataccgactcaggagggctacctacctaggtgtgatcatgctgggggctaccttctgagtatatttgtgaaagcacatatttgggaactctggtagcttgagttgggaatgggaaggttcttttttacagaagtacttccccagggacttctgtgtgtcacagtcacctctgatgcctttatcttgatgttgcattgggaatctcagccatcagcccaagtgcttgttttattccaaggcagggtaatccccgtcaacttactctaacctttgctgaaaactaatcttgattcattctactctgaaaatccaaaggtgcttctgagagataagagggaaggggtagaaggaaaggtgccccttgaaatgggaattgagcctgttagaattaaaagcttatctcacctctgctggggacagtatttgcaccaccaacccctctcctcacctgctttgagcgataatctttatcagatattctaaacttaaagggattccctttaaaccaactcaagctgatctttcctatctagcctgctgtttggctgtactcatgggctttggtaatatctcctaaaaatgaggttttggtaatttttcctatgcattgggcaactgtgatcgtgaccactgtgctgtcttgctccagccactgccctggcctcagcatatcagggcagcctgtgctggctgcaatactgtggtgcttgggccactgcctgagaggagccaggtttgtgtgtgtctgcatgtgtgtgtgtgtgtgtttgtacagattcaagcaatggatgcaaggaacatgctgtatgtaatagaagaaagaagtccacgttttcggcagaagtagtgagtcagtgtggaagagaggtgagggtgtgctttactttttgataaagagaaagatgtttactcataaacccttcaaaaggtattaacaaaatgtttaccaaacctattgctttattttaaaaacataatttgtgttttctatttgtaagatctgacatttcgaggcaataaaaacttctcagaaagtaaaaaaaaaaaaaaa

SEQ ID NO: 4462 - DNA, 2333 bp, Homo Sapiens
  NM_017793
acgcgcctcggggaacagcctggcccaaagcctcactcctcacgtcccaggggtggacgggggtccgggagcctcgagctccgggcaggcgtggcgaggctgaagtctgggtcttccgcgccccgcgaggaccacgccgcgacgtaatcgcccgcggggaggcgcggagtggagccgcagccagctcctcccgcactctgctgaccgcgcactagctgtccttgaggcaagaatacttgggagcggaaaaaaggtgggggtgttccccggggcgggggaggaggggcaaggccccagcaagcctcttggaaatctctccctgggaggggacgaggggcggccttcagttgcaaatgggaagggctcggataccggatttgaagcagtgtttgcacggcaagcgcagcttttatttagactgccggtttgtgagggttggctctcagagcgctgatggcgattatagtggaacttcaccttcacctgctcatgcgccccgcagcgcgcccgctcccacgcccgcgtagctgaggacccagactcgccaggaaaggctagtgaggctggggcccgggcgggcccggccgggccgggtcaggggaggggcctggcggcaggggcggggcctcagctaaaggcgcggagcacccggcgccgagagcgctgagtagagcggcgcccgctcgagagaagtggggccgagatcgcgccgtcccagcccgcccgccggcgtctgcgctgctccggcgcccttacccctgctggcccttgcaaggcgcgaccggcggccatgcagccccggggctgaggccgccccatggcaaagccggcggtcccggcgacgacggcgcatggagaacttccgtaaggtgcgctccgaagaggcgccagcggggtgcggggccgagggaggcggcccgggctccggccccttcgcagacctggcgccgggcgcggtgcacatgcgggtcaaggaaggcagcaagatccggaacctgatggccttcgccaccgccagcatggcgcagccagccacgcgcgccatcgtcttcagcggctgcggccgggccaccaccaaaaccgtcacgtgcgccgagatcctcaagcgccgcctggcgggcctgcaccaggtcacgcggctgcgctaccggagcgtacgcgaggtgtggcagagcctcccgcctgggcccacgcagggtcagacgcctggcgagccggccgctagtctcagcgtacttaagaacgtgcccggcctcgccatcctactttccaaggacgcgctggatccgcgacagcccggctaccagcccccgaatccccatcctggtccctcgtccccgccagccgcgccagcgtccaagaggagcctaggggaacccgcagctggagaaggctccgcgaagcgatcgcaacccgagccaggggttgcggacgaggatcagacggcctgaaactccggactgtgggccacctagtccggcaggatcttccgccagcgcctccaccttcagatgtacctccagcctttcactcctcggtcctccggagcccacaacctggacacagctcctcaagacaggtagcatggaccttaaggcgacaagagaggggccccaggagtggcaggagaggatccccgaccaccctagggaaacttcgtgcgataattgctgcttatgcccgtgttgcgtgaagacacggaacttcaccttttctgggaccttctttgggggagaatggtggacagtgggattctggaaacttgtttgggacccccaagggttaaagccacccagcattcacgaagagcacctgaagtatggaagctgagaagagttattggaatcacccccaccgttgacagaggaaggcagggggtgagaattaactgcttgagggtaggagagtctgagatgtgggggccctattccgctccccgccctgggacagttttcctttctagttttctttcccctgcttcagaggagcatctctgagggttctagctcttttaacaccccttttccccctgctggcccagagggagacccaggactgaactctccaggcctcctcccctgagccctgcagctggctggagtcttgcttccaataaaacaagcacaaaaatggctgtgtcccccattttttttctaaccacccgcctgtgcagagacagctctcgcctggccccttgtgtctcccctcccctccagccttgcgtcctgagtctttggagtcttcagggtcaggcacagagactgaacagcttcaaaatggtgcaaggcactgcccagtccctggcttcttcctctctcctcccccactccgcc

SEQ ID NO: 4463 - DNA, 3277 bp, Homo Sapiens
  NM_017798
gcgtgcacgctgacgccgcgcagtctcgtcccctgccgccgccgtcgccgctgctgtcgccgccgccgccgccattggagtcgacgcctcctcagtgcgtccgcgtcccgggctcaccgccgctgccgcctcgccaggggcccgcgcgcccagcagccgccgccgccgcccggccggcgcccggggaattggcggcggggcccggggccgcgcgagctagggtgacaggcccggcctctaggggaggcccgagccggcgggcgccccggccccgcgtctagttgttcatgaagcatgtcggccaccagcgtggacacccagagaacaaaaggacaagataataaagtacaaaatggttcgttacatcagaaggatacagttcatgacaatgactttgagccctaccttactggacagtcaaatcagagtaacagttacccctcaatgagcgacccctacctgtccagctattacccgccgtccattggatttccttactccctcaatgaggctccgtggtctactgcaggggaccctccgattccatacctcaccacctacggacagctcagtaacggagaccatcattttatgcacgatgctgtttttgggcagcctgggggcctggggaacaacatctatcagcacaggttcaattttttccctgaaaaccctgcgttctcagcatgggggacaagtgggtctcaaggtcagcagacccagagctccgcgtatgggagcagctacacctaccccccgagctccctgggtggcacggtggttgatgggcagccaggctttcacagcgacaccctcagcaaggcccccgggatgaacagcctggagcagggcatggttggcctgaagattggggacgtcagctcctccgccgtcaagacggtgggctctgtcgtcagcagcgtggcactgactggtgtcctttctggcaacggtgggacaaatgtgaacatgccagtttcaaagccgacctcgtgggctgccattgccagcaagcctgcaaaaccacagcctaaaatgaaaacaaagagcgggcctgtcatggggggtgggctgccccctccacccataaagcataacatggacattggcacctgggataacaaggggcctgtgccgaaggccccagtcccccagcaggcaccctctccacaggctgccccacagccccagcaggtggctcagcctctcccagcacagcccccagctttggctcaaccgcagtatcagagccctcagcagccaccccagacccgctgggttgccccacgcaacagaaacgcggcgtttgggcagagcggaggggctggcagcgatagcaactctcctggaaacgtccagcctaattctgcccccagcgtcgaatcccaccccgtccttgaaaaactgaaggctgctcacagctacaacccgaaagagtttgagtggaatctgaaaagcgggcgtgtgttcatcatcaagagctactctgaggacgacatccaccgctccattaagtactccatctggtgtagcacagagcacggcaacaagcgcctggacagcgccttccgctgcatgagcagcaaggggcccgtctacctgctcttcagcgtcaatgggagtgggcatttttgtggggtggccgagatgaagtcccccgtggactacggcaccagtgccggggtctggtctcaggacaagtggaaggggaagtttgatgtccagtggatttttgttaaggatgtacccaataaccagctccggcacatcaggctggagaataacgacaacaaaccggtcacaaactcccgggacacccaggaggtgcccttagaaaaagccaagcaagtgctgaaaattatcagttcctacaagcacacaacctccatcttcgacgactttgctcactacgagaagcgccaggaggaggaggaggtggtgcgcaaggaacggcagagtcgaaacaaacaatgagggcgaaccagtttcttacatgttctaacgtttgactttgaaaacagtttaaaacacgtgtgcttggtcagctccagtgtgtcgtcccgtgcgggggttgagtgttgcatctttgcctttcttgtcgttgatttttgcccagatggatctgcatttatttgtactttttctatgtattataatcctgtagaagtcactaataaaggagtattttttttgtcagcttatcaatcagactgatctaatgtgaaatgtaagtatccttaaaaacaaagcatctattttggcagaaattgtgttcttaaattcagtcatttgatattctgtgagacttcatatttctcatccctttattgctttttagcaaacataagaaaccatgagtcattttgtcatttagagtattctgataaaatctcttgaaaatactgaaatcaaaaggttaatgattttttgttcattctgatttgtcattttattatctgttatcggtctaaagtgctaatttacccatttgatttttctgctagacagataacttttaatttttcaaatttggcagacactttttttttttttttgaaaatctttccttccagatctgttgcccactgaacagccacccgtccctcactgtcctggtgtccgattgggctggatggtgttggggcatgatgtgtggaggaactggaaggtgctttaggtctggttcagggtcgggcattctttgttgtttgcacatctttttaaattttacaccttttcttaagaattctaatgccgtcttaagtttttataccaataatgctgagctttaagtgtaggatctggtagtacagacagtgtgatggatgatgctgctggttgtaaatttcatcgtgtgtgtctaattttttttcctgttgaatgggtaaaaacaaaacaaaactttttttagaagatgaatttgctgtcatgttttgtggaatgagggaccgttgagctcactaccacctggagtttgagttgaagcatgaaaatggtgcccatgcctgacgctccagcgcctggatctgcacgtgcccttgtagaggatccttaccgtcctagagagcagacgctttctgaaaactacttgctccaaaagaccctctgagttaacgtttcagctgtatcattagacttgtatttagagcgtgtcacttcctctgaactgttactgcctgaatggagtcctggacgacattgggtttttcctctaggagaatacaagccttaataaacaatactatttagcaaaaaaaaaaaaaaaaaaaaaaaaaaa

SEQ ID NO: 4464 - DNA, 4278 bp, Homo Sapiens
  NM_017799
ggctcgacccggaagccgccgtggccgccgcacaagctgcgctcgtctctcggctggggagctccgtgtcgcaccgggttcttgggctggccgtgtccttctccctcggtcgccactggcccatgagtccccatggcgacggcaggggccaggcccaggggcgggcagtccgagtggggctgcggcgctccgggggcatccgcggcggcgtggcggtgttcgccgccgtggccgcagtgttcaccttcaccctgcccccttcggtaccggggggagactccggggaactgatcacagccgcacatgagcttggagttgcccatcctcctggctatcctttgttcacgctggtggctaaactggcaattacactgtttccttttggttcaattgcctaccgcgtcaatcttctctgtggcttatttggagcagtagctgcatcattactttttttcaccgttttcaggctttctggctcatctgctggaggaatccttgctgcgggggtgttttcattttctcgtctaacatggcagtggtccattgcagcagaggtttttagcttaaacaatctctttgtggggctgcttatggctcttactgtacattttgaggaagcagcaactgctaaggagagatcaaaggtagctaaaattggtgctttctgctgtggccttagtttatgtaaccagcacacaataatactctatgttttgtgcataataccttggattctctttcaacttttaaaaaagaaggaactctccctgggctctttgttgaagttgagcctgtacttctctgctggtttgctgccctatgtccaccttcccatctcatcttaccttaatcacgcccggtggacctggggagaccagacaacactgcaaggatttttgacacattttctcagggaagaatatggaaccttcagcctggccaaatctgaaataggatccagtatgtctgaaatactgctttctcaagtaacaaatatgaggaccgaactctcattcaacatccaagcccttgcagtttgtgcaaatatatgtttagcaacaaaggacagacagaatccatcattagtatggctttttactggaatgttttgcatttattcattgttctttgcttggagagcaaatttagatatttcaaaaccacttttcatgggtgtggtggaacgattctggatgcagagcaatgcagtagtggccgtcctcgctggcattggtttggctgcagttgtgtctgagactaaccgagtgctgaatagcaatgggcttcagtgtctggaatggctttctgcaactctttttgtagtttaccaaatatattctaattacagtgtttgtgaccaaaggaccaactatgtgattgataagttcgcaaagaaccttctcacctctatgcctcatgatgcaattatcttactcagaggagatttgccaggaaattctctccgttacatgcattactgtgaggggttgaggcctgacatttcattagtggatcaggaaatgatgacttacgagtggtatttacccaagatggcaaagcacttgccaggtgtcaactttcctgggaaccggtggaatcctgtggaaggaatattacctagtggaatggtcacatttaatctttatcattttcttgaagtaaataaacaaaaagaaacatttgtttgcataggaattcatgaaggcgacccaacctggaaaaagaactattcactttggccatgggggtcttgtgacaaattagttcctttggagattgtattcaaccctgaggaatggattaaacttacaaaaagtatctataactggaccgaagaatatggaaggtttgatccatcttcttgggaatctgtggccaatgaagaaatgtggcaagcgaggatgaaaacaccgttcttcatctttaacctggcagaaactgctcacatgccttcaaaagtgaaagctcaactctacgctcaagcatatgacctttataaggagattgtctatttacaaaaggagcacccagtgaattggcacaagaactatgccatcgcctgtgagcggatgctgcgtcttcaggcaagagatgcagatcctgaagtgctgttatcggaaaccatcagacatttccgtctgtactctcagaaagcaccgaatgacccacagcaagctgatattttaggtgctctaaagcacctaagaaaagaactgcaaagtctgagaaataggaaaaatgtctgagacagcaaaatatgaaaaacctgctcatcgttcagcttccaaaattctgaagtctggaagtttttccttcaagaaaagaaactgcataaaaaatttaaaactaagtcatctcccagatataagtatcatggtccagcagtactgtttaatggggtattcagtgactaaggtctgctatttatgcaaaattctgtttatcccgtgttaccaaattaccatttcagtgagaagcttttgaaaagtcttctgacttccagtctttcaccagatgactgcactggattagattctagaagagaatgaaccattttcatataactaaatattggtcatgaactgtgtaagggccatgcttattgggatcagttttaaagttaaattcttttgatattaataccagaccaaagacattttctgtttcctggaaaaaaaaaatgaatcatgttaggctttaggtgagagtacattttttacaaagtagctatagttgttacatagtcttacacttcaagctaaacaccaaatgggtgatattttgaaaaaagtttgtgttttactgtcttagatcgttcttggaaatcactaaaaaaaaaaaaagttaatttgatgtttgcttatttcagttgcagaaactggcgagtaaaaaagattttgcatttacttaattaattttatatttatgttttatttctatttggactcagagatctagacccaataattagtaggctcctgctgccaaaatgcaaaggggaaaaaaaggcagggattgggggggatggggaagtggcccaataaattcatttctgttacaagcatcttttatacatattactaaagagaacatagtaagaaatgcaaataatagttctttattttattatgacagttaattaatagcaacctgttttaatgaataaagtcactcagagtccttcagcacttcctaagtagaggccagaatctgtagggcttcttttccccccaattgtatagctcctagactccaagcactatataggcccctgtatagaaatgctcactaatgaagagggagggctagaagcttgtctgcattcaaagatcactggtgagtcattcagcaagaaaaggccccttaccaggaatagtcacagttccgtggcattgtactagcaaaagggtctgatcaaaggtctcctgtggagcttgcatggttccctttcatactacgaccataattaaaaccactaattctcttttaaaatgctgcaggatgccatgtaggcatctgtctggagtgtcctttgtgatgtcataagctgttaaggaccagtgccgagggcttttgagtgaaatgccagtcatgaaggtgcttcaagacaagggtgcctctaaaagcttgacagggccttgactgcacaattcgagctgaatttgccccttgtcagctgccagtaaataaatctcaaagggggaaaagctgaagtttcattacctgatccatggggctttgttggttttggcatcacacaggggaagctcttgcccctccattctctggatttgaagatgtccattggagcctgcagtgcctggacagggttcagagcggaaccttttgaagagtgtcaatagttgtaacagttcagctgttaggaagacaaataaatggaggagctcattaatccgcttttggctctcagtgccttttgcccttttatcacagccttattaggctcctactcatcttgaaccagaaaaaaatgaattgaagttgttgagtactaattggcaaagacttttaatcatgggccaagaactttcactgacttgaaagtaacttctccacagggaaggaccaaaaacctggtttaccttaaaacaaaaacctgttggagttcagcgtggtgtaaaaatgtaaggaagcattgataaattgtctaagtttatccatttgaaagaaattgtgtaagattatgatattctcttttctttaaaaaaaaaagtacaataaaattcaaacattccttaggaaaaaaaaaaaaaaaaa

SEQ ID NO: 4465 - DNA, 3384 bp, Homo Sapiens
  NM_017801
agggggcggggcgggccaagggcgggggcgggaaggggcggagtcaggcggaagccggggagaaggcccaggaagtgacggccgcctcccggctaccggggacttctggagtccgagaagtcaacggcgcggttgctgcggccgccgcgctccccggcccgaggcgatggagaacggagcggtgtacagccccactacggaggaggacccgggccccgccagaggcccccggagcggcctcgctgcctactttttcatgggccggctcccattgctccggcgcgttctcaagggcttgcagctgttgctgtctctgctggccttcatctgtgaagaagttgtatcacaatgtactttatgtggaggactttatttttttgagtttgtaagctgcagtgcctttcttctgagtctccttatactgattgtgtattgcactccattttatgagagagttgataccacaaaagtaaaatcatcggatttttatattactttgggaacaggatgtgtgtttttgttggcatccatcatttttgtttccacacatgacaggacttcagctgagattgctgcaattgtgtttggatttatagcaagttttatgttcctacttgactttatcactatgctgtatgaaaaacgacaggagtcccagctgagaaaacctgaaaataccactagggctgaagccctcactgagccacttaatgcctaaagactctggggagcagatgttacctaaggtagtgaccctgcattgtggtgcctgagccctggcagaagctcttgtaaaatttgttaattgtttaaaccacttcttttggagagcaaggggaaggtcaagaaggcagttttatcaatattgtgtcagtcaccacaaagtaggccagataagttaaaaaaaatttttttttaaataataattgaaacttatctcaaatggagattttggtgggaggaggagaaaacaattgtttttaaatcacacagctcaacggttgataaatgattctgtcattctgttacaggtcattcttttactaggcttagcttccaaattatgctttatagctgtataaacatcgtgattatattcatctacttagaaattgttttatttttaaattaatttgcttagctgtttgttttgatgcttagattatgttctgttaatgggaatttaacatatttaagaaaccaatatttaaaatgttggtctaggtttttttccttaacatatattaccaggctttactgtatttcactcagccttaaatgttataatatttttggataacggttattaattctttgagaccttcgtatagcctataaaatgtatgggagatgttggtattttatgtgtataaaagcaacaatatcagcaacttcgtgtttatactgcaccttggttgttgatgtcaagtaaaaaaaagattgttttgtaacacataaaaaaatggaagaaactgataccacacctaaggaccaaagataagaaagactttttgcccaagacagtgaaagtaattataaaaacaagctttgaccacttaccaagtatctgaagagatgagttcatactatgatttagaaagtggttcaattcccctgttggcatatgattatttttactaaaattaatacagctctgtgggtcttccttagtgttttctttgaagccaatctgttttttttaggacaccagcctttggtttttcatctgttcgagatgcctcttctctgtctccttatcagatagaaatggagtcatgtgctgctgcttcatctagcagaggttggcctctggctctgacactttttgtcagttgtctttaggtggtcctgaatcttgggcccttttgattgtgaatactgtgtagcaggatcttgagagtccttgttcttacataggcattgctctagtttgtctttggcaaaaaaaaaaaaaaaaaaaagtaaatatccagggaaccctgcccagactaatactgttggtggcataagagaatcaagccattctcaagagataacttcataaccagaattgtctgttggctagcagctgtcacagataggcagggcacttgggatatgacctttctgtccaggtgattcacagactagacctttcttatcctcctcctagagttttgacttgggactctagtgttaagatgatgagcccgtgcatcaggtccttctgcactttggtggaagtctcccagggtaggtttcctatttgaaacagtggaatcatgtttccagtgataaagtttaatgacctcatccttttttttttttctcatctgccatttgtgtgtcttagatgggttttaattgcatgaatgtggctaatgtggttctcagaaattggtcagtatggcccaacatagcttctgctctgtcttactgactcaatacctttaggatttgtatcagagtttggatactagtgttagtggtggtgtcaccactacttaattgggagataatgaaaccaatcatggatgctgtttttattgggcatgtcatctaagagaggagaaatagctgggttttgggtctaattatgaataaggactgattcagaaaacgagtttatggtaggtagactaaagtttcacatcagactgtaccattgtgatttagacctatctaaaattcagagcatatcatctgggctacctcagggtcaccacccatgtattgggcttagtcaggattgacagatacattctcagctggcctgtcatataaaacatactgtcattgagcttaagctccgcttgttctgaggtttcacctccatgtgtttcattggtgcaaaagtggatctcttagttggtcacttaattctttctttttcagaaagatagtatgttcactggtatatttggtcactcttagaaccttccttcacattgttttttatgggacccatgaatggttagcctttcttttctattgtagaaggaaataaataggagtaaaaagaccattgtagtaaataagttcaaggggaacttgggaccagaaaccactgttatgtacaaaaaaatggcaaattcaataaactcaaatttaaaataatttttaaattaacagttatgataaattttatattttatacaaatagattgcttagaatggttctcaagaattataagagaaatgaactcacagtacaaaaattttataattactatacttgtgttttgtttgggggctgggaaatgtatttttacattgtagccaatcattttatatttgtcaatttaaatcttatgggtcttttttttttatctctcttgatgtcagattttatagtctttttaaataaatccatttaattaaaacgttaaaaaaaaaaaaaaaaaa

SEQ ID NO: 4466 - DNA, 3424 bp, Homo Sapiens
  NM_017802
tgaccggcgacgcgggcaagatggcggcgctgggggtggcggaggccgtggcggccccacacccggctgagggggccgagacggctgaggcggtggagctgagccgcgccctgagccgcctgctgccggggctggaggccgacagcaagccgggccggcggcgcgccttggaggccctgcggcgcgcgctggaggagccaggccctgccgccgaccccaccgctttccagggcccctgggcgcgcctactgctgccgcgcttgctgcgctgcctgagcgaccccgccgagggctgccgcgcgctggcagtgcacctgctggatctgggcctgcgccgcgccgcgcggccccgcgatgccctgccgcgcctgctgcccgcgctcgccgcgcgcttggccggccccgtgcccgcgcgccgcccgcccgaggcctgtgaggagctgcgcctggcgcttgtgcagctgctgggcctggccgtggacctgtgcggcgccgcgctcgcgccccacctggacgacgctctgcgcgcgctgcgctgctccctgctcgaccccttcgccgccgtgcgccgcgagagctgcagctgcgccgccgccctggcgcaggccacgcccgaccacttccacatgcagtcggagtctctgatcgggcccctgatgcagaccatctcccaccagcactggaaggtccgtgtggccgccattgaagccacaggcgcagtgatccattttggcaacgggaagtccgtggacgacgtgctttcccattttgctcagcgactgtttgatgacgtcccgcaggtccggcgggcggtggcctccgtggtgggcggctggctgctgtgtctgcgtgaccgttactccttcttccacaagctcatccctctgctgctcagtagcctcaacgacgaggtgcctgaggtcaggcagctggctgccagcctctgggaggacgttggcctgcagtggcagaaggagaatgaggaggacctgaaggacaagctggactttgcccctcccaccccaccccattaccctccacatgagcgccgccctgtgctgggctgccgggagctcgtcttcaggaacctctccaagatcctccctgccctgtgccacgacatcaccgactgggtggtggggacccgagtgaagtcggcacagctgctcccagtgctgctgctgcatgccgaggaccacgccacgcagcacctggaggtcgtcctccggaccctgttccaggcctgcaccgacgaggaggcagccgtggtccaaagttgtaccagatccgcagagctcgtcgggacgtttgtcagccctgaggtgtttctgaagctgatcttatcgacgctgaagaagacgccctctgcctccggcctcctggtgctggcctccgccatgcggggttgcccccgagaagccctccagccgcacctggcagccatcgccacagagctggcacaggcccacatctgccaggcatctgaaaacgacctctacctggagcgcctgctgctgtgtgtgcaggctctggtgtctgtgtgtcatgaggactgtggcgtggccagcctgcagctcttggacgtgctgctgacaatagtggccctcgcaggtgctaccggcctgagggacaaggcacaggagacgatggactcactggccatggtggagggtgtcagcagctgccaggacctctaccgcaagcacattggtcccctcctggagcgggtgaccgcgtcgcaccttgactggaccgcacactcgccggagctcctgcagttcagtgtcatcgtcgcacagtcaggccctgccctgggagaagccctgccacacgtcgtgcccacgctgagggcctgtctgcagccctcccaagacccgcagatgcgcctgaagctgttctccatcctgtccaccgtgctgctcagagccacggacaccatcaactcccaggggcagtttcccagctacctcgagacggtgacaaaggacatcctggcccccaatctgcagtggcatgcggggaggacagccgcggccatccgcacggctgccgtgtcctgcctctgggcgctcaccagcagcgaggtcctgtcggcagagcagatacgggacgtgcaggaaacactgatgccccaggtcctgaccaccctggaggaggattcgaagatgacgcgactgatctcatgccgtattatcaacacgttcttaaaaacctcgggcggcatgacggatccagagaaactcatcaggatttatcctgaactcttaaaacgcctagatgacgtgtccaacgatgtgaggatggcagccgcctccaccttggtcacctggctgcagtgtgtcaagggtgccaacgcaaaatcctactatcagagcagtgtccagtacctgtaccgagagttgctggttcaccttgacgatccagagagggccatccaggatgcaattttagaggtcctcaaagagggcagcgggctgttcccagatctcctggtgagggagacggaggccgtcatccacaagcaccgctcggccacctactgcgagcagctcctgcagcatgtgcaggccgtgccagccacacagtgaccacgctggtttcagccacggcacacccttgtccccacctgagccagagtttgtggcctttaaatctcataaacaaggcacctctgtgccagcagtgagactgtgacagcaagaatgtactcctcaggacacctgcccactctttccctggaataacagcctctgagtggattctgcatgttatgtgatttgttctgttcatcgagagggctcccaaacatctgcagctgatttgaaattaaaagtaagtcgcagccgctcctcccgcagccacttcagcagcatcttagattttaagcctcacgtgcgcagctggttcatgaactattggctgcatcctgcttaggtgcccaccaagaaggtttttacctacttaacaaaaaagaaagaagccaaagtgattagaaagaaatgaaatctctttttgggttctgtctactgaaatttaatatctcagtgaacagactaaaaggaatttagaatcctaacaacttatcagatttctcctgttttaaatatactgggactttaaaggttatatgtccggtcaccgtatgttttaagtcggtgttaatgctaacagtgttgaaaacaatatttcatgagatctaattgtggttgcccctataggtagcaggaaagtaaagttgcatttccctctcgcacattctacacccaagtgcctaaaagatctcattgtaagtgggtagtgttaccggaagccattgtgttcacacgggggaaatgccgtatatatttttcaacaaatattaacgtttatactttcatgtttgaaaatttaattaaaaatgtttgttttaatgataaaaaaaaaa

SEQ ID NO: 4467 - DNA, 1206 bp, Homo Sapiens
  NM_017806
gatgaggtggggagctcagccgagggctgcacaaagaccttcctggcctgccccagacagagctgaggacccctggccgtgggcttgggcctcggcttcacaggatggggctgccagtgtcctgggcccctcctgccctctgggttctagggtgctgcgccctgctcctctcgctgtgggcgctgtgcacagcctgccgcaggcccgaggacgctgtagcccccaggaagagggcgcggaggcagcgggcgaggctgcagggcagtgcgacggcggcggaagcgtccctactgaggcggacccacctctgctccctcagcaagtcggacaccagactgcacgagctgcaccggggcccgcgcagcagcagggccctgcggcctgccagcatggatctcctgcgcccacactggctggaggtgtccagggacatcaccggaccgcaggcagccccctctgccttcccacaccaggagctgccccgggctctgccggcagctgcagccaccgcagggtgcgctggcctcgaggccacctattccaacgtggggctggcggcccttcccggggtcagcctggcggccagccctgtggtggccgagtatgcccgcgtccagaagcgcaaagggacccatcgcagtccccaagagccacagcaggggaagactgaggtgaccccggccgctcaggtggacgtcctgtactccagggtctgcaagcctaaaaggagggacccaggacccaccacagacccgctggaccccaagggccagggagcgattctggccctggcgggtgacctggcctaccagaccctcccgctcagggccctggatgtggacagcggccccctggaaaacgtgtatgagagcatccgggagctgggggaccctgctggcaggagcagcacgtgcggggctgggacgccccctgcttccagctgccccagcctagggaggggctggagacccctccctgcctccctgccctgaacactcaaggacctgtgctccttcctccagagtgaggcccgtcccccgccccgccccgcctcacagctgacagcgccagtcccaggtccccgggctgccagcccgtgaggtccgtgaggtcctggccgctctgacagccgcggcctccccgggctccagagaaggcccgcgtctaaataaagcgccagcgcaggatgaaagcggccaaaaaaaa

SEQ ID NO: 4468 - DNA, 1642 bp, Homo Sapiens
  NM_017807
agcctcgcctccctcctctaattctctaggacacttaggtccccaaccctccctcgggctgtttatcgttgtgccagatgcacagcacattgtgtgacactgacttaagattctaactatgtgcaagagggaaaaaaacagtggagaaggctgggctggaccacgggaaagagataggaaaacggatacgaatgtaaggcacagagttggctcggcgtccctggcagttaggaagacaggtccctggaggggccttggcgggtctccgctcgcgggagttccgcggtgtctttcccagtgctatctgcaggctggccagcttcctctgcgctccggaaagctgcggcccagcgcggactagtgaggacctccacagctcctgacattgccaggagtcctgtcggcgttttctcccagcctccgccatgccggcggtgctgggttttgaaggcagcgccaataagattggcgtgggcgtggtgcgggatggcaaggtgctggcgaacccgcggcggacttacgtcacgcctcctggcacaggattccttccaggtgatacagccaggcatcaccgagctgttatcctagacctgctgcaggaggcactaacagagtctggattaacctcccaggatatcgactgcattgcatacaccaagggccctggcatgggtgccccactggtttctgtggctgttgtggcccgtactgtggcccaactgtggaataagccattggtgggtgtgaaccactgtataggccacattgagatgggccgcctcatcactggagccaccagcccaaccgtgttgtatgtgagtggaggaaatacgcaggtgattgcatactcggaacatcgttaccgtatctttggggaaaccatcgatattgcagtgggtaattgtctggatcgttttgctcgagtgctgaagatttctaacgacccaagtccaggatacaacattgaacagatggcaaagcgaggcaagaagctagttgagctgccatacactgtaaaggggatggacgtctcattctcagggatcctgtctttcattgaggatgtagcccatcggatgctggccacaggcgagtgtactcctgaggatctgtgtttctccctgcaggaaactgtgtttgcaatgctggtagagatcacagagcgagccatggcacattgtggctcccaggaggccctcattgtgggaggagtggggtgtaatgtgaggctacaggagatgatggcaacaatgtgccaggaacgtggagcccggctttttgctacagatgagagattctgtattgacaatggagcgatgatagcccaggctggctgggagatgtttcgggctggacacaggaccccactcagtgattctggggttacacagaggtatcggacagatgaagtagaggtgacctggagggactaataagatcaacagaatcagagtagatagttccttaatcggaacccaaaggaccccgtgcctcaatctctatcctgatgtcatgggagtcctagcaaagctatagactccaagcaaggcttggggtcctttatggaaccccaggatgactcagcaataaaatatttttggttttttggttttgtatgttggtgaaaaaaaaaaaaaaaaaa

SEQ ID NO: 4469 - DNA, 3044 bp, Homo Sapiens
  NM_017810
gtaatgggcggagcgaatcgcgccgctgacttccggcccggaggctgagggagaatgtttgataggtttatattgtctttttccatcctcttcagacatccttcaaagttgagccctttttttccgctgtgagtctctacacatgtctgacactctcatgtcccacggattacagaaagacattccttgcaggagaacatggcttcccagtgatgtgggaaagatggactctgatctccagggtagaagtggcaaccagagtaagccagttcgttgaagcaaatgatggctgcagtgaagagtaccgaggcacacccatcctcaaacaaggatcccacacagggccagaaatcagccctccagggtaacagccctgactccgaggcctcccgtcagcgcttcaggcagttttgctaccaggaggtaactggcccacatgaagcttttagcaaactctgggaactctgttgtcagtggctgaggccgaagacccactcaaaagaggaaatcctggagctgctggttttggagcagtttctgactatcttgccagaggagatccagacctgggtgagggagcagcatccagaaaacggcgaggaagctgtggctctggttgaggatgtacagagagctcctggacaacagcctggcttgctcctcaggctcccaggaacctgcctcaaaacacaggtctccacgaccaggagacaggtgctgtggtctggacagctgggtcccaggctagagtggtgctattttatcggtagcagcagctccagtgttgttacagggaccagccatgcgtgacaacagagctgtatccctctgtcagcaagaatggatgtgcccaggccctgcacaaagggccctctacaggggtgccacccagaggaaggacagtcacgtctcgctggcaacaggtgtgccctggggctatgaagagaccaagacgctcctggctattcttagtagttctcaattttatggaaaactccagacctgtcagcagaacagccagatctacagggccatggcggaaggactctgggagcagggttttctgcggaccccagaacagtgtcgcaccaagttcaaaagcctacagttgagttaccgcaaagtgaggagaggccgtgtgcctgagccttgtatcttttatgaggaaatgaatgctctttcaggctcctgggcctctgcacctcctatggcaagcgatgctgttcctggccaagaaggaagtgatattgaggctggagagctgaatcaccagaatggggaacccacggaggtagaagatggcactgtggatggtgcagacagggatgaaaaggacttcaggaatcctggccaggaagtcaggaaactagacctgccagtgctgttcccaaacagacttggttttgagttcaagaacgagattaaaaaagaaaatctaaaatgggatgattcagaggaagtagaaataaacaaggctttacagagaaagtccagaggagtttattggcactctgagctacaaaaaggcttggagagtgagccaacatcaagaaggcaatgtagaaattctccaggggagagtgaggagaaaaccccatcccaggagaagatgagtcaccagagtttttgtgccagggacaaagcctgtacacatatcctctgtgggaaaaactgctctcagagtgtgcactctccccacaagccagcgctcaaactggaaaaagtatctcaatgtcctgaatgtgggaaaacctttagccgaagttcttatcttgttcggcatcaaagaatccacacaggcgagaagcctcacaagtgcagtgagtgcgggaagggctttagtgagcgctccaacctcactgcccacctacgaactcacacaggggagaggccctatcagtgtgggcaatgtgggaaaagcttcaaccagagttccagcctcattgtccaccagaggacccataccggggaaaagccttaccagtgcattgtctgtggaaagagattcaacaacagttcccagttcagtgctcaccggcgcatccacactggggagagcccatacaagtgtgcagtgtgtgggaaaatcttcaacaatagctcccacttcagtgcccaccgaaaaacccacactggtgaaaagccttacaggtgttctcactgtgagagaggcttcactaagaactctgccctcacccgtcatcagacagtacacatgaaagcagtactctcatcacaggaaggaagagatgcgttatgagtgtgtcggtaaactgtcagattaagttcctcaggtcagcatgtatgagctttcttctgctgtggagagatctagccagtccctgactttgcaacagacctactgactactggatcttaagacccatgtctaggaccaggagtcagcataaggacgctgacctctcctggctgtgcctgtgactccagagtcctatcttactgtgacttaaagtttgatggagagaaagctgtaggatccataaattctaccaggaaaccagggtcttcctgttcctagcactgagaatgggcacccagtggtccaagaacactttctgggctaacatagtcctcacacagggctgagaaagaaagtgtctcctttcctggaaagcacatgtaaaagttaagggcctgaatctcttctaaaccaataattgacctctaggcacccaccgtaatactgctaccttcagggcagaagacactgctctttgtaacccagccaccaccaaaaagcaaacagaaagaaggaaggatggttaagccattggataatactgaatctgtttccctaagtgacttaaccttagagcaagcacaacatccaggttaattttttgtaagatttctccttttattattgccctcatcatagttcctgattgtctcttaaagtaagtggtttatagacattactatttctgataataatttacaaactactataaacaaatttataaacattactaatttctgatgaaaataaagttgtttctccctccaaaaaaaaaaaaaaaaaa

SEQ ID NO: 4470 - DNA, 1622 bp, Homo Sapiens
  NM_017812
ctggtttctgggggtcgtggccttgctcccgctgtgcgggaaaagaatccaggcccttccacgcgcgtgtgggtgcgggggccccgaagtgctcgtggttccccgctaggtctccgctggggcaggaaccggaatcatgggtgggaccaccagcacccgccgggtcaccttcgaggcggacgagaatgagaacatcaccgtggtgaagggcatccggctttcggaaaatgtgattgatcgaatgaaggaatcctctccatctggttcgaagtctcagcggtattctggtgcttatggtgcctcagtttctgatgaagaattgaaaagaagagtagctgaggagctggcattggagcaagccaagaaagaatccgaagatcagaaacgactaaagcaagccaaagagctggaccgagagagggctgctgccaatgagcagttaaccagagccatccttcgggagaggatatgtagcgaggaggaacgcgctaaggcaaagcacctggctaggcagctggaagagaaagaccgagtgctaaagaagcaggatgcattctacaaagaacagctggctagactggaggagaggagctcagagttctacagagtcaccactgaacaatatcagaaagctgctgaagaggtggaagcaaagttcaagcgatatgagtctcatccagtctgtgctgatctgcaggccaaaattcttcagtgttaccgtgagaacacccaccagaccctcaaatgctccgctctggccacccagtatatgcactgtgtcaatcatgccaaacagagcatgcttgagaagggaggataaaaactttcagaatgagcaaaacaccatcaacgttaattccagagatggaacattttttttcctagtgagaaaacaacccatttgaagagaagaccactaatgagaagaccactaaagagagacatcaagaatggattcagcagaatcatttcacgttttgaacagcagcagtttgaagggccaaagccttgatcagggatcagtcattaaaggacactcttgagtattagtaaaccctcttatgatgattaaaagagaagggcagccctctccaccttttggtactttctattcaacttgcactgaccataaaatgtttctcttctgaacaagccccatcatttggtgaacctccaccctaacaaagtaggatggggttgggggctaaattaattggagtggggcgaggagagagccagaaaacatagatccgagggcagcagtgctgggtggagagagccagaaaacagatctggaggcagcagtgctggatggaattgtctaggctgtggcatgttggttttgtctttcttttctcctttgattatgtaagagctatttcattataacttattatggtgattatacaggcaagaagacaaaaaggagagaaaatgtacctcttctactggaataatgtttatgattacaagtgagataaggtatttttatcaatatgaaggcaaccttggctgataaaacctctatagtgaatactcacatctttacttcactcactatcaataataaatatattttctgacaaagactggcaaaaaaaaaaaaaaaaaaaaaaaaaaaa

SEQ ID NO: 4471 - DNA, 1795 bp, Homo Sapiens
  NM_017814
gggtgagtgcaccgcgttctcgcacgcgtcatggcggtcctcggagtacagctggtggtgaccctgctcactgccaccctcatgcacaggctggcgccacactgctccttcgcgcgctggctgctctgtaacggcagtttgttccgatacaagcacccgtctgaggaggagcttcgggccctggcggggaagccgaggcccagaggcaggaaagagcggtgggccaatggccttagtgaggagaagccactgtctgtgccccgagatgccccgttccagctggagacctgccccctcacgaccgtggatgccctggtcctgcgcttcttcctggagtaccagtggtttgtggactttgctgtgtactcgggcggcgtgtacctcttcacagaggcctactactacatgctgggaccagccaaggagactaacattgctgtgttctggtgcctgctcacagtgaccttctccatcaagatgttcctgacagtgacacggctgtacttcagcgccgaggaggggggtgagcgctctgtctgcctcacctttgccttcctcttcctgctgctggccatgctggtgcaagtggtgcgggaggagaccctcgagctgggcctggagcctggtctggccagcatgacccagaacttagagccacttctgaagaagcagggctgggactgggcgcttcctgtggccaagctggctatccgcgtgggactggcagtggtgggctctgtgctgggtgccttcctcaccttcccaggcctgcggctggcccagacccaccgggacgcactgaccatgtcggaggacagacccatgctgcagttcctcctgcacaccagcttcctgtctcccctgttcatcctgtggctctggacaaagcccattgcacgggacttcctgcaccagccgccgtttggggagacgcgtttctccctgctgtccgattctgccttcgactctgggcgcctctggttgctggtggtgctgtgcctgctgcggctggcggtgacccggccccacctgcaggcctacctgtgcctggccaaggcccgggtggagcagctgcgaagggaggctggccgcatcgaagcccgtgaaatccagcagagggtggtccgagtctactgctatgtgaccgtggtgagcttgcagtacctgacgccgctcatcctcaccctcaactgcacacttctgctcaagacgctgggaggctattcctggggcctgggcccagctcctctactatcccccgacccatcctcagccagcgctgcccccatcggctctggggaggacgaagtccagcagactgcagcgcggattgccggggccctgggtggcctgcttactcccctcttcctccgtggcgtcctggcctacctcatctggtggacggctgcctgccagctgctcgccagccttttcggcctctacttccaccagcacttggcaggctcctagctgcctgcagaccctccaggggccctgaggtctgttcctggggcagcgggacactagcctgccccctctgtttgcgcccccgtgtccccagctgcaaggtggggccggactccccggcgttcccttcaccacagtgcctgacccgcggccccccttggacgccgagtttctgcctcagaactgtctctcctgggcccagcagcatgagggtcccgaggccattgtctccgaagcgtatgtgccaggtttgagtggcgagggtgatgctggctgctcttctgaacaaataaaggagcatgccgatttttaaaaaaaaaaaaaaaaa

SEQ ID NO: 4472 - DNA, 1649 bp, Homo Sapiens
  NM_017815
cctccttcgtcgcggcctctagtgcactttcggctccttccccttcccgggcctttcagcttggtctttccgggcctcgcttcccccagcccctgcgcccggcccgaacgagaggttccggagccccggcgcgggcgggttctggggtgtagacgctgctggccagcccgccccagccgaggttctcggcaccgccttgagagcttcagctgccccaggattagaatcccaagaaaatcaaatggcatccggggatttctgctcacctggagaagggatggaaatacttcaacaagtgtgcagcaaacaacttcctccttgtaacctgagtaaagaggacctgttacagaacccatacttcagcaagcttctcctgaatctctcacagcatgtggatgagagtggcttaagcctcaccctagcaaaggagcaggctcaggcatggaaggaagttcgactgcataagacaacatggttgaggtctgagattttacacagagtcattcaagagttgcttgtggactactatgtgaagatacaagacacaaatgtaacttctgaggacaaaaagtttcatgagacccttgaacagcggctgcttgtaactgaactgatgcggctcttaggtcctagccaggagagggagatacctccactgctggggctggagaaagcggaccttctggaactcatgccactctcagaggattttgtgtggatgagggctcggctacagcaagaagtagaggagcagctcaaaaagaaatgtttcactctgctctgctactatgatcccaattcagatgctgacagtgaaaccgtgaaggcagcaaaggtgtggaaactcgcagaggtcctggtgggtgagcagcagcagtgccaggatgccaagagccagcagaaggagcagatgttgctgctggagaagaagagtgctgcttactcccaggtgcttctccgctgcctcactttgctgcagaggcttcttcaagaacaccggctgaagactcaatccgagctagaccgcatcaatgcccagtacctggaagtcaagtgcggtgctatgatccttaagctgaggatggaggagctaaagattttgtccgacacttacactgttgagaaagtggaagttcatcgtctgattagggaccgtttggagggagccattcacctacaggagcaggacatggagaactcaagacaggtcctgaactcctatgaggtccttggggaggagtttgacaggctggtgaaagagtacaccgtactcaagcaggcaacagagaacaagcggtgggccctccaggagttcagcaaggtctaccgttgagctctggcagggccaggagacatggcttctgcatagctgctgcctcctaatcttcctgctagtgggaccaccttcacctggggctgccttcagtacaagggagtgtggaaatgcttacgcttgaaacactgcagtcatttaggcactctcctggtttctctttattttttatgactgggcctcttctggaaaatctagcaaggagatttatataatttttatgcatagctgtgtgtcagtgtcagccctgtattgtatttgattatctcctgaataaagttatgatattatatcttaaaaaaaaaaaaaaaaaaaa

SEQ ID NO: 4473 - DNA, 1584 bp, Homo Sapiens
  NM_017816
cgcgctgggtggttcagaagcgaattctgcaccgcgaagcctgagaggcaggtagctgcggcgctgggctggcggcggcgagtccacgtgctccccgcggccggttgaaaccgttggcgggcgctggctgagaggcaatgtttgctgtcttccattggagtgactgaatttctacatgacggctttttgacaagacttaaaacctgtcttggatagagaatatttagccatttacctaaaaatggtattttttacatgcaatgcatgtggtgaatcagtgaagaaaatacaagtggaaaagcatgtgtctgtttgcagaaactgtgaatgcctttcttgcattgactgcggtaaagatttctggggcgatgactataaaaaccacgtgaaatgcataagtgaagatcagaagtatggtggcaaaggctatgaaggtaaaacccacaaaggcgacatcaaacagcaggcgtggattcagaaaattagtgaattaataaagagacccaatgtcagccccaaagtgagagaacttttagagcaaattagtgcttttgacaacgttcccaggaaaaaggcaaaatttcagaattggatgaagaacagtttaaaagttcataatgaatccattctggaccaggtgtggaatatcttttctgaagcttccaacagcgaaccagtcaataaggaacaggatcaacggccactccacccagtggcaaatccacatgcagaaatctccaccaaggttccagcctccaaagtgaaagacgccgtggaacagcaaggggaggtgaagaagaataaaagagaaagaaaggaagaacggcagaagaaaaggaaaagagaaaagaaagaactaaagttagaaaaccaccaggaaaactcaaggaatcagaagcctaagaagcgcaaaaagggacaggaggctgaccttgaggctggtggggaggaagtccctgaggccaatggctctgcagggaagaggagcaagaagaagaagcagcgcaaggacagcgccagtgaggaagaggcacgcgtgggcgcagggaagaggaagcggaggcactcggaagttgaaacagattctaagaagaaaaagatgaagctcccagagcatcctgagggcggagaaccagaagacgatgaggctcctgcaaaaggtaaattcaactggaagggaactattaaagcaattctgaaacaggccccagacaatgaaataaccatcaaaaagctaaggaaaaaggttttagctcagtactacacagtgacagatgagcatcacagatccgaagaggaactcctggtcatctttaacaagaaaatcagcaagaaccctacctttaagttattaaaggacaaagtcaagcttgtgaaatgaacatttgtgtatttaaaaattgaatccattctgctgacttcttcctttcactgctgtttataaaatgtgtaatgaattctaacaactcaaattttgctttttgaagctgtatttttaagttaagaaaatatatttttggtataacttttatgagaaaaataaaatatattctggtccaaacttctaaaaaaaaaaaaaaaaaa

SEQ ID NO: 4474 - DNA, 1530 bp, Homo Sapiens
  NM_017817
gtgctctgcacccagctccttcccgggcgcgcacacgcgcttcctctcttgagctcccgggcgtccggaggcgaaggtcccggagcgttcacgagaatccgggtcccggcgagtccggggtccgctcctccagctgcgcccagggcgcacgagccggccagcctcggggagagggcgcgggggcgctgggggttcttacgggaagatgaggaagcccgacagcaagatcgtgctcctgggggacatgaacgtggggaagacgtcgctgctgcagcggtatatggagcggcgcttcccggacacggtcagcacggtgggcggcgccttctacctgaagcagtggcgctcctacaacatctccatctgggacaccgcagggcgggagcagttccacggcctgggatccatgtactgccggggggcggccgccatcatcctcacctatgatgtgaatcaccggcagagcctggtggagctggaggaccggttcctgggcctgacagacacagccagcaaagactgcctcttcgccatcgtggggaacaaagtggacctcactgaggagggggccttggcgggccaggagaaggaagagtgcagtcccaatatggacgctggggaccgtgtctccccaagggcacctaagcaggtgcagctggaggatgcggtggccctttataaaaagatcctcaagtacaagatgctggatgagcaggatgtgccggccgctgagcaaatgtgctttgagaccagcgccaagaccggctacaatgtggacctcctgtttgagaccctctttgacctggtggtgccaatgatcttacagcagagagctgagaggccgtcacacacagtggatatatccagtcataagccacccaagaggaccagatctgggtgttgtgcctgactttcgagggcctcctggactcagactgtgcatgttgggaaggggtctgaccaggcaagctgtgatctgaaaggagcaaggaacagcaaggaattattttccagaatgacacccgcagcagaatgttggagtggaaatgatggctggctatgaagaggaggtcaacgtgtgtggtctcctcagtctctgtcagaggggtggggaggtgggaaacaggaatcctctgcaaagcccaatctgcagagtcgagacccctggtgctctctgccccgctgcctggcactggtcctttgcagccagccaccaacggcccccttgcccttgcagaggcagaagcctgcgtctgcacctgcacctctgaccgtttcagcaccctgggttgttaccacgtcctacaactctgacatttcttgttctcaagcgtttctcttcactgtgagttgtctttggtcctcccacttggtacttgtatcttgatgctttataatcctgactctcgacgtgttcatttatacaaaatcaggaataactttgtttttatactgattgcagcaatgttggctacatgtattattaaagaggatttttggaacaacttaaaaaaaaaaaaaaaaaaaaaa

SEQ ID NO: 4475 - DNA, 2402 bp, Homo Sapiens
  NM_017822
gagccgctggcgccactagagaagggcgagcggcgcggcagagtgcggcgcagcgcagctcctgaggttttggttatgaacaggattcggattcacgtcttgccaaccaatcgggggaggatcactccagtgcccaggtctcaggaacctctgtcttgtgcattcactcatcgtccatgctctcaccctcgtctggaggggcaggagttttgcattaagcatatccttgaagacaagaatgcacccttcaagcagtgtagttatatatcgacgaagaatggaaaaagatgtcccaatgctgccccaaagccagagaagaaagatggggtgtccttctgtgctgaacatgtccgtaggaatgccctggcacttcatgctcaaatgaagaagaccaacccagggcctgtgggtgaaacactcctgtgccagctgagctcatatgctaagacagagctggggtctcagactccagaaagtagtcgcagtgaagccagccgaatactagatgaagacagctggagtgatggggagcaggaacccattactgtggatcagacatggagaggtgaccctgacagtgaagctgatagcatagacagtgatcaagaagatcccctaaaacatgctggtgtctacacagcagaagaagtggccctgattatgcgtgaaaagctaattcgtttgcagtcgttgtatattgatcagtttaaacgacttcagcatctgctcaaggagaagaagcgccgatacttacataatcgcaaagtggaacatgaagctctaggcagtagtctcctgactggcccagagggacttttggccaaagaacgagagaacttaaagcgattaaaatgtctgcgacgataccgccagcgctatggagtggaagccttactgcataggcagttgaaggaacggagaatgctggccacagatggtgctgcccaacaggcccataccactcgttccagtcagaggtgcttggcctttgtggatgatgttcgttgttccaatcagtctcttccaatgaccagacactgccttacccatatttgtcaggatacgaatcaggttctcttcaagtgctgccagggatctgaagaggtaccctgcaacaaacctgttcctgtaagcctctctgaggatccctgctgcccactgcatttccagttgcctcctcagatgtataagcccgagcaggtactgtctgtgccagacgatctggaagccggccccatggatctgtacttgagtgctgctgagcttcagcccactgagagtttacctctggagttcagtgatgacttggatgttgtgggtgatggtatgcagtgtcctccttcacctttgctttttgatccttcactaacccttgaagatcatttagtcaaagaaattgctgaagacccagtggatattttgggccagatgcagatggctggagatgggtgcagatcccagggatctcgaaattctgagaaagcctctgcaccattgtctcagagtggattggctactgcaaatgggaagccagaacccacttctattagttgatagtttggggaaccattttactttggtggatttaaatttctcgttcttcaaagaagtatttctgatcatctctcacaaaacacaggcaacccagactaccttgtttttcttctggattgagtattatagtcaaacgtaaagccaaattttgaggacgtggaccgtgggtttcttcccactcagggcaaggaagagaaagagagataatccctatcaaagcttctgggattatttgggactatacctaaaaggaaagtgacatctttgtaatgggatttcccaagtcatggatagaaatccacttaagtagctaggtgggagctgtctttgtgagtggtgtctttgagatactgatggccctaatatcggttatctctatctgaagacctgcagtttagcttttcttcacctctacttaattgggcagtctttaacccctttccctggtgaactctggctttttatcctctgagaaaacagcccacaggactgggtcctccttatccgtcttgcttttaacctatgtaaatttctgtggttgctatcttatgtaaaatatagtaaaaatttattgtatatagtttctattaaatgttaaagaaaatgttatgaaaatatcaaacagtcacctgaattgaatgcatgttttgtttgagaatatagtttctttttcgcggttttggggacctgtctctgatgggaaagggaagttgggacagatgatacttccatcccaagaagtaaataaatcttcagtagctcattttggttttgctttgaaggaagaagtaaatgaaaaggggcaggacttattaaagcccatcagttccaaaaaaaaaaaaaaaaaa

SEQ ID NO: 4476 - DNA, 718 bp, Homo Sapiens
  NM_017823
gtggcccgggaggcgccgaggccagcgatgggcgtgcagccccccaacttctcctgggtgcttccgggccggctggcgggactggcgctgccgcggctccccgcccactaccagttcctgttggacctgggcgtgcggcacctggtgtccctgacggagcgcgggccccctcacagcgacagctgccccggcctcaccctgcaccgcctgcgcatccccgacttctgcccgccggcccccgaccagatcgaccgcttcgtgcagatcgtggacgaggccaacgcacggggagaggctgtgggagtgcactgtgctctgggctttggccgcactggcaccatgctggcctgttacctggtgaaggagcggggcttggctgcaggagatgccattgctgaaatccgacgactacgacccggctccatcgagacctatgagcaggagaaagcagtcttccagttctaccagcgaacgaaataaggggccttagtacccttctaccaggccctcactccccttccccatgttgtcgatggggccagagatgaagggaagtggactaaagtattaaaccctctagctcccattggctgaagacactgaagtagcccacccctgcaggcaggtcctgattgaaggggaggcttgtactgctttgttgaataaatgagttttacgaaccaggaaaaaaaaaaaaaaaaaaaaaaaaaaaaaaaaa

SEQ ID NO: 4477 - DNA, 1701 bp, Homo Sapiens
  NM_017825
aagtagggaaactgtgagggcggcaccggaagtggcgagcagtctgcgcgcggatggccgcagcggcgatggcggcagcggcaggtggaggggctggcgcggcccgctccctctcgcgcttccgaggctgcctggctggcgcgctgctcggggactgcgtgggctccttctacgaggcccacgacaccgtcgacctgacgtcagtcctgcgtcatgtccagagtctggagccggaccccggcacgcccgggagtgagcggacagaagccttgtactacacagatgacacagccatggccagggccctggtgcagtccctgctagccaaggaggcctttgacgaggtggacatggctcacagatttgctcaggagtacaagaaagaccctgacaggggctatggtgctggagtagtcactgtcttcaagaagctcctgaaccccaaatgtcgcgatgtctttgagcctgcccgggcccagtttaacgggaaaggctcctatggcaatggaggtgccatgcgggtggctggcatctccctggcctatagcagtgtccaggatgtgcagaagtttgcccggctctcggcccagctgacacacgcctcctccctgggttacaatggcgccatcctgcaggccctggctgtgcacctggccttgcagggcgagtcttccagcgagcactttctcaagcaactcctgggccacatggaggatctggagggtgatgcccagtccgtcttggatgccagggagttgggcatggaggagcgtccatactccagccgcctgaagaagattggagagcttctagaccaggcatcggtgaccagggaggaagtggtgtctgagctagggaatggcattgctgcctttgagtcggtacccaccgccatctactgcttcctacgctgcatggagccagaccctgagatcccttctgccttcaatagcctccaaaggactctcatttattccatctcacttggtggggacacagacaccattgccaccatggctggggccattgctggtgcctactatgggatggatcaggtgccagagagctggcagcaaagctgtgaaggctacgaggagacagacatcctggcccaaagcctgcaccgtgtcttccagaagagttgatgagggctacagctgttggggctctgccaggtcccctgggaccaactacagctccaatcagaaaccctgcgcttccttgagtgtggcttcccacttttcctgcattgtggagctgactgagtacaccggtgaggctggggtctctgcaggggaggtcactggaacagcgagcaagggactggtgcctcgctggtgctgggtctctggtttgctgcagagccgtaggacactcctggctcctcagtaggacagacagacgcaggcgggtttattttggaggggtacttgtggcattttcctgtattgtcttggacatgggatgtggggaggtggaaatgatgagcagtagcatcatttctccctgttgggttttagccagtttgccagcaagcgcatcctagcagggtccccgagcagcaggttgtgtggatgaagggacaggcacttgcatccagctgatctaggtcacacctggctcttggctgccatgtggcttattaacagcttccagtggaagtcgcaataaacagtttttggtaaatctcaaaaaaaaaaa

SEQ ID NO: 4478 - DNA, 2077 bp, Homo Sapiens
  NM_017827
tgaagaggcgggacacagacgacgattgggcgacgaaggactctatcgcggtcaactttcctcaggatctgattggctcgtcacggtcaggttcgctgccttgcaattggtctaaacgcggagtgggcgggacgaagtgccgccttgttcccggtccaagatggctgcgtccatggcgcggcgcttgtggcctttgctgactcgtcgggggttccggccccggggaggctgcatctccaacgatagtccaaggagaagtttcactacagagaaacgaaaccggaacctcctgtacgagtatgcgcgcgagggctacagcgcactccctcagctggacatagagcggttctgcgcatgcccagaagaggccgcacacgccctggagctccgcaagggggagctgcgctcggcggacctgcccgcgatcatctcgacatggcaggagctgaggcagctgcaggagcagatccggagcctggaggaagagaaggcagctgtgactgaggcagtgcgggccctgctggcaaaccaggacagtggtgaagtgcagcaggaccccaagtaccagggtctgcgggcacgtggccgggagatccggaaggagcttgttcacctgtaccccagggaggcccagcttgaggagcagttctacctgcaggcgctgaagctgcccaaccagacccacccagacgtgcccgtcggggatgagagccaggctcgagtgctccacatggtcggagacaagccagttttctccttccaacctcggggccacctggaaattggcgagaaactcgacatcatccgtcagaagcgcctgtcccacgtgtctggccaccggtcctattacctgcgcggggctggagccctcctgcagcacggcctggtcaacttcacattcaacaagcttctccgccggggcttcacccccatgacggtgccagaccttctccgcggagcagtgtttgaaggctgtgggatgacaccaaatgccaacccatcccaaatttacaacatcgaccctgcccgcttcaaagatctcaacctggctggaacagcggaggtggggcttgcaggctacttcatggaccacaccgtggccttcagggacctgccagtcaggatggtttgctccagcacctgctaccgggcagagacaaacacgggacaggaaccccgggggctgtatcgagtacaccacttcaccaaggtggagatgtttggggtgacaggccctgggctggagcagagctcacagctgctggaggagttcctgtcccttcagatggagatcttgacagagctgggcttgcacttccgggtcctggatatgcccacccaagaactgggcctccccgcctaccgcaagtttgacattgaggcctggatgccaggccgaggccgctttggagaggtcaccagtgcttccaactgcacagacttccagagccgccgcctccacatcatgttccagaccgaggctggggagctgcagtttgcccacacggtgaacgccaccgcctgtgctgtcccccgccttctcatcgcgctcctggagagtaaccagcagaaggacggctcagtgctcgtgccccctgccctccagtcctacctcggcactgatcggatcacagcccctacccacgtgcctctccagtacatcggccccaaccagccccggaagcctgggctgcctggccagcctgctgtaagctaagaacccacccacagcagccctcgggggtgtcactgcttcctggagttcaggagaccccggacacctgggacctgtgttgctgagcccgtcctgacatctgtgttcttcctgtcagctccacgcccgggcccctggaccacggggtccacctctcctctgtccttgctgcctcagagtcagtcactgaccctgttatcattgagggtcccagtgggaagcaggacgtctgggctttacggttctagggacaggagaagcagaggaagaggcttccatccctccttccttctttcctcctacagtgctgagcaaaaagtccccaataaatggtcaggacaaaggaaaaaaaaaaaaaaaaaa

SEQ ID NO: 4479 - DNA, 1734 bp, Homo Sapiens
  NM_017829
ctggtggaccagctggctcctaaagaggagaggggactaaatcatgtatgcttggttctttcttcccagcttctctcagagcccacccacctttgggttcctgttggacatcgatggagtgcttgtgcggggccacagagtgatccctgctgctctgaaagccttccgaaggctggtgaactcccaggggcagctgcgggtgcccgtggtttttgttacaaatgctgggaacatcttacaacacagcaaagcccaggagctgtcagccctgctggggtgcgaggtggatgcagaccaagttatcctctctcacagccccatgaagctcttctccgagtaccatgagaagcggatgctggtgtctggacaggggcccgtgatggaaaatgcccagggactgggcttccgaaatgtcgtcaccgtggatgagctgcggatggcctttcctctgcttgacatggtggacctggagcggcggctaaagaccacgcccctcccgaggaatgacttcccccgcattgaaggggtgctcctcctaggggagccggtccgctgggagaccagcctgcagctgatcatggatgtcctcctcagcaatgggagccctggggctggcctggcaacacccccctacccccacctccccgtcctagccagcaacatggatctcctgtggatggctgaagccaagatgcccaggtttggacatggcacctttctgctgtgcctggaaaccatttaccagaaagtgacgggcaaggagctgagatacgagggcctgatgggcaaacccagcatcctcacttaccagtatgccgaggacctgatcaggcgacaggcggagaggcggggctgggccgcccccatccggaagctctatgctgtgggtgataaccctatgtctgacgtatacggcgccaacctgttccaccagtacctgcagaaggcaacgcatgatggggcgccagaactaggggccgggggcacacggcagcaacagccctcagcaagccagagctgcatctccatcctggtgtgtacaggcgtctacaatcccaggaacccacagtccacggagcctgtccttggaggaggggagcctccattccacgggcaccgagacttatgcttcagtccagggctcatggaggcctcccacgtggtgaatgacgtgaatgaggctgtgcagctggtcttccgcaaggagggctgggctttggagtgagggcagtgcggtggaggtgagggggtgagcctggacctgtgggcgagtcccattggctgggctctggcctgatcactgggctcaggtcagggcttggttcccttgccacccttcttgctgccccatgagtgtggcattactggtcacttggaagaagacagtgactctttttccctgctgggtagcattttgtatggaacggttggaattttctgggcccagttcccacgtgcctttcgtggcagtctaacctcaggccattctcttcccctgtgtgcctcagtgtccttctcatttcagtagggacttctgaaatgggggaggcagtgtggaatactgtggatgtctgtgcagagcctttgccggcactgaaggcatgcagcctgtcggcagagtgtcttaacaccagatgctactttttactgtattgtagtttattgcccggagatgtggggctttttttttaaataaaataatcataataaatgttcatgatgctgaaaaaaaaa

SEQ ID NO: 4480 - DNA, 2005 bp, Homo Sapiens
  NM_017830
atttcctgccgtaagtatacagtgcctccgggtcgcggtcattttgagcccctgtctggatgacttcttgcggctgttctacccctccccctccccgcggtaccttgcacttttctccctccctgccccctctcgagtccaccctccgggccttctgcccctgatcgcttggttttccttgcagtcgcctgctgctgtcgtcgggaggaaagatgaatgggagggctgattttcgagagccgaatgcagaggttccaagaccaattccccacatagggcctgattacattccaacagaggaagaaaggagagtcttcgcagaatgcaatgatgaaagcttctggttcagatctgtgcctttggctgcaacaagtatgttgattactcaaggattaattagtaaaggaatactttcaagtcatcccaaatatggttccatccctaaacttatacttgcttgtatcatgggatactttgctggaaaactttcttatgtgaaaacttgccaagagaaattcaagaaacttgaaaattccccccttggagaagctttacgatcaggacaagcacgacgatcttcaccacctgggcactattatcaaaagtcaaaatatgactcaagtgtgagtggtcaatcatcttttgtgacatccccagcagcagacaacatagaaatgcttcctcattatgagccaattccattcagttcttctatgaatgaatctgctcccactggtattactgatcatattgtccaaggacctgatcccaaccttgaagaaagtcctaaaagaaaaaatattacatatgaggaattaaggaataagaacagagagtcatatgaagtatctttaacacaaaagactgacccctcagtcaggcctatgcatgaaagagtgccaaaaaaagaagtcaaagtaaacaagtatggagatacttgggatgagtgaaaaattacatcattggacatgaaggagtttcaacatccagcttcatctaggtggtcatgattacctgcatgctttgagctcagcagcagtcttcataaacacatttaaaacaagatcctgggtttttgtggtttgacttctatggtgttttaaaaaaacacagatttttagtgttaatattgtgtaaatgtactcaccttagggattcatttgaatgatggtattataccatgattgtatacagtttgtgaaattgttgcaagggcaaagataactcttaaaaaaccgtcgagattacaatgctctagaatcagcatataagaaaataaatgatatctgcatgttgaattggggtggatggggggagcaagcataatttttaagtgtgaagctttgcatcaagaaattattaaaaagctttttttctccagtattttctgtattatcttaatgtttatggcaaataaaatgtaaaggaacatgcaacagccctcatcttccttgattttatggttttattgtttgtaatttattgatttatttttaagctagttataatcatgtaggtataggaaataaagtcatctataatatttctataatatggctataatatggctataaatctataatatggctggaggcagtgggcagtggttcatgcctgtaatcccagcactttgggaggccgaagtgggaggattgcatgagtccaggagtttgagaccagcctgggcaacaaagcgagaccctgtctttacaaaaaaataaaaattagctggcgatggtgtcgtgtgcctgtagtcctagttacttaagaggctgagttgggaggatcagttgaacccagtggttctgggttgcagtgagctgtggtcacaccactgaactccagcctgtgcgactgagtgagaccctgtgtctaaaaaaataaaaatataatgaatgtgatttatgtagataaattgataatatagtaaataggtaaatgccttaaaaagcatttttaaagaatttgtaaattctaaaacaataaaaatttggtatacatcaca

SEQ ID NO: 4481 - DNA, 5888 bp, Homo Sapiens
  NM_017831
acttctgacagtggggaaagcagctgtgtgtgatagcttggaaggtttactgctgcctcaagtcctcttctctgcagttgaggtttcaggtttcaatcctcccaataccacaagacagagcacggggcggctgccgcctccgcctccgcgccttaacctaggcggcttgccgaagatctcagccccgcggccgcgcgctcgccctgccctagaccagggttgggcgcagcggcggaggtggcttctgggctgcgcgagctgggagagctgggaggcggcgatcgcagctgggccgggacttccttcctccaccgcacggcaacaaaacaaccctgcggcaggcactgagtgcttcgcagctgtctgggcgagaggcacagcgatgggctccgtgctgagcaccgacagcggcaaatcggcgcccgcctctgccaccgcgcgggccctggagcgcaggagggacccggagttgcccgtcacgtccttcgactgcgccgtgtgccttgaggtgttacaccagcctgtccggacccgctgtggccacgtattctgccgttcctgtattgctaccagtctaaagaacaacaagtggacctgtccttattgccgggcatatcttccttcagaaggagttccagcaactgatgtagccaaaagaatgaaatcagagtataagaactgcgctgagtgtgacaccctggtttgcctcagtgaaatgagggcacatattcggacttgtcagaagtacatagataagtatggaccactacaagaacttgaggagacagcagcaaggtgtgtatgtcccttttgtcagagggaactgtatgaagacagcttgctggatcattgtattactcatcacagatcggaacggaggcctgtgttctgtccactttgccgtttaatacccgatgagaatccaagcagcttcagtggcagtttaataagacatctgcaagttagtcacactttgttttatgatgatttcatagattttaatataattgaggaagctcttatccgaagagtcttagaccggtcacttcttgaatatgtgaatcactcgaacaccacataattttattaaaacgaagggaaaagggaccactgaattgcaccatttaagatgctgcttgaacaaatgggagggaagttgtcaatgattgatgggcaaaaatgtacaacacagttatgtgtttgtccatgtttattgttatagtgcatttaaaaactgctttaattttaatggtttaaatctgttttacatccttgagattcttacacatctaacaacaaaaaaaattatctacatcagtcattgttacatggaaaagacaggtggtaggcaagtaggtggaggatctcggtttgcaaattagataatactctgtgtataatgctacatatcaataactaccatcatggttaggcacgataactaatctttgttctgtgtaaaaaaatatggagagtgaaacaaagtgcagacattcaaagaaataagaaatctgctccaatgctcttgttctaatctctaataggttaacgttaataatcttgtatgggagttggaaaggaaaattttggaagtcaagaaagtccatttaggccggacgcggtggcttacgcttgtaatcccagcactttgggaggctgaagcaggcggatcacaaggtcaggagttcgagaccagcctggccaacactggtctctgtgaaactccgtctctactaaaaatacaaaaattagctggacgtgttggcgggcatctgtaataccagctacttgggaggctgaggcagaagaatcacttgaacccgggaggcagaggttacagtgagctgagatcgcaccagtacactccagcctgggtaacagagctagactccatctcaaaaaaaaaaaaaaaaaaaatccatttaaccaaattgtcttacataatactgtaacaaaacaaattttgtgttagaaaagtatacttaattctttgactttttataactgcatacataagaattcaatatttttcaaatatttatagcttatttagaaatatttctataatataagcaatttcttaaaaaccatcagatgatacttacagtataagtattcacatccagactttttagtagaaaaccctaagggctttgatatcttttttgattgtaacattttaaaaattatgaaataaaagtactgaaaaccagacacaaaatttatagctgaatgccttattataaggaaatactcttttaggactcagccagtcaccccacgtgtcctttttgtgtcctgtcacaattacaaccccacaaaagtaactgctagactgatttaaatggtaatcactttgttgcatttgattactgctgccacacctaaatgcatatatctatattttaatattatcaatttaaagttgttattaaatgtatattttattttacatctcttttttaatctagaagttcctccttctttccagttccttaaaatttacctggtgaagaacctgatcctaggacctatagagtttcccatactttgtattttgctgattgcacactcatggcacggttcagcacattgccctgtcctctcgatattagcacacagtgcaggttcaggcacattgaatttgagaagacttaggttcagtcctttggcaagactgtaaatcacggtgtctttctttccttcctccttcttctctctctctctctctctctctttccttttctttctctttttttcagagttgcactctgttgcccaggctggagtacagtggcacgatctcgactcactgcaacctccatctcccgggttcaagcagttctcctgtttcagcctcccaagtagctgggactacaggtgcacgccaccatgcccggctaatttttgtatttttagtagaggggtttcaccataatggtcaggctggtcttgaactcctgaactcaagtgatccaccagccttggcctcccaaaatgctgggattacaggcatgagccaccatgcccagctaatttttgtatttttagtagagacagggtttcaccataatagccaggctggtctcaaactccttaccttgtgatccgcccacctcagccttccaaagtgctgggattataggcgtgagccactgtgcccggcctacagggtttttatctaacctttctgttacaactgtacctctccttctgtactgaaagtcctggttttcaagaacacagggcacgatagaattagaacatcccacaattactcatttcttttatttatcttacacttacagctgtctcagaataacaatagaaatacaaccacaaataatatggcaattgaaacaattaaaaagttttcatttgcttttctcattctttcccaatttttttttttttttgagatggagtctcgcgctcttgttgcccaggctggagtgcaatggcacgatctcggctcactgcaacctctgcctcctggattcaagcaattctcctgcctcagcttcccgagtagctgggattataggcatgcgccaccacgccctgctaattttgtatttttagtagagtcaggatttctccacattggtcaggctggcctcaaactctcgacctcaggtgatccgcctgcctcggcctcccaaagtgctgggattacaggtgtgagccactgcgcccgacatcccaatttttaaaatagttatactatgtcaacattttcagaacatactggtatagcatactgtactttcttccttttatcccccatttattcttagttcttcaactatatatttaacacttgcccccagttttgttttgttttgttttgaggaggaatcttgctctgttgcccaggctggagtgcagtggtgtgatcttggctcactgcaacctccgcctcccgggttcaagtgattctcctgcctcagcctctcgagtagctgggattacaagtgggcaccaccacacccggctaattgttgtatttttagtagagatgggttttgccatgttggccaggctggttttgaactcctgacctcaagtgatccacctgtgttggcctcctaaagtactgggattacaggtgtgtgccaccgcgccaggcaattgcccccagtttttatttgatggctctgactgtttctcatatctgactctttaattatgaatccagggcatagattagtatctccatcttgtaaggatgcaaagaagccatgaaaataagtaatatcaactcctgaggataaaacgttacttgactagagttagctttttaattgtaatcatttataaacttctttgttccttacatataagcatagtcataaccatggtacccaaaattttctataagttattgtaactccttaaaggtcttgctacagttcttttatccagtacaaataattgggaaaatgtaaagctgaatgaaatctagtgagcctcatatcctcccttttagatattgattttaagtttgcttttcacagctgctaaaaagtaacaactgatttttagttccacaacctctctttcttcaatttagatggatcatacaataaagcaaaatctggctggttacagtggctcacacctataatcccagcactttgggaggctgaggtggagggtctcatgagcccaggagttcaagaccaacctgggcaatatagtgagactctttctatttaaacaaaaacaaaaacaaacaaacaaacaaacaaaaagctgggcatgatgcacacctttagtttcagctactaaggaggctgaggttggaggatcacttgagcctaggaggtcaacactgcagtgagctatgatcatgctactgccctccagcctgggcaacagagcaagaccctgtctccaaaaacataaataattaaatataaataaaaataaagcaaaatctgttgggaaacgagaaaaaggagaggaatttttcaggaataatcataaaaagaaatgatcatcagactgaaagtccagagcctgagaaatgaaaacatatttttaagcattggtgttgaccatgcagacaaacttttgttaattcagagcgatacaaaaggcactttgaatctataaaacttgaaaaagttaaaaattgtatgtcggataaagctttaagtcatctgtcactattaacctcagtgcagcaattctgactcctgtgcctggattccttttatgataattttgccacctacaggacagattaggtgctggtcgcctgaattattttgtgttctgaattattttgagctctaaaatggtaaagtacaaatactcattgttttactgtgcctttggccttttataaaaaggtatttataattcgttgataaaaaccaatatttgaagctgttgattaccaacaaaaaagtttcactctctttatagtgcttcaggatacaactttttcagggccttattagagaaaaactgattcacatgttattcttctaaagctaaattattaaaatgtaggttgaaagattggattgattgtgaatctacactaaagatatggttccaggcagacctccttagagacctccaggcagacctccttactgtcttcagtgatgtttaatttcattactgttactgggtgccaagtgtctttcatttggaagtgaacttactccagttattgaatgtttatcatatcataatttgcatttttccaacattgaaggtattttaaaaagtcactaagagattcattcttttattattcaactacaaaaaaatagtgtaatgatcagaatttaaaatgtgtgattctttttcttctgtaagtatgtattgctatgataaataaaaaatggcaggaccattgtttttattaaaat

SEQ ID NO: 4482 - DNA, 1925 bp, Homo Sapiens
  NM_017832
acgcgctgtgcgccggaagagcacgcccagtccgggctgcgcggaggaagcgctggggtcccggagggcgggggtggcggcgccggaggtcgccatggctaccgagcccgaagccgcggagccggtggtgccttcgctcgtggatcgatacttcactcgctggtacaaaccggatgtcaaaggaaaattttgtgaggaccactgtatactacagcactctaaccgaatatgtgtcatcacattggcagaatctcatccagttcttcaaagtggaaaaacaattaaaagcatttcctatcagatcagtaccaactgtagcagacttcagaacaaggtctctgggaaatttaagcggggggcacagtttctaacagagcttgcacctctctgtaagatttactgctcagatggtgaagaatatactgtgtctagttgtgttagaggacgtttgatggaagtgaatgaaaacatcctccataagccatctattcttcaagaaaagccatctactgaaggctacattgcagttgtgttacccaaatttgaagaaagtaaaagcataacagaagggttactgacacaaaaacaatatgaagaagtcatggtgaaacgcattaatgccacaacagctacgtcatgaggattgacatggaacaaaaagcaaagtgggattcttgttacctggcctaaaccatcagggtactaaaggagaagaaccagtatatgtaaagcatacctaacagccagccatatgcaggggaggcctagtgcttcacttagttttccctctctgtcttcataatgagccttggttcccatttgtctacagcctgccagatctggcctgcccatgtactcacactgttctcttgcatctctctaacaactggcatgcaaggcatgtttttctgattaaaaacaaacaaagctctttgaagaagatttagaaaatacagaagagttttaagtagccaagtaaaaataatttacccatcatcccataatccagaagtaaatacatttgacccttgagcaacataggtttgaactgcaagggtccacttatgcatggactattttcaactataaacgagtcaaaaatatatcattaaccaaacacgaaacccacttatagagcaggttcatatactcaggttccaaagggccaactgcaggacttgagttctcacgtatggatttgggtatatgtggaagttcctggaaccaatcccctatgtaaaccaagggataactactacattttaacctacttctgtttgaacatatggtatggttattgcttttgcctcgttttcctaacagtttgaagtttaaaaaaacctaacccacctttcttacccagtcttctataatgtgcctaccaaaaagcctagtcctagcccatctgcctcaactcctctcccttttaggttgtagggaagaggccggagtgtagagtatattatatcttctgtcccccttatgccaacaagatggccttcccctctgaaacaaagtaaaactgcaacactgtgacttcttaaatgagggatatgtgaaaaggctatgaaaaatacaaaggctttcctaggaaatgtgttataatgcagcgggaagctaattcttgaaatatgcacattatagttactcagtctcacatactctagttactggcaaagaagttactgagaatatgtcattcaaaggcataggggcctttgaatggaacaaatgctttcacatcatttaaagtaaaaaaaaacctccaacaactgtgaatttatagtttaagagtgatttacactgaatttcaaataaaaggactataaaacgtgttatttttctgtaagggctataacatacatgtcaatatcactgtttttaaataaaatatacttttatacagaagaaaaaaaaaaaaaaaa

SEQ ID NO: 4483 - DNA, 1245 bp, Homo Sapiens
  NM_017835
cttccgtcggtccgctcagaatcagctgtcctctcagactgtgtgggtggtttccccggccgcagctccgtacgggcttggattgctgggcctcggtgcaccccagcctcccccactcgggttctgagcttgagctggcggctctttaactctgcttcactgttgctcttggcaacatccacttccgggagcgagtgccgtttcccccgctcaccgcgggctagggagcgtgggattccggactgtgagcggctgttagtgcgtcgcagctgctggcgatccggcgaccctcggccggcaggacccgcgggccacgcagccggggccttctcaacgcctcagtacctcggcgggaccgccatggttctgctgcacgtgaagcggggcgacgagagccagttcctgctgcaggcgcctgggagtaccgagctggaggagctcacggtgcaggtggcccgggtctataatgggcggctcaaggtgcagcgcctctgctcagaaatggaagaattagccgaacatggcatatttctccctcctaatatgcaaggactgaccgatgatcagattgaagaattgaaattgaaggatgaatggggtgaaaaatgcgtacccagcggaggtgcagtgtttaaaaaggatgatattggacgaaggaatgggcaagaaacaagtggaagccggtgtctgtgttaccatggagatggtgaaagatgccttggaccagcttcgaggcgcggtgatgattgtttaccccatggggttgccaccgtatgatcccatccgcatggagtttgaaaataaggaagacttgtcgggaacacaggcagggctcaacgtcattaaagaggcagaggcgcagctgtggtgggcagccaaggagctgagaagaacgaagaagctttcagactacgtggggaagaatgaaaaaaccaaaattatcgccaagattcagcaaaggggacagggagctccagcccgagagcctattattagcagtgaggagcagaagcagctgatgctgtactatcacagaagacaagaggagctcaagagattggaagaaaatgatgatgatgcctatttaaactcaccatgggcggataacactgctttgaaaagacattttcatggagtgaaagacataaagtggagaccaagatgaagttcaccagctgatgacacttccaaagagattagctcacctttctcctaggcaattataatttaaaaaaaaaaaaaaaa

SEQ ID NO: 4484 - DNA, 2349 bp, Homo Sapiens
  NM_017836
cccgggcccccggcggggctctgcgctgccggagcttgggcgtctgctgctgtcccggagcgccaagtcgtccgaggtccggccgcccggccggggcggggccagggaggcccggccttcccgcttcctgcctgagccgcaggcccgcccctgcgtcctccgcccgcctctttcccgccgccgcctgggaggggacccgggctgccaggcgcccagctgtgcccagatggatgggacagagacccggcagcggaggctggacagctgtggcaagccaggggagctggggcttcctcaccccctcagcacaggaggactccctgtagcctcagaagatggagctctcagggcccctgagagccaaagcgtgacccccaagccactggagactgagcctagcagggagaccgcctggtccataggccttcaggtgaccgtgcccttcatgtttgcaggcctgggactgtcctgggccggcatgcttctggactatttccagcactggcctgtgtttgtggaggtgaaagaccttttgacattggtgccgcccctggtgggcctgaaggggaacctggagatgacactggcatccagactctccacagctgccaacactggacaaattgatgacccccaggagcagcacagagtcatcagcagcaacctggccctcatccaggtgcaggccactgtcgtggggctcttggctgctgtggctgcgctgctgttgggcgtggtgtctcgagaggaagtggatgtcgccaaggtggagttgctgtgtgccagcagtgtcctcactgccttccttgcagcctttgccctgggggtgctgatggtctgtatagtgattggtgctcgaaagctcggggtcaacccagacaacattgccacgcccattgcagccagcctgggagacctcatcacactgtccattctggctttggttagcagcttcttctacagacacaaagatagtcggtatctgacgccgctggtctgcctcagctttgcggctctgaccccagtgtgggtcctcattgccaagcagagcccacccatcgtgaagatcctgaagtttggctggttcccaatcatcctggccatggtcatcagcagtttcggaggactcatcttgagcaaaaccgtttctaaacagcagtacaaaggcatggcgatatttacccccgtcatatgtggtgttggtggcaatctggtggccattcagaccagccgaatctcaacctacctgcacatgtggagtgcacctggcgtcctgcccctccagatgaagaaattctggcccaacccgtgttctactttctgcacgtcagaaatcaattccatgtcagctcgagtcctgctcttgctggtggtcccaggccatctgattttcttctacatcatctacctggtggagggtcagtcagtcataaacagccagacctttgtggtgctctacctgctggcaggcctgatccaggtgacaatcctgctgtacctcgcagaagtgatggttcggctgacttggcaccaggccctggatcctgacaaccactgcatcccctaccttacagggctgggggacctgctcggtactggcctcctggcactctgctttttcactgactggctactgaagagcaaggcagagctgggtggcatctcagaactggcatctggacctccctaactgggccccgctggtcccatttgctcattagaatttcctctcacatcagtgggatacagaattcagtttctcccttgccaggtccttgggatggttgacccctgcctctgcagtagccttttgtgagtctgctaaggtagctctcacacacctcggctctggggttgatacctgagcctgcaatagagccctgaaatcaagagcatggcttgagtgtgtgaatatgatgtgtgcacatgcttaatgagcgtgcaagtgtgcacacgtttgtggagaggagggtgttctggcctgagaaggtaaagaagaggcatgtccagtatgctttgcagggtgtgtttgctcttttccatgcccatgcaacccagattggggtggagcaggaaggagctcttttctgttcccaagcctcagaactcttgagctgtggcttacttgctgtcttcaccaggttcaagctccgtgggccacactgctgctgtgccaagaaggtgtacagcctccccaggatggggcctcatacaacccttcatctgcactcaacatttaatcgtgtccttgctgtctttttattttcctttttgtttgttagcaaaaacctctatttagatttcaataatcagagaagtgtaaaataaaacagattatattgtacttga

SEQ ID NO: 4485 - DNA, 1196 bp, Homo Sapiens
  NM_017840
actcaacctcccccggaactcaacccccgtcgctcgagtttctttcgcttccgtcgggactctgcggagtggacccgagtgaacacaacttccggccccactgagcggtgtcctgagccgattacagctaggtagtggagcgccgctgcttacctgggtgcaggagacagccggagtcgctgggggagctccgcgccgccggacgcccgtgaccatgtggaggctgctggctcgcgctagtgcgccgctcctgcgggtgcccttgtcagattcctgggcactcctccccgccagtgctggcgtaaagacactgctcccagtaccaagttttgaagatgtttccattcctgaaaaacccaagcttagatttattgaaagggcaccacttgtgccaaaagtaagaagagaacctaaaaatttaagtgacatacggggaccttccactgaagctacggagtttacagaaggcaattttgcaatcttggcattgggtggtggctacctgcattggggccactttgaaatgatgcgcctgacaatcaaccgctctatggaccccaagaacatgtttgccatatggcgagtaccagcccctttcaagcccatcactcgcaaaagtgttgggcatcgcatggggggaggcaaaggtgctattgaccactacgtgacacctgtgaaggctggccgccttgttgtagagatgggtgggcgttgtgaatttgaagaagtgcaaggtttccttgaccaggttgcccacaagttgcccttcgcagcaaaggctgtgagccgcgggactctagagaagatgcgaaaagatcaagaggaaagagaacgtaacaaccagaacccctggacatttgagcgaatagccactgccaacatgctgggcatacggaaagtactgagcccatatgacttgacccacaaggggaaatactggggcaagttctacatgcccaaacgtgtgtagtgagtgtaggagataactgtatataggctactgaaagaaggattctgcatttctattcccctcagcctacccactgaagtctttgggtagctcttaagccataactaaggagcagcatttgagtagatttctgaaaaacaatgttatttgttgatttaaaaagaaaactgtatttttattaaataaaatttaaacatcacttcaggatataaaaaaaaaaaaaaaa

SEQ ID NO: 4486 - DNA, 1368 bp, Homo Sapiens
  NM_017843
ggagctgcgagccgcgaccgccgggagcgcacctgccccgcctccgccaggcggtccgcggggcatgcagcggaccgggggcggggctccgaggcccgggcgcaaccacgggctcccaggcagcctccgccagccggaccccgtcgccctcctgatgctgctcgtggacgctgatcagccggagcccatgcgcagcggggcgcgcgagctcgcgctcttcctgacccccgagcctggggccgaggcgaaggaggtggaggagaccatcgagggcatgctcctcaggctggaagagttttgcagcctggctgacctgatcaggagtgatacttcacagatcctggaggaaaacatcccagtccttaaggccaaactgacagaaatgcgtggcatctatgccaaagtggaccggctagaggccttcgtcaagatggttggacaccacgtcgccttcctggaagcagacgtgcttcaggctgagcgggaccatggggccttccctcaggccctgcggaggtggctgggatccgcagggctcccctccttcaggaacgtggagtgcagtggcacaatcccagctcgctgcaacctccgcctcccgggttcaagtgattctcctgcctccgcctcccaagtagctgggattacagaagtcacctgcaccggtgcccgtgacgtacgagctgcccacactgtataggacggaggactattttcctgtggacgccggggaagcacagcaccacccccgcacctgccctcggcctttgtgagctttgtggtcttcccatcaggaacgctggaaagtgacattgtgtacacactgcagcttgggggttttttctttgtattgctgtttattttatattttaaaaatatttaaaaaaatgtcgagatggggtctcactatgttgtccagactgatctcaaactcctgggctcaagtgatccacccaccttggccttccaaagtggtgggattatgggcaggagcctccgtgcccaggctgctgccattttcaaatttcctccctgcctcatgtgagaccacagggtttggagaagcagttggaacccacgtgtggtgatgcctcccacatcggcctgcttggggttctacaggggttgagggaccaggcctggccggggctgatggacagtggggactttccttctctccatgatggctttgcaggggctccatggtccttctctctgtgatgggtttttgcacggggtgtgctctgccactgtggtgggtgggtggatgctgcttctgttgcctccagacctcggtgcccacagccttgaggatccttccaataaaggtgtcaagagctcaaaaaaaaaaaaaaaaaaaaaaaaaaa

SEQ ID NO: 4487 - DNA, 2476 bp, Homo Sapiens
  NM_017844
gtaggcgcagggctggcaagcagtcgggacgggagcgcgggcgtccgcggtggctgcagtcccgtcggtctccctgctgtccggcgcgagctcttcgagtcttgcttggttggaagaccacagacatggaaggggcccatgcctcccttagcttagaggacgaagtctctggggctggcagccgccaacgcccgctagaggggaagggcggcgagacccctgctgccgaggagccggggtccctgaagaactacgctgtcttcgccacaagggatgtttcagcagcccctgagaaggaagaggaggaagctgagggcccgctgagggcgcaggacctgagggagtcctacatccagctcgtccagggtgtgcaggagtggcaggatggttgcatgtaccagggggagtttgggttgaacatgaagcttggatatggcaaattctcttggcccacaggcgagtcataccatgggcagttttaccgggaccactgccatggcctgggtacctacatgtggccagatggctccagtttcacgggcacattttacctcagccaccgagaaggctacggcaccatgtacatgaagacacggcttttccagactcactgccacaacgacattgtcaaccttctcctggactgtggggccgacgtgaacaagtgctcagatgagggtctcacggcactcagcatgtgtttcctcctccactaccccgcccagtccttcaagcccaatgttgctgaacggaccatacctgagccccaggaacctccaaaattcccagttgttccaatcctttcatcatcatttatggacacaaacctggagtctctgtactatgaggtgaacgtgccttcccagggtagctatgagctgaggccaccgccagcaccactgctcctgccacgcgtctcaggcagccacgagggcggccacttccaggacaccgggcagtgtggggggtccatagaccacaggagcagctctctgaagggggactccccgttggtgaagggcagccttggccatgtggaaagcgggcttgaggacgtgttgggaaacacagaccggggcagtctgtgcagtgctgagacgaaatttgagtccaacgtgtgtgtgtgcgacttctccatcgagctctcgcaggccatgctggagagaagcgcccagtcccacagcttgctgaagatggcctcgccctcaccgtgcaccagcagcttcgacaaagggaccatgcggaggatggcgctgtccatgatcgagcggaggaagcgctggcggaccatcaagctgctgctgcgccggggcgcggaccccaacctgtgctgcgtgcccatgcaggtcctgttccttgctgtgaaggccggggacgtggatggggtgaggctgctgctggagcacggggcgaggaccgacatctgctttccgccgcagctgagcaccctgacaccactccacatcgctgccgcccttcctggggaggagggggtacagattgtggagctgctgttgcatgccatcaccgatgtggacgccaaggcatccgacgaggacgacacttacaagcccggcaaggttgtgaaggagctcctgacccagggagctgaccccaacctgcccctgaccaaaggcttgggcagtgccctgtgtgttgcctgtgacctgacctacgagcaccagaggaacatggacagcaagctggccctgattgaccgactcatcagtcacggggccgacatcctgaagcctgtaatgctcaggcagggagaaaaggaggcagtgggcacagccgtggactatggctacttcagattcttccaggaccggaggattgcccgctgccccttccacacgctgatgccagcagagcgcgagacgttcctggcgcggaagcggctcctggagtacatgggcttgcagctacggcaggctgtctttgccaaggagagccagtgggaccccacgtggctgtacctgtgcaagagagcggagctgatccccagccacaggatgaagaagaagggccccagcctgcccaggggcctggatgtgaaggagcaggggcaaattcccttcttcaagttctgctaccagtgtggccgctccatcggggtccgcctcttgccctgccctcgctgctacgggatcctgacctgcagcaagtactgcaagaccaaggcctggaccgagttccacaagaaggactgcggggacctggtggccatcgtgacacaactggagcaagtttccaggaggagagaagaattccagtgaagcagcagctgcacgtccgaggcttggggaggacccaggactgtgtgggtttcttacctgcctgagccacctcagggaatcttccagcctaatgcaggcatttctgcacctttggggtcatgctttgtagcagtgtctcccttgcgacctcgcaataaattggccccacggggtgattttgacagtcaaaaaaaaaa

SEQ ID NO: 4488 - DNA, 2376 bp, Homo Sapiens
  NM_017850
gagactgtgggcgcgtggtgcagtccctggagggttctcacgctttggctgtctggacttttaagtttttccgctttttcaggaaggcgaccggcagcctcgggcaggggagacaggactgtatgtcagagaagagacggcgcttggacgccaggaatcctctgaagcaggagactgccctatccagaagatgactcaagaccggcctctgcttgccgtgcaggaggcgctgaagaagtgcttccccgtggtggaggagcagcagggcctgtggcagagtgccctgcgggactgccagcccctcctgtcctccctcagcaacctggcggaacagctgcaggccgcacagaacctgcggtttgaggatgtgccggcgcttcgggccttcccagatttaaaagagcggctgaggcgtaagcagctggtggctggtgacatcgtcctggacaagctaggggaaaggctagccatcctcctcaaggtgcgagacatggtcagcagccatgtggagcgagtgtttcagatctatgagcaacacgcagacacagttggcattgatgctgtcctgcagccttcagcagtgagcccctctgtggctgacatgttggaatggttgcaggatattgagagacattatcgaaagtcgtacctgaagagaaagtatcttctttcgtctatccagtggggagacttggcaaacatacaagctttgcccaaggcctgggaccgaatttcaaaagacgaacaccaggatcttgtacaagatatcctattgaatgtttccttcttcctggaagagtaaggaagctatgcgtatctggagaccacgggcaccacagttgaagactgacattctgaaccctgatgtttctaaagaaacgtcagtatttcagtctgacatatttgaaacatcagtgccttgaaccttaggactgggtcttggggaggattagcgcctagatgtctgattttggagctgcagcatgccaggccgtggctgagggtatgtgagccatgccttgcccttttctgaggctcagggaagtggatggagctagagagacaacaggaaagacggtgctgaagaacatagtgtctttcctctattgtggacctaaagaggtggggaagcaaggacaagaggcaaagagccacactgcccttggcatcatccaaagcattgtctggttgacaccaggtcctggttttgtgtcttttgtcaatacctgaatccttgacaaaagaaaaagtggttttgatgatttaaagaaataagggtgattttgacagaaaatatattttaaaaattttgaccaattgcaatagttatcctcaagccaatttccagaacctgccaccagggggaggtgatgcagcatgaatcattctgaatgctttgtctttgaagtgctcccctattgctgttaccatctcagaggaagtaactgggcatggtgagactcctaaaatgacaggagtttttttggccaaagctggcatctgacttgccacattcctctgagtctggagtagccgcaggggtgggagaatgccagcccagagtcagtccatcggggttacatttccaaggtctgctgccttcatctatgtaatggccgtgttactttcagatctttcagcttcccagagtgttgtgggaatcttggtcattgaatgtaaagggacttagtaaagggtatagatatttttcaaaaatgaaaataactttttttcttataagtgataagcttttataaagatcataggaaaactagaaaaaatgtaaaatgtagaaaattgtaaaacaaacttcattagagatattttgatagataccttttcagtgtctatttacaaattttttcttttaatatagatagggtctcactatattgcccagctcactcctgagctcaagggatcctcccaccatagcctcccaaaatattggaaatacaggcatgagccactgctcctgaccaattcacaaatttttttaaagaacaaacgtgctatcatcgatacatactgttaggttgtctttttttaaaaaacctaatgtaatttgttcatctttttatatctgtaaatatagctcaacacagttatattctttttgtgaatgtattatatctacaatttaccttttttcttagattttacatgcattttcccaaatctttgtgtttgcctatctgtaaaggtaatacattctgattacaaaaaatgaaaatgttacatagaaatgtaccgttatccatctaccagataactattattaataatgtgtatttatttttccaggaattaaaaaacatctatcatataagtattgcaaataaaacttaaaaagcaaaaaaaaaaaaaaaaaaaaaa

SEQ ID NO: 4489 - DNA, 2551 bp, Homo Sapiens
  NM_017851
caacctccccgccgacccgcggtccaggcctcggtctctctcttcggcggcgagccgcggcccagaccccggcagaggacacttgtcggcacgttctcacccctgtcatctcagccccctgcctagctccaccccaggcttgggaacccggcccctgacggcccattgtccgcgggcccagcccccgcgctgaacgcacgctcgcccttgcccctaaccagcgcgtctaccccggcaacgcgcagtgacctgggatgcagccctcaggctgggcggccgccagggaggcggcgggccgcgacatgctggccgccgacctccggtgcagcctcttcgcctcggccctgcagagctacaagcgcgactcggtgctgcggcccttccccgcgtcctacgcccgcggcgactgtaaggactttgaagccctgcttgcagatgccagcaagttacctaacctgaaagaacttctccagtcctccggagacaaccacaaacgggcctgggacctggtgagctggattttatcctcaaaggtcctgacaatccacagtgcagggaaggcagagtttgaaaagatccaaaagctgactggggctcctcacacgcctgttcctgcaccggacttcctgtttgaaattgagtactttgacccagccaacgccaaattttatgagaccaaaggagaacgagacctaatctatgcatttcatggtagccgcctagaaaacttccattccattatccacaatggcctgcactgccatctgaacaagacatccttgttcggagaggggacctacctcaccagtgacttgagcctggccctcatatacagcccccatggccatgggtggcagcacagcctcctcggccccatccttagctgtgtggccgtgtgtgaggtcattgaccatccggacgtcaagtgccaaaccaagaagaaggattccaaggagatagatcgcagacgagcgagaatcaaacatagtgaagggggagacatccctcccaagtacttcgtggtcaccaataaccagctgctgcgagtgaagtacctcctggtgtattcacagaagccacccaagagcagggcttcgagccagctctcctggttttccagccattggtttaccgtcatgatatccctgtatctgctgctgctgctcatagtgagtgtcatcaactcctctgctttccaacacttttggaatcgtgcgaaaagataatctttctgggcctggtgtgggggctacctcaactatgtgccttatggtaacttgttctgtacctcctatgcctcatgtccagccaggttgagcctaggggccagttgggggaccacaggacaattttcatatggcctaaatgtatccattgcctttgatgatgttcccagccatactccagtcaacggggactactagtccctcactcttaggttttaggggagtccttccatctgctccttcttaaactgtcctagggagttggcttttcagccagggccaaaggaaaaagccctgctgcatttaaaaacaaagtgtccaagctgtcagtggtgtgtttacaatctctcctggcagaggttggccctttctctaatgccttctggaaggcggaaaatgtgggaactataaatcactaggcggttgccttgttttgacttgagacacccaagaggaacagtcatgtttctcataaaaatcagtgggatcatttttgaattccatcagcctttgtatgtgagtgcaaaacattttaacagttttctcaaatcaacaaacagccttctcctatagctgtacttgcccccctccccaaaaaaccatggatgagaaagaaaggagtcaggggcctgataaaaaatacagacttaatgagcaactcaagatgagaaaactgctctttttccaaaaattaccaactgctgattacagctgaaatggaaccaaatgtttgttttctgatttttttttaatagctgtttaacaaattagtctttgctgagtaaaaggggaaatttctaaacctagtgcactgtttggccagtgtccacagcctcttttctggctgtgttttagagaaagggatttgagctataggctcgcctcctgttctcattctcacaaagctgccttgactgtggcctgcaaccacgagtgccatgctttcaggtcttctgtggcctactggccttcaagacagaggcctgccccagtgtgccacagatccatgtggatggagcctccttcagaggggtcacaggtctttgagactcagcctgggctttaatgtgtaggaaaagccttctggccacccagagagccggagccctgcttgctgtattctctgctcccttcttcctgctgggttttagccataatagggcccggtacgatttgggagtgacatttctgtaaagaagaggaaaaatcatttttctataatttgtaaagttgtgaaagagccactaccacagtttttacattgattattggaacatttcagaataaataaagatattttcttaatgaaaaaaaaaaaaaaaaaa

SEQ ID NO: 4490 - DNA, 696 bp, Homo Sapiens
  NM_017854
agtgcgaatcatgggaggcggctggtggtgggctcgggccgctcgccttgcccgtcttcgcttccggaggtcgctactgccgcctcagcggccccggagcgggggcgcccgggggtccttcgcccccggccacggtccccgcgccggggcttcgccgcccccagtgtccgagctggatcgtgcggacgcctggctcctccgaaaagcgcacgagacagccttcctctcctggttccgcaatggcctcctggcatcgggcatcggggtcatctccttcatgcagagtgacatgggtcgggaagcagcatatggcttcttcctgctgggcggcctgtgcgtggtgtggggcagcgcctcgtacgccgtgggcctggcggcgctgcgaggacccatgcagctgacgctggggggcgcggccgtgggcgcgggcgccgtgctggccgccagcctgctctgggcgtgcgccgtgggcctctacatggggcagctggagctggacgtggagctggtgcccgaggacgacgggacggcctccgcggaaggccctgatgaggcgggtcggccgccacccgagtgagcgacacggccgtggggcctggcaggcgctggacagcgcccgaggactgggacattaaacctgacctcccctcctccaaaaaaaaaaaaaaaaaaaaaaaaaaaaaaaaaaaaaaaaaa

SEQ ID NO: 4491 - DNA, 2894 bp, Homo Sapiens
  NM_017857
gagaagctccgcgggcccggctgggcgagtgtctggccctttaagggccgcccccgaggaggtgccaggcccgggtggcgccgtccgtccttcctggtcctgcgggtccaggactgtccgcggggttgagggaaggggccgtgcccggtgccagcccaggtgctcgcggcctggctccatggccctggtcacagtgagccgttcgcccccgggcagcggcgcctccacgcccgtggggccctgggaccaggcggtccagcgaaggagtcgactccagcgaaggcagagctttgcggtgctccgtggggctgtcctgggactgcaggatggaggggacaatgatgatgcagcagaggccagttctgagccaacagagaaggccccgagtgaggaggagctccacggggaccagacagacttcgggcaaggatcccagagtccccagaagcaggaggagcagaggcagcacctgcacctcatggtacagctgctgaggccgcaggatgacatccgcctggcagcccagctggaggcaccccggcctccccggctccgctacctgctggtagtttctacacgagaaggagaaggtctgagccaggatgagacggtcctcctgggcgtggatttccctgacagcagctcccccagctgcaccctgggcctggtcttgcccctctggagtgacacccaggtgtacttagatggagacgggggcttcagcgtgacgtctggtgggcaaagccggatcttcaagcccatctccatccagaccatgtgggccacactccaggtattgcaccaagcatgtgaggcagctctaggcagcggccttgtaccgggtggcagtgccctcacctgggccagccactaccaggagagactgaactccgaacagagctgcctcaatgagtggacggctatggccgacctggagtctctgcggcctcccagcgccgagcctggcgggtcctcagaacaggagcagatggagcaggcgatccgtgctgagctgtggaaagtgttggatgtcagtgacctggagagtgtcacttccaaagagatccgccaggctctggagctgcgcctggggctccccctccagcagtaccgtgacttcatcgacaaccagatgctgctgctggtggcacagcgggaccgagcctcccgcatcttcccccacctctacctgggctcagagtggaacgcagcaaacctggaggagctgcagaggaacagggtcacccacatcttgaacatggcccgggagattgacaacttctaccctgagcgcttcacctaccacaatgtgcgcctctgggatgaggagtcggcccagctgctgccgcactggaaggagacgcaccgcttcattgaggctgcaagagcacagggcacccacgtgctggtccactgcaagatgggcgtcagccgctcagcggccacagtgctggcctatgccatgaagcagtacgaatgcagcctggagcaggccctgcgccacgtgcaggagctccggcccatcgcccgccccaaccctggcttcctgcgccagctgcagatctaccagggcatcctgacggccagccgccagagccatgtctgggagcagaaagtgggtggggtctccccagaggagcacccagcccctgaagtctctacaccattcccacctcttccgccagaacctgagggtggtggggaggagaaggttgtaggcatggaagagagccaggcagccccgaaagaagagcctgggccacggccacgtataaacctccgaggggtcatgaggtccatcagtcttctggagccctccttggagctggagagcacctcagagaccagtgacatgccagaggtcttctcttcccacgagtcttcacatgaagagcctctgcagcccttcccacagcttgcaaggaccaagggaggccagcaggtggacagggggcctcagcctgccctgaagtcccgccagtcagtggttaccctccagggcagtgccgtggtggccaaccggacccaggccttccaggagcaggagcaggggcaggggcaggggcagggagagccctgcatttcctctacgcccaggttccggaaggtggtgagacaggccagcgtgcatgacagtggagaggagggcgaggcctgagccctcacacatgcccacgctcccctgacactgaagaggatccacaactccttggagaaacaccctcacgtctgttgccgcacacattcctctcagctccgccccatacccgtcactacagcctcacctcccacccctgtcactacggcctcacctcccacccctgtcactacagcctcacctcctacagccttaagtcccaggcccatgtctgcctgtccaagggctcaagactttctaactgggatgtggtagagggactgaaggtacctttgggggcaacagcaccctagtttcattctcaactctagccctgcacactcacctgtggcacggaatgaaaacagagcttcccgtgcaaaaagggtcacgcctcccacccccgccccctccctgcacctcctgtcctctcccagttcattcctggaaccagccaggccaggcaaccagtggcccccaaaggcaggcaggatcctcaggccccagccgcgggaggctggaagggctggcagatcgcttccctcatccacctccaccggtccaggtctttgctgctgtccccagacctcctgtgacaccacgccagatcacagggcaccaggccagagatagtcttctttttgtcctttctggcctctggctagtcagtttttcatagccttacagtatctggctttgtactgagaaataaaacacattttcatatttggttattttcaaaaaaaaaaaaaaaaaa

SEQ ID NO: 4492 - DNA, 1885 bp, Homo Sapiens
  NM_017859
aagagagggacccgccagctcccggcggcccatgcgcgccgcccggccaggcccgcaaagaggcctccgagcgccatggctgcgcccccggcccgcgcggacgctgatccttcgcccacgtcgccacctacggcccgagacacaccaggccggcaggctgagaaaagcgagaccgcgtgcgaggaccgcagcaatgcagagtccctggacaggctcctgccacctgtgggcactgggcgctctccccggaagcggaccaccagccagtgcaagtcagagcctcccctgctgcgtacaagcaagcgtaccatctacaccgccgggcggccgccctggtacaatgaacacggcacgcaatccaaagaggccttcgccatcggcttgggaggcggcagtgcctctgggaagaccactgtggccagaatgatcatcgaggccctggatgtgccctgggtggtcttgctgtccatggactccttctacaaggtgctgactgagcagcagcaggaacaggccgcacacaacaacttcaacttcgaccacccagatgcctttgacttcgacctcatcatttccaccctcaagaagctgaagcaggggaagagtgtcaaggtgcccatttatgacttcaccacgcacagccggaagaaggactggaaaacactgtatggtgcaaacgtcatcatctttgagggcatcatggcctttgctgacaagacactgttggagctcctggacatgaagatctttgtggacacagactccgacatccgcctggtacggcggctgcgccgggacatcagtgagcgcggccgggacatcgagggtgtcatcaagcagtacaacaagtttgtcaagccctccttcgaccagtacatccagcccaccatgcgcctggcagacatcgtggtccccagagggagcggcaacacggtggccatcgacctgattgtgcagcacgtgcacagccagctggaggagcgtgaactcagcgtcagggctgcgctggcctcggcacaccagtgccacccgctgccccggacgctgagcgtcctgaagagcacgccgcaggtacggggcatgcacaccatcatcagggacaaggagaccagtcgcgacgagttcatcttctactccaagagactgatgcggctgctcatcgagcacgcgctctccttcctgccctttcaggactgcgtcgtacagaccccgcaggggcaggactatgcgggcaagtgctatgcggggaagcagatcaccggtgtgtccattctgcgcgccggtgaaaccatggagcccgcgctgcgcgctgtgtgcaaagacgtgcgcatcggcaccatcctcatccagaccaaccagcttaccggggagcccgagctccactacctgaggctgcccaaggacatcagcgatgaccacgtgatcctcatggactgcaccgtgtccacgggcgcggcggccatgatggcagtgcgcgtgctcctggaccacgacgtgcctgaggacaagatctttttgctgtcgctgctcatggcagagatgggcgtgcactcagtggcctatgcatttccgcgagtgagaatcatcaccacggcggtggacaagcgggtcaatgaccttttccgcatcatcccaggcattgggaactttggcgaccgctactttgggacagacgcggtccccgatggcagtgacgaggaggaagtggcctacacgggttagctgcccagtgagccatcccgtccccaccaccctcctcctgcctcctgacccaggactgctgaatacaaagatgttaatttttaaaatgttactagtataatttattctatgcattttataaaataaataaagctttagaaaaatgaaaaaaaaaaaaaaaaaa

SEQ ID NO: 4493 - DNA, 2096 bp, Homo Sapiens
  NM_017866
gcacgcgcaggcagcccagctgccagtcaggcgtcccgggctgggcatgcgccacttgtgcggcagtcgggtgggaagccgtgtctcgcagtcgtggactcgtgcagctggggcgtccgcagccgctcgtcacccgcgtgatgctgtttctggcgttgggcagcccgtgggcggtcgaactgcctctctgcggaaggaggactgcattgtgtgcggccgccgcgctccgaggtccccgggcctctgtctcccgggcgtcctccagcagcgggccttcggggccggtagccggctggagtacggggccttcgggagccgcgcgccttctccggcgtccgggtcgagcgcagatccctgtttattgggaaggatatgttcgattcttaaatacgccatctgacaaatcagaagatggaaggctaatttatactggcaatatggcccgagcagtgtttggtgtgaaatgtttctcttattctacgagtctgattggccttacatttctgccatacatttttacacaaaataatgctatttctgaaagtgtgcctctgcctattcaaatcatattctatggcatcatgggaagctttacggtgatcaccccagtgctgcttcactttattacaaaaggctatgtcattcgattgtaccatgaggccacaacagacacttataaagccattacctacaatgctatgcttgcagaaacgagtacagtgtttcaccagaatgatgtgaagattccagatgctaaacatgtatttaccacattttatgctaaaacaaaatcactgttagttaatccagtgctctttccaaaccgtgaagactatatccatctaatgggttatgacaaagaagaatttattttgtatatggaagaaaccagtgaagagaaacggcataaagatgacaaatgagcctatttgttagtgttcgtgctcaaatgtgatttacgttttaatgtataataataaaattgccttttgcattccgttagtgactgattgttaaaaataatttgaaattatcaaagcttttaatttccagagaatgatgtttgtttataataaaacaagctatgtttgaaaaccaaaatgtagtatctaccattcgtgttttagaaaggtatgtgaataaatatgttcatgctagtataagagttctgtgttactgtggttgactctaaactggggatctgatgtcagtagcaaatgggagagttgctttattctttgtgtatggatttttctaagtgtataaatattttccgacattaaaagacattttctctttgaggaagacacagtcataggtggtgcggagctgtggtccacctgctcctgctcctgactcactgctctttgctgttgcctgaggaccaagtctgtcaggaagctggctaggaagccttgcagcagccatggcttttaaacataccagaaaaacacccgtggagtcagaggtggcaattcaccgaattcatatcactctaacgagttgcaacgtaaaatccctggataaggtgtgtgctgacttgatctgaggagcaaaggaaaagaatcagtgaaaggaccagtttgaatgcctaccaagactttgagaatcactacaagaaaaacttacggtgaaggttctaaggcatgggatcgtttccagatgagaatccacaagcgactcattgacttgcgcagtcctcagatagttaagcagattacttccatcagtattgagccaggagttgagatggaagtcaccattgcaaatgcttaagtcaactgttttcataaattgattaccagttgttaaaaaattttcaaaaaaccgcaaaatttcaagaaattcacaaattatgggagcagttttaagtcttctttggttcagaacacaggtttttgcctaacccctggcatgattgcccataagaacatacatgtacagttgaactggtggttagctatacgggaaatggtaagtagtgttgtcttcagtatcttaatttgtttctgcaactgtgcactcctcccttggtggcaccctatgggtgtaggaaaaccactgttattaaacaggtgaaaaataaaaaaaaaaaa

SEQ ID NO: 4494 - DNA, 1233 bp, Homo Sapiens
  NM_017867
aagcggttggcggcgctcggaagcggccgcggatcggggaattctgctggcgctgcagctgcagaatggtcggcggtggcgggaagcgcaggcccggcggagaggggccgcagtgtgaaaaaacaactgatgtgaagaaaagtaaattctgtgaagctgatgtctccagtgaccttcgaaaagaagtagaaaatcattataagctttctttacctgaagatttctatcacttctggaagttctgtgaagaacttgatcctgaaaagccatctgattcactttctgcaagccttggacttcaattagttggtccttatgatatccttgctggaaaacataaaacgaagaaaaaatcaacaggcctgaattttaaccttcactggaggttttactatgatcctcctgagttccagaccattattattggagataataaaactcagtaccacatggggtatttcagggattctcctgatgaatttcctgtatatgttggtataaatgaagcaaagaaaaattgtataattgttccaaatggagataatgtatttgctgcagtcaaattatttttgacgaaaaaacttagagaaataacggataaaaagaaaatcaatctcttgaaaaacatagatgaaaaactcacagaagcagccagagaattggggtactcgcttgaacagagaaccgtgaagatgaaacagagagataagaaagttgtgacaaagacctttcatggtgcaggcttggttgttccagtagataaaaatgatgttgggtaccgagagctccctgaaacagatgctgacctcaagagaatttgcaagacaatagttgaggctgcaagtgatgaggagagactaaaagcttttgctcccattcaggaaatgatgacttttgtgcagtttgctaatgatgaatgtgattatggcatggggcttgaattgggaatggatctcttttgctatggctcacattattttcataaagttgctggccagcttttacctcttgcatataatctgttgaagaggaatctgtttgcagaaattattgaggagcatctggcaaacagaagtcaagagaacatagaccaacttgctgcatgagtaaggtggctttgattggtgtacagtatttcaaaggactagtattaaacttgtgatttttgttttgtttttaaggaatacaaaaaataaacatttactaaaaacgtttaaaaaaaaaaaaaaaaaa

SEQ ID NO: 4495 - DNA, 2330 bp, Homo Sapiens
  NM_017868
cttggtcccgccccgggcccctggctcctggccccgccccagcccaggcaggtcactgcgccatttcctgtccaaagctgggcgaatcagggattccggttcacaatggatgctgataaagagaaagatttgcagaaatttcttaaaaatgtggatgaaatctccaatttaattcaggagatgaattctgatgacccagttgtgcaacagaaagctgtcctggagacagaaaagagactactgcttatggaggaagaccaggaggaggatgaatgcaggaccaccttgaacaagactatgatcagtcctccacaaactgctatgaagagtgcagaagaaataaactcagaggccttcttggcatctgtggagaaggatgcaaaggaacgagccaagagaagaagggaaaacaaagtcttggcggatgccctaaaagaaaaagggaatgaagcatttgctgaaggcaattatgaaacagctatcctgcgctacagtgagggtttggagaagctgaaggacatgaaagtgctgtacaccaaccgagcccaggcttatatgaaacttgaggactatgagaaggcactggtggattgtgagtgggctctcaagtgtgatgaaaaatgcacaaaagcatattttcacatgggaaaagccaacctggccctgaagaactacagtgtgtctagagagtgttataagaagatcttagaaataaaccccaagctgcaaacccaggtgaaaggttacctgaatcaagtagatcttcaggaaaaagcagaccttcaagaaaaggaagcccacgaactgctggattcaggaaagaacacagccgtgaccaccaagaacctcctggagaccctttccaagcctgaccagatccccttgttctatgctggggggattgagatcctgactgaaatgataaatgagtgcacagaacaaactttattcagaatgcacaatggatttagtatcatcagtgacaacgaggtcataagaaggtgtttttccacagcaggaaatgatgcagttgaagaaatggtctgtgtgtctgttctcaagctctggcaagcagtgtgcagcaggaacgaggaaaaccagcgtgtgctagtgatacaccatgacagggccaggctgttggccgccctcttgtcctccaaggtcctggccatccggcagcagagctttgccctgctgctgcatctcgcccagactgagagcggacggagcctgatcatcaaccaccttgacctgaccagattattggaagcgctggtgtcatttcttgatttctcggataaggaggccaacactgctatgggactgttcacagacttggctctggaagaaagattccaagtctggttccaggccaaccttccaggtgttctccctgcactcacaggcgttctgaagacagatcccaaggtaagcagctcctcggctctgtgccagtgcattgccatcatgggaaacctcagtgctgagcccactacccgaagacacatggcggcctgtgaggaatttggggatggctgcttgagcctcctggccaggtgtgaggaggatgtggacctgttcagagaggttatctacacactcctgggactcatgatgaacctgtgtcttcaggctccctttgtctctgaggtttgggctgtggaggtgagcagaaggtgcctgtctttactaaacagccaggatggaggaatcctgacaagagctgctggtgttctgagccggaccctttcttcctctctgaaaattgttgaggaggccttgcgagcaggagtggtaaagaaaatgatgaaattcctgaagacaggaggtgagactgcatcacgttatgctataaagatactagctatctgcacgaatagttatcatgaagctcgggaagaagtaataagactggataaaaagttgagcgttatgatgaagctgctcagctcggaggatgaggttctggtgggcaacgctgccctctgccttggtaactgcatggaggtgcccaacgttgcgtcttccctgctaaagacggaccttttgcaggtcttgttaaagcttgcaggcagtgacacacagaagacggccgtgcaggtgaacgcaggcattgctctggggaagctgtgcacagctgagcccagatttgctgctcaactgagaaagcttcatggcctagaaattctcaactctacgatgaaatacatcagtgattcttgagagagacagggtttgtgtgcatttggggaacacacagatgcacaccgtgtgttgttcctatgctaataaagacctttgatgtatccacttcaaaaaaaaaaaaaaaa

SEQ ID NO: 4496 - DNA, 2230 bp, Homo Sapiens
  NM_017869
gcagagcggcggcttctctcgcgaggacggacgccattatcgcatctccccgacaaacaccacgagaattccgcagcccacacggtgaccaaaagccagccccactgtgagttgaactctttcgtgttgaccggccactctccgtgctctggatgatgtcggaacacgacctggccgatgtggttcagattgcagtggaagacctgagccctgaccacccagttgttttggagaatcatgtagtgacagatgaagacgaacctgctttgaaacgccagcgactagaaatcaattgccaggatccatctataaagtcattcctgtattccatcaaccagacaatctgcttgcggttggatagcattgaagccaaattgcaagccctggaggctacttgtaaatccttagaagaaaagctggatctggtcacgaacaagcagcacagccccatccaggtccccatggtggccggctcccctctcggggcaacccagacgtgcaacaaagtgcgatgcgctgtgcctgggcgtcggcagaacaccattgtggtgaaggtgccgggccaagaagacagccaccacgaggacggggagagcggctcggaggccagcgactctgtgtccagctgtgggcaggcgggcagtcagagcatcgggagcaacgtcacgctcatcaccctgaactcggaagaggactaccccaatggcacctggctgggcgacgagaacaaccccgagatgcgggtacgctgcgccatcatcccctccgacatgctgcacatcagcaccaactgccgcacggccgagaagatggcgctcacgctgctggactacctcttccaccgcgaggtgcaggctgtgtccaacctctcggggcagggcaagcacgggaagaagcagctggacccgctcaccatctacggcatccggtgtcaccttttctataaatttggcatcacagaatccgactggtaccgaatcaagcagagcatcgactccaagtgccgcacggcgtggcggcgcaagcagcggggccagagcctggcggtcaagagcttctcgcggagaacgcccaactcgtcctcctactgcccttcagagccgatgatgagcaccccacctcctgccagcgagctcccgcagccacagccgcagccgcaggccctgcactacgcgctggccaacgcacagcaggtgcagatccaccagatcggagaagacggacaggtgcaagtaatcccacagggacacctccacatcgcccaggtgccgcagggggagcaagtccagatcacgcaggacagcgagggcaacctccagatccatcacgtggggcaggacggtcaggtgctgcagggtgcacagctgatcgccgtggcctcctcggaccccgcggcggcgggcgtggatgggtcgccactccagggcagcgacatccaggttcagtacgtgcagctggcgccagtgagtgaccacacggccggggcacagacggccgaagccctgcagcccacgctacagccggagatgcagctcgagcacggggccatccagattcagtgagcggtgcccatggcaccaggagcccctcgccggctccgcctacggcccggcccccacgcgccctgctctcacggcctcggcacaggcagcggctgcacgtgttctgctgaagtgcgtctgaaggccgctgcctccgcggggaacagcatcctatcaactgaaagagcagccgccgccgcccccagccggagacccctttcgtttgagtcctgctgttggtgtcggagcacgaggggaggcacggtgcggagagcgtcgcatatgcgcgggaaatcaagaactatgatatttttctgtttaaacagctttttttaatttgctatggtgtttataacaaaaaagaaaatttgaaaaaaaaaatcccaggggagtagcaggagccctttgctgtgtgctctgtccagtgtcatgagacgggagccctttgctgtgtgctctgtccagtgtcatgagacgggagccctttgctgtgtgctctgtccagtgtcatgagacgggagccctttgctgtgtgctctgtccagtgtcatgaggcaggtgtttgcaaagccagctctcggttccgatggggtattgctgacctacttttctaggggaaatgctcttaaacactgtaattatgcatttctaatgaaataaaatgtatttatgaccacaaaaaaaaaaaa

SEQ ID NO: 4497 - DNA, 2147 bp, Homo Sapiens
  NM_017871
gcctgcgcagtgcatcaccgcaggcgggcctcgcgggtccgggagcgcggcggagacgatgcctgagatcagagtcacgcccttgggggccggccaggacgtgggccgaagctgcatcctggtctccattgcgggcaagaatgtcatgctggactgtggaatgcacatgggcttcaatgacgaccgacgcttccctgacttctcctacatcacccagaacggccgcctaacagacttcctggactgtgtgatcattagccacttccacctggaccactgcggggcactcccctacttcagcgagatggtgggctacgacgggcccatctacatgactcaccccacccaggccatctgccccatcttgctggaggactaccgcaagatcgccgtagacaagaagggcgaggccaacttcttcacctcccagatgatcaaagactgcatgaagaaggtggtggctgtccacctccaccagacggtccaggtagatgatgagctggagatcaaggcctactatgcaggccacgtgctgggggcagccatgttccagattaaagtgggctcagagtctgtggtctacacgggtgattataacatgaccccagaccgacacttaggagctgcctggattgacaagtgccgccccaacctgctcatcacagagtccacgtacgccacgaccatccgtgactccaagcgctgccgggagcgagacttcctgaagaaagtccacgagaccgtggagcgtggtgggaaggtgctgatacctgtgttcgcgctgggccgcgcccaggagctctgcatcctcctggagaccttctgggagcgcatgaacctgaaggtgcccatctacttctccacggggctgaccgagaaggccaaccactactacaagctgttcatcccctggaccaaccagaagatccgcaagactttcgtgcagaggaacatgtttgagttcaagcacatcaaggccttcgaccgggcttttgctgacaacccaggaccgatggttgtgtttgccacgccaggaatgctgcacgctgggcagtccctgcagatcttccggaaatgggccggaaacgaaaagaacatggtcatcatgcccggctactgcgtgcagggcaccgtcggccacaagatcctcagcgggcagcggaagctcgagatggaggggcggcaggtgctggaggtcaagatgcaggtggagtacatgtcattcagcgcacacgcggacgccaagggcatcatgcagctggtgggccaggcagagccggagagcgtgctgctggtgcatggcgaggccaagaagatggagttcctgaagcagaagatcgagcaggagctccgggtcaactgctacatgccggccaatggcgagacggtgacgctgcccacaagccccagcatccccgtaggcatctcgctggggctgctgaagcgggagatggcgcaggggctgctccctgaggccaagaagcctcggctcctgcacggcaccctgatcatgaaggacagcaacttccggctggtgtcctcagagcaagccctcaaagagctgggtctggctgagcaccagctgcgcttcacctgccgcgtgcacctgcatgacacacgcaaggagcaggagacggcattgcgcgtctacagccacctcaagagcgtcctgaaggaccactgtgtgcagcacctcccagacggctctgtgactgtggagtccgtcctcctccaggccgccgccccttctgaggacccaggcaccaaggtgctgctggtctcctggacctaccaggacgaggagctggggagcttcctcacatctctgctgaagaagggcctcccccaggcccccagctgaggccggcaactcacccagccgccacctctgccctctcccagctggacagaccctgggcctgcacttcaggactgtgggtgccctgggtgaacagaccctgcaggtcccatccctggggacagaggccttgtgtcacctgcctgcccaggcagctgtttgcagctgaagaaacaaactggtctccaggctgtcttgcctttattcctggttagggcaggtggtcctagacagcagtttccagtaaaagctgaacaaaagactacttggtactctcaaaaaaaaaaaa

SEQ ID NO: 4498 - DNA, 1320 bp, Homo Sapiens
  NM_017872
tttgcctgggaggttaagaactacagggagaggcgagagagactatgactgccctacggctagagtagccgcgaagagaacacttccggggcggggctatctggccctttcctttccgcgtgtagaatgtggggcgcctgtaaagttaaggttcacgattccttggccaccatttccatcactctgagacggtacctgagattgggggcgaccatggcaaaaagcaagttcgagtacgtgagggacttcgaggctgacgacacctgcctggcacactgctgggtggtagtgcggctggacggccggaatttccatcggtttgctgagaagcacaactttgcaaaacccaatgacagccgtgctctccagctgatgaccaaatgtgcgcagactgtgatggaagaactagaggatattgtgatcgcgtatggacagagtgatgagtacagctttgtgttcaagcggaaaaccaattggtttaaaagaagagccagtaagttcatgactcacgtggcctcccagtttgcctccagctatgtgttttattggcgggattactttgaggaccagccccttctgtatcccccaggctttgacggaagagtcgtggtgtatcccagcaaccagactttaaaggactacctcagctggcgacaagcagattgtcacatcaataatctttataatacagttttctgggcacttatacaacaatctggactaacaccagtacaagcccaagggagattacagggaactcttgcagcagacaagaatgagattttgttttctgaattcaacatcaactataataatgagctgccgatgtataggaaagggactgtgttgatatggcagaaggtggatgaagtgatgacaaaagaaattaagctgccaacagaaatggaaggaaaaaagatggcagtgacccggaccaggacaaagccagtgcccttgcactgcgatatcatcggggatgctttctggaaggaacatccagagattctagatgaagacagctgacccttttgcgcttcagttctggtgtgcttaaccatgcaagccctcccacctcccagggctccttgccttaggtggctgtagcatccctaccacccaggacactggtgcgaatgacacaactcaagttgggaggggaacagggaaggaagggatggatgggggtggtgtatcttactctgtttaagcagaacaccttgtttgcggtgttggaacatggttcctttggcagaagtgctttttttttaatcgcagtactatttttataaagcaagaactattccaaaaaaaaaaaaaaaa

SEQ ID NO: 4499 - DNA, 2523 bp, Homo Sapiens
  NM_017879
tggttctctacctcggcccacgccgcctgagttagaaacgctgcctccggcacagagcgggggtcgccccgctgcgcatcagccggtgggtcgctggcgctggtggcagccgtgcctgggttcccgccccgggtcgcccgccgctcccggccccgctccgctcacaatccgatggcggcggccgtgcttagggattcgacttcggttcccgtgactgcagaagctaaacttatgggctttacacagggctgtgtgacctttgaggacgtggccatttacttctcccaggaagaatgggggctccttgatgaggctcagaggctcctgtaccgcgatgtgatgctggagaactttgcacttataactgcgctggtttgttggcatgggatggaggatgaagagacacctgagcaaagtgtttctgtagaaggagtacctcaggtcaggactccagaggccagtccatccacccagaagattcaatcctgtgacatgtgtgtcccattcctgaccgacattttgcacctgaccgatttgcctgggcaggaactatacttgactggggcatgtgcggtctttcaccaggaccagaagcatcatagtgcagagaaacccttggaaagtgacatggacaaggcctcatttgtgcagtgctgcctgttccatgagtcaggaatgcctttcaccagcagtgaggttgggaaggacttcctagccccattgggcattcttcagccgcaagctattgctaactatgagaagccaaacaaaatcagcaaatgtgaggaggcctttcatgttggaataagtcattacaagtggagtcaatgcaggagagagtccagccacaaacacactttttttcaccctagagtctgcactggaaaaaggctttatgaatctagcaaatgtgggaaagcctgctgctgtgagtgctcccttgttcagctgcaaagagtccaccctggagaaaggccttatgagtgcagtgaatgtgggaaatcttttagccaaacctctcatctgaatgatcatcggagaatccacactggagaaaggccttatgtgtgtggtcagtgtgggaaatcatttagccaaagagccaccctcattaaacatcacagagttcacactggagaaaggccttacgagtgtggtgaatgtgggaaatcttttagccaaagttccaaccttattgaacattgcagaattcacactggagaaaggccttatgagtgtgatgaatgtggaaaagcctttgggtccaaatccactcttgttcgacaccagagaactcacacaggagaaaagccatatgagtgtggtgaatgtgggaaattattcagacaaagcttcagccttgttgtacaccagagaattcacactacagcaaggccttatgagtgtggccagtgtgggaaatcatttagcctaaagtgtggcctcattcagcaccagttaattcacagtggagctaggccctttgagtgtgatgagtgcggaaaatcctttagccaaagaaccaccctcaataaacaccacaaagttcacactgcagaaaggccttatgtatgtggggaatgtgggaaagcttttatgttcaaatctaaacttgttaggcaccagagaactcacactggagaaaggccttttgagtgcagtgaatgtgggaaattttttagacaaagctataccctcgttgaacaccagaaaattcacactggattaaggccttacgactgtggacagtgcgggaaatcctttatccaaaagtctagcctcattcaacaccaagtggttcacacaggagaaaggccatatgagtgtggcaaatgtgggaagtcctttacacaacactctggcctcattctccaccgaaaatctcacactgtggagaggcctcgtgacagcagcaaatgtggaaaaccctacagcccaagatctaacattgtttaactcttgaaactccaaacctgagaaaagccttagacctgcagggaatgtgccatgtctttcttcagtgttatggctatagagagcctttgtgaaggagccgtctgcctaaagttaaacctcatacttctagacctcccgatgggtcagactcccattagttccaggcatatgtgtcttgcaggagctcctttgcatgttctaaactgctggaggcctttgccagagttaaatcattagtcacccttgcatactaaggcgaggcagatacacctgtgttctcccaacccttggaggaaattccttgagcagtctgagcctttaaggggaattccttcccttttctgactgattacagcatacatctgaccagttttggccagaagggcccagcctgggttctgctggaagctgatgtggaaggcttcccttcatggaaattcttgttttcacacaacacttggtagtttttccagcctccaagtcaccacctagtaactggctgcctcacattgctctggtttgtgtggtaataaaggccttatttttaaatctaaaaaaaaaaaaaaa

SEQ ID NO: 4500 - DNA, 2540 bp, Homo Sapiens
  NM_017880
agtttggccccgtttgtaaaaggccgcggcaggcgaagagagaagagactatcaagatctccacttagggaagtgggaatcttatttgcggaacattgggcagaagctttgccattggctggtggagaaggaggaggcagaatgtctgcattgttacaccatacagctcaaacttcagaagattttgggttaagcagttatcattagtctgcaaatgatcgtgttttcacctgatcattagaaactaatgaaacaccttttaagtcttatgaattcaggttacactgttttccagatgccttggcagctggtacagggcctctgaaaaatggaaccaaattctctgaggactaaagtcccagctttcttatctgatttggggaaggccacattgaggggaatcagaaagtgtccccgatgtggcacatacaatggaacccggggactgagctgtaagaacaagacatgtggaaccatattccgctacggtgcacgcaagcagcctagtgttgaagctgtcaaaatcattacaggctctgatcttcaggtctactcagtgcggcaaagagaccggggccctgattaccgatgctttgtggagctcggggtttcagagacaacaatccagacagtggatgggacgatcatcactcagctgagctctggacggtgttatgtcccctcatgcctgaaagctgccactcaaggcgttgtggaaaaccagtgccagcacatcaagctggcggtgaactgccaggcagaggccacccctctgaccctgaagagctcggtcctgaatgcaatgcaggcctccccggaaaccaaacagaccatctggcagttggccacggaacccacaggtcctctggtgcagagaattactaaaaacatcttggtggtgaaatgcaaggcaagccagaagcacagtttggggtatttgcatacatcttttgtgcagaaagtcagtggcaaaagcttgcctgagcgccgcttcttctgctcctgtcagactctgaaatcgcacaagtcaaatgcctccaaggatgagacagcccagagatgcattcatttctttgcttgcatctgtgcctttgccagtgatgagacactggctcaggaattctcagacttcctaaattttgattccagcggtcttaaagagattattgtaccccagttaggttgccattcagaatcaacagtatctgcttgtgagtctactgcctctaagtcaaagaagaggagaaaggatgaagtatctggtgcacagatgaacagttcactactgcctcaagatgcagtgagcagtaatctaaggaaaagtggcctgaaaaagcctgtggttgcttcctcgttaaaaaggcaggcctgtggtcagctgttagatgaggcacaagtgactttatccttccaagactggctggccagtgtcacagaacgcatccatcaaaccatgcactatcagtttgatggcaaaccagaaccattggtgttccacattcctcagtcattttttgatgccctgcaacaaagaatatctataggaagtgcaaaaaaacggctccccaactccaccacagcttttgttcggaaagatgccttgccactgggaaccttttccaagtatacttggcatatcactaatatcctgcaagttaaacaaatcttagataccccagagatgcccttggaaatcacccgtagctttatccagaaccgagatgggacttatgagctatttaaatgccctaaagtggaagtagaaagcatagcagaaacctacggtcgtatagaaaaacaaccagtgctgcgacccttggaactaaaaacttttctcaaagttggcaacacttccccagatcaaaaggagccaacacctttcatcatcgagtggatcccagatatccttccccaatctaagattggcgagctgcggatcaagtttgagtatggccaccaccggaatgggcatgtggcggagtaccaagaccagcggccccccttggaccagcccttggaactggcccctctgaccactattactttcccttaaagcaaaacaagataataatcttttgctgcttaatttgcacatccccaccccttgacaactttaaatgctagttaggcacttagatggccctgttccttggtaaactgctcttagctaagatgcaaattctcagtgctttcaagtggattctgttgaagaaaatctcttgtaaatagcctttttgatgctgctgtgtacagtcttcattatgcattgggcagtatttctggctagagttttaaaaggaacagaaagaaaaccagcttattttccttcttacggactcatctttagcgtttatttcaaccttttgctaattctctgagaaatctgcagcactcagccatacaccaacagtgttggaaagttaacaccctggttagggcagaatgttaaagaccatcttggcagagttccagccacgctctttattctgttctcaaataaagcagtgtcactagtttttcctaaaaaaaaaaaaaaaaaa

SEQ ID NO: 4501 - DNA, 2150 bp, Homo Sapiens
  NM_017883
ctttctgatagcaggcagccatcttgcctggagcctgagaaagggaggagagacagaaggaaccggcgacagtggtctcagggccgctccggggggcctcaagaaccggaggcagccccggaggtggtccccgatcccgggctatgctcttggatctgagaagggaaggcggagggcggcggggacaagatgggtggagaatgtcaagcaaggaatgctaggcgggggaggggcgttgctatggcgactggggaggggcggtgtctgttctgaatcgctgtgtgtcacccgggcgctgcccaggaagggcagggctggggtgatgaccatggtaacacccgggggggagttcgtgacatctccggcgcggagggactcgatgtctatggcaatggtcgcctggtggaagggacggaactagatcccttcgctcgggacgctcacattccaggcccttgtcctgcaggctgccgcgggcggacacgccagaggaggaggccggggaatggccgcggtgtggcagcaagtcttagcagtggacgcgaggtacaacgcgtaccgcacaccaacgtttccacagtttcggacgcagtatatccgccggcgcagccagctgctgcgggagaatgccaaggctgggcaccccccagcgctgcgtcggcagtacctgaggcttcgggggcagctgctgggccagcgctacgggcccctctccgagccaggcagtgctcgtgcctatagcaacagcatcgtccgcagtagccgcactactcttgaccgcatggaggactttgaggatgatcctcgggccctgggggcccgtgggcaccgtcgttctgtcagcagaggctcctaccagctgcaggcgcagatgaaccgtgccgtctatgaggacaggccccctggcagcgtggtgcccacgtcagcagcagaggcaagtcgggccatggccggggacacgtcactgagcgagaactatgcctttgcgggcatgtatcatgtttttgaccagcacgtggatgaggcagtcccaagggtgcgcttcgccaatgatgaccgacaccgcctggcctgctgctcactcgacggcagcatctccctgtgccagctggtgcctgccccacccacagtgcttcgcgtgctacggggccacacccgtggtgtctccgacttcgcctggtccctctccaatgacatcctcgtgtccacctcactggatgccaccatgcgcatctgggcctctgaggatggtcgctgcatccgagagatccctgaccccgatagcgctgaactgctctgctgcaccttccagcctgtcaacaacaacctcactgtggtggggaacgccaagcacaacgtgcatgtcatgaacatctccacaggcaagaaagtgaaggggggctccagcaagctgacaggccgtgtccttgctctgtcctttgatgcccctggccggctgctctgggcgggtgatgaccgtggcagtgtcttctctttcctctttgatatggccacagggaagctgaccaaagccaagcgtttggtggtgcatgaggggagccctgtgaccagcatctcagcccggtcctgggtcagccgcgaggcccgggatccctcactgctcatcaatgcttgcctcaacaagttgctgctctacagggtggtagacaacgaggggaccctgcagctgaagagaagcttccccatcgagcagagctcacatcctgtgcgcagcatcttctgtcccctcatgtccttccgccagggggcctgcgtggtgacgggcagtgaggacatgtgcgtgcacttctttgatgtggagcgggcggccaaggctgctgtcaacaagctgcagggccacagtgcacctgtgcttgatgtcagcttcaactgcgacgagagcctactggcctccagtgacgccagcggcatggtcatcgtctggaggcgggagcagaagtagggtcctgtcggccctgctgctgtcctccatcccacccctcttactccagcctcgtgttgtaaataaagtttcggtggtcatgctgagggccggctcccagctctgccggggacggacagggcagagggcagcgggcagctccaggaacacggtggaacggggaaaaaaaaaaaaaaaaaaaaaaaaa

SEQ ID NO: 4502 - DNA, 1047 bp, Homo Sapiens
  NM_017884
gtccagaggcggcggtatcacaggctctccgacatgtctatgctggctgaacgtcggcggaagcagaagtgggctgtggatcctcagaacactgcctggagtaatgacgattccaagtttggccagcggatgctagagaagatggggtggtctaaaggaaagggtttaggggctcaggagcaaggagccacagatcatattaaagttcaagtgaaaaataaccacctgggactcggagctaccatcaataatgaagacaactggattgcccatcaggatgattttaaccagcttctggccgaactgaacacttgccatgggcaggaaaccacagattcctcggacaagaaggaaaagaaatcttttagccttgaggaaaagtccaaaatctccaaaaaccgtgttcactatatgaaattcacaaaagggaaggatctgtcatctcggagcaaaacagatcttgactgcatttttgggaaaagacagagtaagaagactcccgagggcgatgccagtccctccactccagaggagaacgaaaccacgacaaccagcgccttcaccatccaggagtactttgccaagcggatggcagcactgaagaacaagccccaggttccagttccagggtctgacatttctgagacgcaggtggaacgtaaaagggggaagaaaagaaataaagaggccacaggtaaagatgtggaaagttacctccagcctaaggccaagaggcacacggagggaaagcccgagagggccgaggcccaggagcgagtggccaagaagaagagcgcgccagcagaagagcagctcagaggcccctgctgggaccagagttccaaggcctctgctcaggatgcaggggaccatgtgcagccgcctgagggccgggacttcaccctgaagcccaaaaagaggagagggaagaaaaagctgcaaaaaccagtagagatagcagaggacgctacactagaagaaacgctagtgaaaaagaagaagaagaaagattccaaatgaatccttcccagccggggccttccgacc

SEQ ID NO: 4503 - DNA, 1118 bp, Homo Sapiens
  NM_017887
aacggcaagggcggcagccagcaccgggcggagagggctaccatggggaaaatcgcgctgcaactcaaagccacgctggagaacatcaccaacctccggcccgtgggcgaggacttccggtggtacctgaagatgaaatgtggcaactgtggtgagatttcggacaagtggcagtacatccggctgatggacagtgtggcactgaaggggggccgtggcagtgcttccatggtccagaagtgcaagctgtgtgcaagagaaaattccatcgagattttaagcagcaccatcaagccttacaatgctgaagacaatgagaacttcaagacaatagtggagtttgagtgccggggccttgaaccagttgatttccagccgcaggctgggtttgctgctgaaggtgtggagtcagggacagccttcagtgacattaatctgcaggagaaggactggactgactatgatgaaaaggcccaggagtctgtgggaatctatgaggtcacccaccagtttgtgaagtgctgatccctcttccttcccagttgcccttaagaactgagaaaggacaaagtactctaagcagcagagcccacagaggctcgttcctttgacccttgtctcctggtggctatacgaaaccttcacaatttgcatgctggactttattacagcttcccaagccccatcaataaagcccctgttcacgctgcactggtgcatgaaggtgaagtaaggaggcagctactccctccacaaataagaattcgtgcagcagcagttcactccttaggaaaatgaagagtatttttaaggagatggtatctccccagtcaagggcaagtttacagagatgaaaccgcgatccccccatcactcaatgagccagaagccaatggtgacgtactgttacctgaacttactgaacttgctgttggaaagatctttgtgaggattaggaattaggttaaaagaaattaagaaccatcttcaagcaaaaattaaactttatttctgcttaaacaataaatacacctgagttagttttccaaacctttcctcctgattaaatgcccttaaaacttaaaaaaaaaaaaaaaaaaaaaaaaaaaaaaaaaaaa

SEQ ID NO: 4504 - DNA, 2122 bp, Homo Sapiens
  NM_017891
gaatccgggggaatgtagtccctccgtgtcagggacccgagacatgcgctggttcttctaggactacatttcccagggcgcttcgcgccccgccccggcgccccacccacggccgcgcgcgatggtaccaccaggcgagggcggctctcgcgcgggccgccgggagttgtagttttctttgggagctgcggggcctggcgccggggccggggcggaagaaagactacaagtcccagggggcgcggcgccaccgcctgagggcggggtgtacgaaagagaaacccggagggcgccggggactgggccggggtctgcagggctcagctgagcccatgagctcccagagctaacccctgaacacccaggcgggcaaagggctgatgtcggtagtccccatcctggaggggcaggctctgcgcatctgctcctggcatggcgctgcggcacctcgccctcctggctggccttctcgtgggagtcgccagcaagtccatggagaacacggcccagctgcccgagtgctgtgtggatgtggtgggcgtcaacgccagctgcccaggcgcaagtctgtgtggtccaggctgttacaggcgctggaacgcggacgggagcgccagctgcgtccgctgtgggaacggaaccctcccagcctacaacggctccgagtgtagaagctttgctggcccgggtgcgccattccccatgaacagaagctcagggacccccgggcggccacatcctggggctccgcgcgtggccgcctccctcttcctgggcacgttcttcattagctccggcctcatcctctccgtagctgggttcttctacctcaagcgctccagtaaactccccagggcctgctacagaagaaacaaagctccggccctgcagcctggcgaagccgctgcaatgatccccccgccacagtcctcagtacggaagccgcgctacgtcaggcgggagcggcccctggacagggccacggatcccgctgccttcccgggggaggcccgtatcagcaatgtctgacctggaggccgagaccacgccacgcacttggcggcagggacccggaggccgaccccttggcgggaaccagcacaaagtgttggcatcgcccggcgcccgggacagtcctgggcacagcctcggctctgagtccctccgcctcccagcgacggacgccaaagggtcccgggccgcctgaggctcctccccaccacagccatctcgtttatcggaccaggagcaggcatccatgagacctcagagcttcagatcgaggccttggggggtccgggcccccccaggaaacacggtgaggccccagcgcctgcagccaaagctggcacgatctatggggcaggtgccgctctgcctagaaaagccaggggctctgctgccgtgccctccagagcccacagcgggcaggactcctccagcaccaccacacccagtggcccgagacccctctgagaacagtgaggctggtcctcgtgccgttccagccggtgcccggccagtggggaggacacagcctaggaaccagctgcctgagaccagggtgcctctgggctgtcctcccgcgtggcggagaccccaagcacgcagccacccatttccggagctgcaggatagagcttcctcttgatctctgtttttaagcagaaattcattgtgcagaaaagtcctccagagctctgtggccccgctcggatccgctggacccccatgcctggctgatccctgcccacgtggggcaggcccacatctaacccccacaagtcactgcctcactgcacctgccaaggctgccctggcgctgagtcctggggtccctcccggagttcctgggagaaaggcgccgtcgtggccgcctcccgcacgccaggcccgggctccaccgtgggtctcagacgccctgcggcaccggcaccgtctgctttagcatgggacccccctctgaggggtggcctggccttcggggtccccacgctcctttgcgaagtccactgtgggtgccatcatggtctccgggacctgggccagcgggaacgtgggggcactgggtgtgctgatataaagtcggcattactcaagctgcaaaaaaaaaaaaaaaaaa

SEQ ID NO: 4505 - DNA, 2711 bp, Homo Sapiens
  NM_017895
atgcgcactcttaagaggtcgaacggggagggcggcaggggctctggaacggaagtgacgcatggtacttgcgcaaagacgacgaggaggctgcgaaaagttaagggccggaccgcaggctgtgctcgcttccggaagtggcttctgcgacaacatgcttgcggacctcggcttaatcggaaccataggcgaggatgacgaggtgccggtggagcccgagtctgactccggggacgaggaagaggaggggcccattgtgctgggcagacgacaaaaagctttggggaagaaccgcagtgctgatttcaaccctgatttcgttttcactgagaaggaggggacgtacgatggcagctgggccctggctgatgtcatgagccaactcaagaagaagagggcagccactacattagatgagaagattgagaaagttcgaaagaaaaggaaaacagaggataaagaagccaagtctgggaagttggaaaaggagaaagaagcaaaggaaggctctgaaccaaaggagcaggaagaccttcaagagaatgatgaggaaggctcagaagatgaagcctcggagactgactactcatcagctgatgagaacatcctcaccaaagcagatacactcaaagtaaaggatcggaagaagaagaagaagaaaggacaggaagcaggaggattttttgaagatgcatctcagtacgatgaaaacctctcgttccaggacatgaacctttcccgccctcttctgaaggccattacagccatgggcttcaagcagcccaccccgatccagaaggcgtgcatacctgtgggtctattggggaaggacatctgtgcctgtgcagccactgggacaggtaaaactgccgcctttgccctgcctgttttggagcgtctgatttataaaccccgccaggctccagtcacccgcgtgctggtgctagtgcccacccgagagctgggcatccaggtgcactctgtcaccagacagctggcccagttctgcaacatcaccacctgcctggctgtgggcggcttggatgtgaagtctcaggaagcagctcttcgggcagcgcctgacatcctcatcgccaccccaggccggctcatcgatcacctccacaactgcccttccttccacctgagcagcatcgaggtgctcatcctggacgaggctgacaggatgctggatgagtactttgaggagcagatgaaggagatcatccgaatgtgttcccaccaccgccagaccatgctcttctcggccaccatgacagacgaggtgaaagatctggcttctgtctccttgaagaatcctgtccggatatttgtgaacagcaacacagatgtggctcccttcctgcggcaggagttcatccggatccggcctaatcgtgaaggagaccgggaagccatcgtggcagctttgttgacgaggaccttcactgaccatgtgatgctgttcacgcaaaccaagaagcaggcccaccgcatgcacatcctcctggggctcatggggctgcaggtgggtgagctccatggcaacttgtcacagacgcagcggctggaggccctccggcgttttaaggatgaacagattgacatcctcgtggccactgatgtggcagcccgtggacttgacattgagggggtcaaaacggtaatcaacttcacaatgcctaataccatcaaacattatgtccaccgggtggggcgaacagcacgtgctggcagggctgggcgctcagtctctctggtgggagaagatgagcggaagatgctgaaggagattgtaaaagctgccaaggcccctgtgaaggccaggatacttccccaagatgtcatcctcaaattccgggacaagattgagaaaatggagaaagatgtgtatgcagttctgcagctagaggcggaggaaaaagagatgcagcagtcagaagcccagatcaatacagcaaagcggctcctggagaaggggaaggaggcagtggtccaagagcccgagaggagctggttccagaccaaagaagagaggaagaaggagaaaattgccaaagctctgcaggaatttgacttggccttaagaggaaagaagaaaaggaagaagtttatgaaggatgccaaaaaaaagggggagatgacagcagaggaaaggtctcagtttgaaatcctcaaggcgcagatgtttgctgaacggctagcgaagaggaatcgcagagccaagcgggcccgagcaatgcccgaggaggagccagtgagaggtcctgccaagaagcaaaagcaggggaagaaatctgtatttgatgaagaactcaccaacacaagcaagaaggccctgaaacagtatcgagctggcccttcctttgaagaaaggaaacagttgggcttgccccaccagagacgaggaggaaactttaaatctaaatccagatacaagaggaggaagtagctgtcgtggcctgaagaaattcatgggggcagcccttaaatcccttccctgtgggaagtcatcctggctggtctgtcttttctccatttgtttaaaaaaaaaacaaaaacaaaaaacaacactttggtgtggtggtatggtacgtagctattttcctaagcatgtctgtcaatctcccttcttgctgattagctttcatatgactatattaaatggaagtatttttgggaaaagagaaaccaaaaaaaaaaaaaaaaaa

SEQ ID NO: 4506 - DNA, 5379 bp, Homo Sapiens
  NM_017901
tggataggagagctggcgcagctgccctggtggcagtggctgaagtggcggcggcttcggcggctgcggcggctgcaacagcttcgggctcggggttttggcggcggcgccggcgggctaggctgcgcggtgcggaccccggcgcgcggtccgggttgctggggcggcgcgtaagatgcctctaatggaggagtttctgagcagcacccctggcccagtggctttgaaagggagctcaaaccagagactatttcaagccctggatatcatatcctgagggccacaggagaagagaacatggctgtgagtttggatgacgacgtgccgctcatcctgaccttggatgagggtggcagtgccccactggctccctccaacggcctgggccaagaagagctacctagcaaaaatggcggcagctatgccatccacgactcccaggcccccagtctcagctctgggggtgagagttccccctccagccccgcacacaactgggagatgaattaccaagaggcagcaatctacctccaggaaggcgagaacaacgacaagttcttcacccaccccaaggatgccaaggcgctggcggcctacctctttgcacacaatcacctcttctacctgatggagctggccacggccctgctgctgctgctgctctccctgtgcgaggcccccgccgtccccgcactccggcttggcatctatgtccacgccaccctggagctgtttgccctgatggtggtagtgtttgaactctgcatgaagttacgctggctgggcctccacaccttcatccggcacaagcggaccatggtcaagacctcggtgctggtggtgcagtttgtcgaggccatcgtggtgttggtacggcagatgtcccatgtgcgggtgacccgagcactgcgctgcattttcctggtggactgtcggtattgcggtggcgtccggcgcaacctgcggcagatcttccagtccctgccgcccttcatggacatcctcctgctgctgctgttcttcatgatcatctttgccatcctcggtttctacttgttctcccctaacccttcagacccctacttcagcaccctggagaacagcatcgtcagtctgtttgtccttctgaccacagccaatttcccagatgtgatgatgccctcctactcccggaacccctggtcctgcgtcttcttcatcgtgtacctctccatcgagctgtatttcatcatgaacctgcttctggctgtggtgttcgacaccttcaatgacattgagaaacgcaagttcaagtctttgctactgcacaagcgaaccgctatccagcatgcctaccgcctgctcatcagccagaggaggcctgccggcatctcctacaggcagtttgaaggcctcatgcgcttctacaagccccggatgagtgccagggagcgctatcttaccttcaaggccctgaatcagaacaacacacccctgctcagcctaaaggacttttacgatatctacgaagttgctgctttgaagtggaaggccaagaaaaacagagagcactggtttgatgagcttcccaggacggcgctcctcatcttcaaaggtattaatatccttgtgaagtccaaggccttccagtatttcatgtacttggtggtggcagtcaacggggtctggatcctcgtggagacatttatgctgaaaggtgggaacttcttctccaagcacgtgccctggagttacctcgtctttctaactatctatggggtggagctgttcctgaaggttgccggcctgggccctgtggagtacttgtcttccggatggaacttgtttgacttctccgtgacagtgttcgccttcctgggactgctggcgctggccctcaacatggagcccttctatttcatcgtggtcctgcgccccctccagctgctgaggttgtttaagttgaaggagcgctaccgcaacgtgctggacaccatgttcgagctgctgccccggatggccagcctgggcctcaccctgctcatcttttactactccttcgccatcgtgggcatggagttcttctgcgggatcgtcttccccaactgctgcaacacgagtacagtggcagatgcctaccgctggcgcaaccacaccgtgggcaacaggaccgtggtggaggaaggctactattatctcaataattttgacaacatcctcaacagctttgtgaccctgtttgagctcacagttgtcaacaactggtacatcatcatggaaggcgtcacctctcagacctcccactggagccgcctctacttcatgaccttttacattgtgaccatggtggtgatgacgatcattgtcgcctttatcctcgaggccttcgtcttccgaatgaactacagccgcaagaaccaggactcggaagttgatggtggcatcacccttgagaaggaaatctccaaagaagagctggttgccgtcctggagctctaccgggaggcacggggggcctcctcggatgtcaccaggctgctggagaccctctcccagatggagagataccagcaacattccatggtgtttctgggacggcgatcaaggaccaagagcgacctgagcctgaagatgtaccaggaggagatccaggagtggtatgaggagcatgccagggagcaagagcagcagcgacaactcagcagcagtgcagcccccgccgcccagcagcccccaggcagccgccagcgctcccagaccgttacctagcccagcgcccgaaagccgtctcttctatgcaataacacaatagtattactctactgcgatgtacggaactgcggtgtgtgtacacatactcacgtatatgcacatatttatatacaggaagaaaaaagacagacaagatggggcttggtttataaccaccttgccctgtcttccttaactccagaagccagtttggtgaggggtgggggtgcggccaccaggtctgagctcttcctactgtggaaggctccagaaggcccttcacaaggagacccctcacctggatccagtcgactgcggggcttgcccctcatgtgggctggcctccatcggccacgtccaaagctgtcactgctactgcttcaggctcacatccccccgacctgatggcgtgcccgccccctctccctgcggcccatgccacaggtttctgtgttttgctttagggacagaaccacttaggaaggaaagaactcccggtctccagggtggtatttcagtgtctgtgataatgtcacgcaacacctcttcggggaccagtgcccaggatctaatggaagcggaattggggcaactgggcccatgtggccagagctcagttagccagtgccgggcggccacagattacactgaccaatctcctcccttggctctgcaagcctcccacccagccttctctggcttaacccttgttggcgaaaactcttccacagtggcctccttggggacccagaacccggaggaaggggcatgaggcaggaagtggggccgatgtctgcaacccagaccacttcgtggaatgggctcttgaccaaatccctttttttgcgatttacccgttcaagcaaaacaacgttttggttaactaaggattgtgctaaagccgataccaggtccttcacacgtgtgcactaggaacaggagcgaacagcacagagagacgctccctgtgggacgcagcagccccgtggccccggcccagttcccagccaccctccctggctctgctcacaccagagatttccatagcaggagcggttggtgcagaagtaggttcagatgaacctcagttaacgtcgccacccctcctcccaccatggtaccctgtaggagccctgtatgacatctgagcgtggtggaggtaggagggttgccagctgcagtgaccctgccacagaggcagggtcagtgcagaggtcgctttggttccgcttccctgggccacagaacggaacacagcataggttctgcagcaggagccgcagtggcaggatggagggtgcgaagggcaaggagtgcactgctgggcattcctggccagccccggccctctggtgcctgcttcctgtgacttcagaaggcaggtggacagagcctccctctggccttgtcctcttcccagccacagaacgggcagggtggcacccgaccccaggggagcagtacctggtcccccaccccctcctcccaaccacctccaaggccaagctgggtcccatagccagcacggcatggttctccccttccccccttcccaggtcaggggagttggacaagtagcaggtgtttgtttttaaagcacagccctttgggaaagcaacacattattgagactcactgtgattcccccgggagtcagactggctttgtcctcttcctctctggagggccatgggccatcagcaggagctccacatcgagccccaggccagaaccccctccctttcacagagagggaactttattgcacaattgggtgccttttagcttttgtgtgttgaaatgggcgttttggaagcaagggtcaggggacagcttctaaaggtgtgagtctctgacctgagcatctgggcctcgcctgggcccttcttcctccccaggggtggaaacgtggaggggccagcagcaccccggggtctgcccaggggagtcaaggccccgaggtgggggggcctattccaggaggagtgggatctcggccctgtccagagcgagttaatgtgtccatctgcccaaccctgtcctgagaaaggacctggttttggccaggacctgacaaatacccaatggcagcagtgtcaacagacgggagtccagccagggtgggtgcccttgtcattgaggttagggacagctatccccaggttatgcctggccccacccagcagggagttggggtccccccacaggctgtgagctctgtgggccctgggatgtgatctagctcagatgccctctcatccttgatgtcatagttgagtgcacccaagtggcacccactggcggccaggggcacagcctggtggtggtggcaatagaactgtgcccctcctcagctcctcgcttcccctcccacagccccagccttactccaccatgcggacaatcattttgtacggatcacgggagcaatgctgtacggttttgtacactggtggtttgtttcctagaaaacccattgtgtctctggatttctagcacattactaaaagagcctctgctttgtaaaaaaaaaaaaaaaaaaaaaaaaaaaaaaaaaaaaaaaaaaaaaaaaaaaaaaaaaaaaaaaaaaaaaaaaaaaaaaaaaaaaaaaaaaaaaaaaaaaaaaaaaaaaaaaaaaaaaaaaaaaaa

SEQ ID NO: 4507 - DNA, 3102 bp, Homo Sapiens
  NM_017905
ttaaagggggcagtgactgcggctgggcgggagtccgggtcggcttggctgagcgggggcggtgctgggcagggcggcggccgctccctcccggactcccggcctcccggcctccctggtcccgcctgggaagggatgcaaggaagccctccggcgctgcgctccgaggcgggagacagcgtccccctccgcccctcgggtcctggcgcctcagagcccggcccaggccgcggaacggtgatgctcgggccggacgggcgggcgcggatccctgcgtcccgctgaaaatgtgtgtctgacatgcaagctcagtggggcagagacccgtggattgctgtgccctgccctccggacctggatcatgaaggtgttgggaagaagcttcttctgggtgctgtttcccgtccttccctgggcggtgcaggctgtggagcacgaggaggtggcgcagcgtgtgatcaaactgcaccgcgggcgaggggtggctgccatgcagagccggcagtgggtccgggacagctgcaggaagctctcagggcttctccgccagaagaatgcagttctgaacaaactgaaaactgcaattggagcagtggagaaagacgtgggcctgtcggatgaagagaaactgtttcaggtgcacacgtttgaaattttccagaaagagctgaatgaaagtgaaaattccgttttccaagctgtctacggactgcagagagccctgcagggggattacaaagatgtcgtgaacatgaaggagagcagccggcagcgcctggaggccctgagagaggctgcaataaaggaagaaacagaatatatggaacttctggcagcagaaaaacatcaagttgaagcccttaaaaatatgcaacatcaaaaccaaagtttatccatgcttgacgagattcttgaagatgtaagaaaggcagcggatcgtctggaggaagagatagaggaacatgcttttgacgacaataaatcagtcaagggggtcaattttgaggcagttctgagggtggaggaagaagaggccaattctaagcaaaatataacaaaacgagaagtggaggatgacttgggtcttagcatgctgattgactcccagaacaaccagtatattttgaccaagcccagagattcaaccatcccacgtgcagatcaccactttataaaggacattgttaccataggaatgctgtccttgccttgtggctggctatgtacagccataggattgcctacaatgtttggttatattatttgtggtgtacttctgggaccttcaggactaaatagtattaagtctattgtgcaagtggagacattaggagaatttggggtgttttttactctttttcttgttggcttagaattttctccagaaaagctaagaaaggtgtggaagatttccttacaagggccgtgttacatgacactgttaatgattgcatttggcttgctgtgggggcatctcttgcggatcaaacccacgcagagcgtcttcatttccacgtgtctgtccttgtcaagcacacccctcgtgtccaggttcctcatgggcagtgctcggggtgacaaagaaggcgacattgactacagcaccgtgctcctcggcatgctggtgacgcaggacgtgcagctcgggctcttcatggccgtcatgccgactctcatacaggcgggcgccagtgcatcttctagcattgtcgtggaagttctccgaatcctggttttgattggtcagattcttttttcactagcggcggtttttcttttatgtcttgttataaagaagtatctcattggaccctattatcggaagctgcacatggaaagcaaggggaacaaagaaatcctgatcttgggaatatctgcctttatcttcttaatgttaacggtcacggagctgctggacgtctccatggagctgggctgtttcctggctggagcgctcgtctcctctcagggccccgtggtcaccgaggagatcgccacctccatcgaacccatccgcgacttcctggccatcgttttcttcgcctccatagggctccacgtgttccccacgtttgtggcgtacgagctcacggtgctggtgttcctcaccttgtcagtggtggtgatgaagtttctcctggcggcgctggtcctgtctctcattctgccgaggagcagccagtacatcaagtggatcgtctctgcggggcttgcccaggtcagcgagttttcctttgtcctggggagccgggcgcgaagagcgggcgtcatctctcgggaggtgtacctccttatactgagtgtgaccacgctcagcctcttgctcgccccggtgctgtggagagctgcaatcacgaggtgtgtgcccagaccggagagacggtccagcctctgatggctcggagatgatggaccgtggaagggaagcgtctgtggggagtgagcgcttagatggccagcagctgctccttctgggaagctcgcaccttggcaacagaacagccctctagcagagcgtcagtgcagtcgtgttatcccggcttttacagaatattcttgtcctattttagaattttccggagtagtttatttgcagtctgttgattatgtgcagtagacccgggacactgcgttttaccgatcaccttgaatgtggtgcctggatgtgccttttttttttttccctgaaattattattaattttctattgtgagttcatcagttcatagtttttttagtaaagaagcaaaattaaaaggcttttaaaaatgtacaacttcagaattataatctgttagtcaaatatttgttattaaacatttctgtaatatgaagttgtaatcctggccgtgagcttggaagcttacttttgattcttaaagcctatgttttctaaaatgagacaaatacggatgtctatttgccttttattgtaacttttaaatgaaataatttcatgtcaatttctattagatatatcacttaaaatatttggttttaaatcacaagaatatgtattctttaataaagataatttatgatcatggtataattaattgaaatttattaaaatctgtttttattaaaaaaaaaaaaaaaaaa

SEQ ID NO: 4508 - DNA, 1511 bp, Homo Sapiens
  NM_017906
gggctggcggaagaggcacgtgcgctgctgaatggagctggtcgctggttgctacgagcaggtcctctttgggttcgctgtacacccggagcccgaggcttgcggcgaccacgagcaatggactcttgtggctgacttcactcaccatgctcacactgcctccttgtcagcagtagctgtaaatagtcgttttgtggtcactgggagcaaagatgaaacaattcacatttatgacatgaaaaagaagattgagcatggggctctagtgcatcacagtggtacaataacttgcctgaaattctatggcaacaggcatttaatcagtggagcggaagatggactcatctgtatctgggatgcaaagaaatgggaatgcctgaagtcaattaaagctcacaaaggacaggtgaccttcctttctattcacccatctggcaagttggccctgtcggttggtacagataaaactttaagaacgtggaatcttgtagaaggaagatcagcattcataaaaaatataaaacaaaatgctcacatagtagaatggtccccaagaggagagcagtatgtagttatcatacagaataaaatagacatctatcagcttgacactgcatccattagtggcaccatcacaaatgaaaagagaatttcctctgttaaatttctttcagagtctgtccttgcagtggctggagatgaagaagttataaggttttttgactgtgattcactagtgtgcctctgcgaatttaaagctcatgaaaacagggtaaaggacatgttcagttttgaaattccagagcatcatgttattgtttcagcatcgagtgatggtttcatcaaaatgtggaagcttaagcaggataagaaagttcccccatctttactctgtgaaataaacactaatgccaggctgacgtgtcttggagtgtggctagacaaagtggcagacatgaaagaaagccttcctccagctgcagagccttctcctgtaagtaaagaacagtccaaaattggcaaaaaggagcctggtgacacagtgcacaaagaagaaaagcggtcaaaacctaacacaaagaaacgcggtttaacaggtgacagtaagaaagcaacaaaagaaagtggcctgatatcaaccaagaagaggaaaatggtagaaatgttggaaaagaagaggaaaaagaagaaaataaaaacaatgcagtgaatcacagatgtctcctgaaagaactcttttagatgaaatcattctactcaaatgtaccttaattttttttttttccctgagtaaaagcaagaaatttcttcctttggaaaaaatatatatattaaaaaaccacttttagatggttttttttaaaaaaaaaaaaaaaactggtaaaattacttttggcagacagtgttttatgaattatgtatcatgttgatatataatatgttaatgtgtcatgtaatttttactttgtacaaagcaaataaagatctttctcaaaaaaaaaaaaaaaaaa

SEQ ID NO: 4509 - DNA, 1198 bp, Homo Sapiens
  NM_017907
ggggtattgactgaggcggccaagcggctccgggacagggggtacggggggtgggggcgggtggttgcctgcgggaggccgccgcgggtcatgtgaccggaagggctcctcacggacgccgtccctcctcggcgcggcctgagcgcccggcccgaccccggccatggggtgctgctacagcagcgagaacgaggactcggaccaggaccgagaggagcggaagctgctgctggaccctagcagcccccctaccaaagctctcaatggagccgagcccaactaccacagcctgccttccgctcgcactgatgagcaggccctgctctcttccatccttgccaagacagccagcaacatcattgatgtgtctgctgcagactcacagggcatggagcagcatgagtacatggaccgtgccaggcagtacagcacccgcttggctgtgctgagcagcagcctgacccattggaagaagctgccaccgctgccgtctcttaccagccagccccaccaagtgctggccagtgagcccatcccgttctctgatttgcagcaggtctccaggatagctgcttatgcctacagtgcactttctcagatccgtgtggacgcaaaagaggagctggttgtacagtttgggatcccatgaagagaggggtccttggacagctcttctcctctcttcatcccatctctaccccacccccttggcccccagcctcactgcggcttatacagtaccctaacctgctactaatcacagagaaaaatgtgaagaaggaggagaagaggaaggctagaagcctgagcaagtgagggtagaaccttttgggactggcctttgaagctctggccagggatggggtgggggccaaaaggacagagcctggtatgtcttcatagtcattgagaatgtggagataccagtttgggtggggggtgatcaccaggggacctagggagatccccttcccaccctctctgttggcctcagagtcactcctgccccctctccctgacttggtgctcacatgcacctcactagggtttgtgaccagggtctggatgagcttgaatttgaatgaattgagtttgtatttctagaaccctgggtttttacatgtttggtctttttttgttttggtttgtcaccctcgataaaggaagtatattcatccaaaaaaaaaaaaaaaaaaaa

SEQ ID NO: 4510 - DNA, 1995 bp, Homo Sapiens
  NM_017908
ttttggggacagatcccgaagttcgagcatccctcggataggccgggtgtcaggcctggtctctcaggcccgtccaggcccatcttgacgattccaagaccacccccttgagcaagaatgccatcccctctgggtcccccatgcctgcccgtcatggacccagagaccaccctcgaggagcctgagactgcccgcctccgcttccgagggttctgctaccaggaggtggcaggtccccgagaagccctggcccggctgcgtgagctgtgttgccagtggctgcagcctgaggcacactccaaggagcagatgctggagatgctggtgctggagcagttcctgggcacactgcctcccgagatccaggcctgggtgcgcggtcagcggccaggcagtcctgaggaggccgctgccctagtcgaaggactgcagcatgaccctgggcaactgttgggctggatcacagcccatgtcctgaagcaggaggtgctccctgcagcccagaagacagaggaaccacttgggagcccccacccctcagggacagtggagtcccctggggaaggtccccaggacaccagaatagaggggtctgtccagctcagctgcagtgtgaaggaggagcccaatgtcgatggacaggaagtggcaccctccagccctccacttgcagcacagtcccctgaggggaaccatggacaccaagaaccagcctccacatccttccacccacccaggattcaggaggagtgggggctgctggaccggtcacagaaggaactgtactgggatgcgatgctggagaagtacggcacagtggtctccctggggttaccgccccaccagccagaggcacaggcccagtcagagctggggatgctgctcacggggacaggcgtctgcagaagcctgcgctcgggaaatgagagtgagggtccacctggctgcccagaggcccagccgccccagggcccagggccggcagcctgggagggcttgtctggggctgccactcctgcccccactgtgcgcccagggacaccgccagtgcccactcagcccacacctgcagagacgagactggagccggctgccacccccaggaagccctacacgtgcgagcagtgtggccgcggcttcgactggaagtcagtgttcgtcatccaccaccggacacacacgagtgggccaggtgtgcagtccccggggctagccaccggggaaagcacagagaagccaccacaaggggaggtggcctttccgcaccacccccgacgctcactcacgggcccccggagttacccgtgtgaggagtgcgggtgcagcttcagctggaagtcgcagctggtcatccaccgcaagagccacacaggccagcggcgtcacttctgcagtgactgtggccgcgccttcgactggaagtcgcagctggtcatccaccgcaagggccaccggccggaggttccatgagcagccagacagcacagtccctcggggcctcggtgttctcggggcctggatacagcctctggggcaccagcagaagactctggaggcagcaggggatgccagagtgaacaaggggtcccaagccagttccctgcccctggtctggtctcccccaaaagacctgggtgcaaggaaaaggagctgctctctctcttcttgcccctgcctcctagagggaggtctgggttcccttctatggctgaccagtgcctgtggggtgactgccaagcaccaggctccctccctccctgtgacatggcctgggctgacaacactccctctcctgggacctccttgcctcaggtgggtgttcaaaaactgtgcctccccactcgtctgtgcagaggctgggcctgaggtctcagtgtggagagcagcagaagacccaggaaagcacagttggcttccgtttctcctgctccctgtgtgtgttagaattttaacataaattccactttcataataaaaaaaaaaaaaaaaaaaaaa

SEQ ID NO: 4511 - DNA, 1928 bp, Homo Sapiens
  NM_017909
ggaccagagttcagtgcggctgcgcagtagcgggggtgggcgggagcgcccttccaggagatgggttggctgcagtagtgagaggctgggggtgcggctctttccctgcagtcctgccgaggaagcgtgcgtccctggcgcttccttcttctcttccggcggagagcttgggatgtggtaatgccagccacactcctcagagccgtggccagatctcatcatatattatcaaaagcacatcagtgccgaagaatcggtcatctaatgttaaaaccacttaaggaatttgaaaatacaacatgcagcacactgacaatacgtcaaagcttggatttgttccttcctgataaaacagctagtggtttgaataagtctcagatcctggaaatgaaccaaaaaaagtcagataccagcatgctgtctccattaaatgctgctcgttgccaagatgaaaaggcacaccttccaaccatgaaatcctttggtactcacaggagagtgacccacaaaccaaatctgttgggttctaaatggtttataaaaatattaaagaggcatttctcatctgtatcaacggaaacatttgttccaaaacaagacttcccacaggtgaagagaccactaaaagcatccaggaccagacagccatccaggaccaaccttccagttctgtctgtgaacgaggacctaatgcactgcacagcatttgcaacggcagatgagtatcatctgggaaatctgtctcaagatctggcctcccacggatatgttgaagtaacaagcttgcctagagatgcagcaaatattttggtgatgggtgtggaaaattctgcaaaagaaggtgatcctggaacaatattcttcttcagggaaggagctgctgtgttttggaatgtgaaagacaaaactatgaagcatgtgatgaaagttctagaaaaacatgaaattcagccctatgaaatcgcactggtacactgggaaaatgaagaacttaactacataaaaatagagggacagtcaaaacttcacaggggggaaatcaagttaaattcagagctggatttagatgatgccattctagagaagtttgctttctccaatgctctatgcctttctgtaaaactggcaatttgggaagcatcactggataaatttattgaatctattcagtcaattcctgaggctttaaaagctgggaagaaagtgaaactatctcatgaagaagttatgcagaaaatcggtgaactctttgctctaaggcaccgtataaacttgagttcagacttcctgattactcctgatttctactgggacagagaaaacctggaaggactttacgataaaacgtgtcaattccttagcattggccgaagagttaaggtcatgaatgaaaaacttcagcactgcatggaactaacagatctaatgcggaatcacctgaatgagaagagggcactccgcttggagtggatgattgtcatcctcattaccatagaggtaatgtttgagctgggacgagtatttttctgatcaagtgataaccaaagtgtcactgcaagagatattcaagttctacaatcaaaaattaaatgttcggcccggcgcggtgcctcatgcctgtaatcccagcactttcggaggccaagaagggtggcttgagatgagatcaggagctcaagacaagcctggccaacatggtgaaaccccatctctactaaaaataccaaaattagccaggtgtgttggcacacgcccgtcatctcagctactcaggaggctgaggcaggagaatctcttgaacttgggaggcggaggttgcagtgagctaagatcacaccactgcactccagccagggcaacagtgagactcagtctcaaaaataaacaataaaataaataaataaatgttcaaaaaaaaaaaaaaaaaa

SEQ ID NO: 4512 - DNA, 1856 bp, Homo Sapiens
  NM_017910
actcgtctgcgacggcgccttcgcgaaacactatgctaatggcatggtgccgcggtcctgtcttgctgtgcctgcggcaggggctcggaaccaattcattcctgcacggcctggggcaggagcccttcgagggagctcggtcactgtgttgcaggtcctcgcctagagacctgcgagatggagaaagagagcacgaggcggcacaaaggaaagccccaggagcagagtcttgcccatctctccctctgagcatctcggacattgggactggatgtctttcgtcactggaaaacctcagactgccgacgctgcgggaagagtcatcccctcgagagctcgaggactcgagcggagaccagggccggtgcggtcccacacaccagggatccgaggatccttcgatgctctcgcaggcccagtccgctaccgaggtcgaagagcgtcacgtctccccttcttgttcaacttccagagagagaccctttcaggctggggaactgattttagctgagactggggagggagaaacaaaatttaagaaattatttaggttgaacaacttcggactcttaaatagtaactggggggcagtcccgttcggcaagatcgtggggaagttccccggccagatactgaggagttccttcggtaagcagtacatgctgaggaggccagccttggaagactatgtagtattgatgaaaagagggactgccataacattcccaaaggatattaatatgattctctcaatgatggatatcaacccaggtgatactgttttggaagctggctcaggctctggtggaatgagcttatttttatccaaagcagttggatcacaaggacgagtcataagttttgaggtacgaaaagaccaccatgatctggctaagaagaattacaaacactggcgtgattcatggaaattaagtcatgtagaagagtggccagacaatgtggattttattcataaggacatttcaggagcaaccgaagacataaaatctttaacatttgacgcagtagctttggatatgttaaatcctcatgttactttgcctgttttttacccacatcttaagcatggtggtgtatgtgctgtatatgtagtaaacatcacacaggttattgaacttttagatggaattcgcacctgtgaacttgctctttcatgtgaaaagataagcgaggtcattgtcagagattggttggtttgccttgcaaaacagaaaaatggaattttagctcaaaaagtagaatctaaaatcaacacagatgtacaactagattctcaagagaaaattggagttaaaggtgagctgtttcaagaggatgaccatgaagaatcgcattctgattttccatatggatcatttccctatgttgctagaccagtacactggcaacctggtcatacagcttttcttgtcaagttgaggaaggtcaaaccacaacttaactgagtactccagatgacagtaactgacttgaagatggaaaaatatcaaaatagaactttatattgaaaatcactgcttccatagattggcatttttagctattactatgacttatataacttatacatataattttgaaaataacaactaaaagatgtataacatagcaaaactgcttaaacatcccattttgacacttgtcttgcagttagtttgacattttgtagttaatgattccaaattggtttagttgggccatctcattcttcacttcctgtaaaccactccatagatttgtctttcttcaagaaattagttttctttcctttatttgattgatggtcattgactactgaaataaaatatgcattttaagataaaaaaaaaaaaaaa

SEQ ID NO: 4513 - DNA, 2928 bp, Homo Sapiens
  NM_017911
ggctggggcgggcgcgcgggggaagggtttgcggcggcgccgctgccggctaacgcggaggggcgcctggaggcggcgtggcgtccgctctggctccgactccggctctcgctctcgcttctagcccgcgtgcctgcgcagtcccctccccgagaaccatccccttgccccgcccagcgtcaggggtgcgcggccgccgagagaccccggaggcgtagccggctgcggaggcgaagaggtggcagcgcgagctgggaccagcgtctcggaggcgccgcagaattcacagatggattcagtggaaaagacaacaaatagaagtgaacaaaaatccagaaagtttttaaaaagcctcatccggaaacagccccaggaactgctcctggttatcgggactggcgtcagcgcagcagtggcccccggaatccctgccctttgctcgtggagaagctgcatcgaggccgtcatcgaggctgcagagcagctggaggtgctgcaccccggagacgtcgccgagttccggaggaaagtgacaaaggaccgggacctgttggttgtcgcccatgatctgatccggaagatgtcacctcgcacaggcgatgccaagcccagcttcttccaggactgcctgatggaggtgtttgacgacctggagcagcacatccggagtcctgtggtgctgcagtcgatcctcagcctgatggacaggggcgccatggtcctgaccaccaactatgacaacctgctggaggcctttggccggcggcagaacaagcccatggagtccctggacttgaaggacaagaccaaggtccttgaatgggcaagagggcacatgaagtacggcgtcctccacattcacggcctctacacggacccctgcggggtggtgctggacccatcggggtataaagacgtcactcaagacgcagaagtcatggaagtcctccagaacttataccgcaccaagtcctttctgtttgtgggctgtggggagacccttcgtgatcagatattccaggccctctttctttactccgtgccgaataaggtggatttggagcactacatgcttgtgctgaaggagaatgaagaccatttctttaagcatcaggcagatatgcttctgcacggaatcaaagttgtatcctacggggactgttttgaccactttccaggatatgtgcaagaccttgccactcagatctgcaaacagcaaagcccagatgctgatcgcgtggacagcaccacattattgggtaatgcatgccaggactgtgcaaagaggaagttagaagagaatggaattgaagtttcaaaaaaacgcacacaatcagatactgatgatgctggagggtcttgaaatctttacagtaaaacctgcaacttgaaaactagccttctgtaaccacagtgcccaaacgaagaggaatgtatggagaactccacgtggatctctgattgcgaaaccgtcacatacaccaagagagccacatgggcatgtggccctcaaggctgggtgagagggctcccctgtgtgttgaactatgcaggagggtgacgcggacacatttcaggtggactttgcaaggactgatggatagctacctcagggaccagaatccgtgggaagggatggacctggtgttcccgttcccatctgacaggctctcttttgtcaaggtggtatttttcgtaataaaaggggaagagtaaagactgtccaagcaacagtagctgccaaagagaaaatacgaaatagacactttttttttttgagtcagagtctcactctgtcacccaggacagagtgcagtggtacgatctcaagctcactgcagccaccaccgcctgggctcaagtgattctcctgcctcagcctcccgagtagctgggattacaggcgtccaccaccatgcccagctaatttttttatttttagtagagttggagtttcaccatgttggccaggatggtctcgaactcttgacctcaggtgatccacccgccttggcctcccaaagtgctaggattacaggcatgagccactgcgcccagcaaaataaacacattttataatttgtatgtggaaacatgttactatagaaagcattttaaaggtacgttttaaaggtccactgttaaatagtaaagaatgaatccgctagcgaaaatgtttttagggagaacagctggatcaaaagggcttctttggaattaggttgttttagtaacttctgttccaaagaaacacaggtctgatattgctaagaactgaaatcggaggagccagaggcccttttcagtccaggccaacattgtgcacggccactgtgggactgacaaccgggatagctcaagttcgagagaccaggtttcaaacattataagttccaggctttgcaagtctttattctctggggtaatatccagtctttctgttattgtctcttaaaattctcttccatggcccacattaagggagtttgcagagagtgagggaggcaaaacttgaaaagggcctgcaacactttaaaccttctcaggttcacccacatgaaacggctgtgctgagtgtgctgccggtgcccggggagcttctctgactgtgacccggcagaggcttctgtggcggtgcatgagcggccctacagtggagggttctctttggaaacaaacagccctgcttggtttcagtttgaggccacttatcttcaatgtgacatttcttgccaagccctgtgacactccccattgatgactcccataggtacagataaagttaagaacaggaaacagaagggtaggatgcatagggagggagagaagccctgaaaactttttttttctttttgaagcatggaaaacaaatcttttatgccactccagccataaataaaattttaacttcaaaaaaaaaaaaaaaaa

SEQ ID NO: 4514 - DNA, 3903 bp, Homo Sapiens
  NM_017912
agcacttgaagttcaggcagcgagagttgacatggggccagggctgcgcccctggggcgggttgaagacagggtgagtctcttgatattcaggaaatcatcgcgcacccagtcaccagcgttcgggagcctgtcgcagcgggaccgacggaatccggagcaggcgacagggcgcagaagcgggatgtacttctgttggggcgccgactccagggagctgcagcgccggaggacggcgggcagccccggggctgagctactgcaggcggccagcggggagcgccactctctgctgctgctgaccaaccacagggtcctctcgtgcggagacaacagcaggggtcagctgggccgcaggggcgcgcagcgcggggagctgccagaaccaattcaggcattggaaaccctaattgttgatctcgtgagctgcgggaaggagcactccctggctgtgtgccacaaaggaagggtcttcgcatggggagctggttctgaagggcagctggggattggagaattcaaggaaataagtttcacacctaagaaaataatgactctgaatgatataaaaataatacaagtttcctgtggacactaccactccctggcattatcaaaagatagccaagtgttttcgtggggaaagaacagccatgggcagctgggcttggggaaggagttcccctcccaagccagcccgcagagggtgaggtccctggaggggatcccactggctcaggtggctgccggaggggctcacagctttgccctgtctctctgtgggacttcgtttggctggggaagtaacagtgccgggcagctggccctcagtgggcgtaatgtcccagtgcaaagcaacaagcctctctcagtcggtgcactgaagaatctaggtgtggtttatatcagctgtggtgatgcacacactgcggtgcttacccaggacgggaaagtgttcacatttggagacaatcgctctggacagctgggatacagccccactcctgagaagagaggtccacaacttgtggaaagaattgatggcctagtttcgcagatagattgtggaagttatcacaccctggcatatgtgcacaccactggtcaggtggtatcttttggtcatggaccaagtgacacaagcaagccaactcatccggaggccctgacagagaactttgacattagctgcctgatttctgctgaagacttcgtggatgttcaagtcaaacacatttttgctggaacatatgccaactttgtgacaactcatcaggatactagttccacacgtgctcccgggaaaaccctgccagaaataagccgaattagccagtccatggcagaaaaatggatagcagtgaaaagaagaagtactgaacatgaaatggctaaaagtgaaattagaatgatattttcatctcctgcttgtctgactgcaagttttttaaagaaaagaggaactggagaaacgacttccattgatgtggacttagaaatggcaagagataccttcaagaagttaacaaaaaaggaatggatttcttccatgataactacgtgtctcgaggatgatctgctcagagctcttccatgccattctccacaccaagaagctttatcagttttcctcctgctcccagaatgtcctgtgatgcatgattctaagaactggaagaacctggtggttccatttgcaaaggctgtgtgtgaaatgagtaaacaatctttgcaagtcctaaagaagtgttgggcatttttgcaagaatcttctctgaatccgctgatccagatgcttaaagcagccatcatctctcagctgcttcatcagactaaaaccgaacaggatcactgtaatgttaaagctcttttaggaatgatgaaagaactgcataaggtaaacaaagctaactgtcgactaccagaaaatactttcaacataaatgaactctccaacttattaaacttttatatagatagaggaagacagctctttcgggataaccacctgatacctgcagaaacccccagtcctgttattttcagtgattttccatttatctttaattcgctatccaaaattaaattattgcaagctgattcacatataaagatgcagatgtcagaaaagaaagcatacatgcttatgcatgaaacaattctgcaaaaaaaggatgaatttcctccatcacccagatttatacttagagtcagacgaagtcgcctggttaaagatgctctgcgtcaattaagtcaagctgaagctactgacttctgcaaagtattagtggttgaatttattaatgaaatttgtcctgagtctggaggggttagttcagagttcttccactgtatgtttgaagagatgaccaagccagaatatggaatgttcatgtatcctgaaatgggttcctgcatgtggtttcctgccaagcctaaacctgagaagaaaagatatttcctctttggaatgctgtgtggactctccttattcaatttaaatgttgctaaccttcctttcccactggctctgtataaaaaacttctggaccaaaagccatcattggaagatttaaaagaactcagtcctcggttggggaagagtttgcaagaagttctagatgatgctgctgatgacattggagatgcgctctgcatacgcttttctatacactgggaccaaaatgatgttgacttaattccaaatgggatctccatacctgtggaccaaaccaacaagagagactatgtttctaagtatattgattacattttcaacgtctctgtaaaagcagtttatgaggaatttcagagaggattttatagagtctgtgagaaggagatacttagacatttctaccctgaagaactaatgacagcaatcattggaaatactgattatgactggaaacagtttgaacagaattcaaagtatgagcaaggataccaaaaatcacatcctactatacagttgttttggaaggctttccacaaactaaccttggatgaaaagaaaaaattcctctttttccttacaggacgtgataggctgcatgcaagaggcatacagaaaatggaaatagtatttcgctgtcctgaaactttcagtgaaagagatcacccaacatcaataacttgtcataatattctctccctccctaagtattctacaatggaaagaatggaggaagcacttcaagtagccatcaacaacaacagaggatttgtctcacccatgctcacacagtcataatcacctctgagagactcagggtgggctttctcacacttggatccttctgttcttccttacacctaaataatacaagagattaatgaatagtggttagaagtagttgagggagagattgggggaatggggagatgatgatgatggtcaaagggtgcaaaatctcacacaagactgaggcaggagaatagggtacagagatagggatctaaggatgacttggacacactccctggcactgaagagtctgaacactggcctgtgattggtccattccaggaccttcatttgcataaggtatcaaaccacatcagcctctgattggccatgggccagacctgcactctggccaatgattggttcattccaggacattcatttgcataaggagtcaaaccacaccagtcttggattggctgtgagccaattcacctcagtctctaattggctgtgagtcagtctttcatttacatagggtgtaaccatcaagaaacctctacagggtacttaagccccagaagattttgctaccagggctcttgagccacttgctctagcccactcccaccctgtggaatgtactttcacttttgctgcttcactgccttgtgctccaataaatccactccttcaccacccaaaaaaaaaaaaaaa

SEQ ID NO: 4515 - DNA, 1843 bp, Homo Sapiens
  NM_017917
ctaatgaactcctgggtcacgtggtgcgcacgcgccaaaggcacacgataaaggaaaacgcgggcttatcgtggcctttaaaatccggcttggtgagcttgggtcgcctctgaaggagaaccattttccatctctttcatagttttttcccccagtcagcgtggtagcggtattctccgcggcagtgacagtaattgtttttgcctctttagccaagacttccgccctcgatcaagatggtggttggacggccttcctaacctttacggggcctggcggtgctgacgcctgagctggtaggggtggagcaggtaggaaacagcaaatgcagaagctgctgcgcggaagtcggccatggactggaaagaagttcttcgtcggcgcctagcgacgcccaacacctgtccaaacaaaaaaaaaagtgaacaagaattaaaagatgaagaaatggatttatttacaaaatattactccgaatggaaaggaggtagaaaaaacacaaatgaattctataagaccattccccggttttattataggctgcctgctgaagatgaagtcttactacagaaattaagagaggaatcaagagctgtctttctacaaagaaaaagcagagaactgttagataatgaagaattacagaacttatggtttttgctggacaaacaccagacaccacctatgattggagaggaagcgatgatcaattacgaaaactttttgaaggttggtgaaaaggctggagcaaagtgcaagcaatttttcacagcaaaagtctttgctaaactccttcatacagattcatatggaagaatttccatcatgcagttctttaattatgtcatgagaaaagtttggcttcatcaaacaagaataggactcagtttatatgatgtcgctgggcaggggtaccttcgggaatctgatttagaaaactacatattggaacttatccctacgttgccacaattagatggtctggaaaaatctttctactccttttatgtttgtacagcagttaggaagttcttcttctttttagatcctttaagaacaggaaagataaaaattcaagatattttagcatgcagcttcctagatgatttattggagctaagggatgaggaactgtccaaggagagtcaagaaacaaattggttttctgctccttctgccctaagagtttatggccagtacttgaatcttgataaagatcacaatggcatgctcagtaaagaagaactctcacgctatggaacagctaccatgaccaatgtcttcttagaccgtgttttccaggagtgtctcacttatgatggagaaatggactataagacctacttggactttgtccttgcattagaaaacagaaaggaacctgcagctctacaatatattttcaaactgcttgatattgagaacaaaggatacctgaatgtcttttcacttaattatttctttagggccatacaggaactaatgaaaatccatggacaagatcctgtttcatttcaagatgtcaaggatgaaatctttgacatggtaaaaccaaaggatcctttgaaaatctctcttcaggatttaatcaacagtaatcaaggagacacagtaaccaccattctaatcgatttgaatggcttctggacttacgagaacagagaggctcttgttgcaaatgacagtgaaaactctgcagaccttgatgatacatgatctctgaaagactagactgtcttatattatgagatacttgaatgctgcatgtaaagcctttaaagcaaaatcctcagaaatggtctaaataaaacacttgatatgcctagagaacacaaaaaaaaaa

SEQ ID NO: 4516 - DNA, 1298 bp, Homo Sapiens
  NM_017918
agctggagccgcggcgcgctgagcgagcaggcggggcgggagcgcccacagctcggagccaccaggcgctgacgaggagcccggctgagggaggatgcgccgctgacgcctgcgggagccgcgcgcctggggcgggaggatgctccagaggggcctctggccgtggcgcacgcggctgctgccgacccctggcacctggcgcccagcgcgcccgtggccgctgccgcctccgccccaggttttgcgtgtgaagctgtgtggaaatgtgaaatactaccagtcacaccattatagtaccgtggtgccacctgatgaaataacagttatttatagacatggccttcccttggtaacacttaccttgccatctagaaaagaacgttgtcaattcgtagtcaaaccaatgttgtcaacagttggttcattccttcaggacctacaaaatgaagataagggtatcaaaactgcagccatcttcacagcagatggcaacatgatttcagcttctaccttgatggatattttgctaatgaatgattttaaacttgtcattaataaaatagcatatgatgtgcagtgtccaaagagagaaaaaccaagtaatgagcacactgctgagatggaacacatgaaatctttggttcacagactatttacaatcttgcatttagaagagtctcagaaaaagagagagcaccatttactggagaaaattgaccacctgaaggaacagctgcagccccttgaacaggtgaaagctggaatagaagctcattcggaagccaaaaccagtggactcctgtgggctggattggcactgctgtccattcagggtggggcactggcctggctcacgtggtgggtgtactcctgggatatcatggagccagttacatacttcatcacatttgcaaattctatggtcttttttgcatactttatagtcactcgacaggattatacttactcagctgttaagagtaggcaatttcttcagttcttccacaagaaatcaaagcaacagcactttgatgtgcagcaatacaacaagttaaaagaagaccttgctaaggctaaagaatccctgaaacaggcgcgtcattctctctgtttgcaaatgcaagtagaagaactcaatgaaaagaattaatcttacagttttaaatgtcgtcagattttccattatgtattgattttgcaacttaggatgtttttgagtcccatggttcattttgattgtttaatctttgttattaaattcttgtaaaacagaaaaaaaaaaaaaaaaaaaaaaaaaa

SEQ ID NO: 4517 - DNA, 3609 bp, Homo Sapiens
  NM_017920
gagccgcggccgcgcggaggaagcgaaggaggcgggagcggagacctcgctgcgctcatggcgtcgcccgggcattcagatttgggagaagtagccccagaaataaaagcatcagagagacgaacagctgtggccattgcagatttggaatggagagaaatggaaggagatgattgcgagttccgttatggagatggtacaaatgaggctcaggacaatgattttccaacagtggagagaagcaggcttcaagaaatgctgtcacttttgggcctagagacgtaccaggtccagaaactcagcctccaggactctctgcagatcagttttgacagtatgaagaactgggcccctcaggttcccaaagacttgccctggaatttcctcaggaagttgcaggccctcaatgctgatgccaggaataccactatggtgctggacgtgctcccagacgccaggcctgtggagaaggagagccagatggaagaggagatcatctactgggacccagctgatgaccttgctgccgacatttattccttttctgagctgcccacccctgatacgccagtgaaccccttagaccttctctgtgccctgctgctctcctcagacagtttcctgcaacaagaaatagcgttgaaaatggccctctgccagtttgcactcccactcgtgttgcctgactcggagaaccactaccatacatttctgctgtgggccatgcggggcattgtgaggacatggtggtcccagcccccaaggggcatggggagcttccgggaagacagcgtggtcttgtccagggcgcccgccttcgccttcgtgcgcatggacgtcagtagcaactccaagtcccagcttctcaacgccgtcctcagcccgggccacaggcagtgggactgcttctggcatcgggacctcaacttgggcaccaatgcccgggagatttcggatgggttggtagaaatttcctggttttttcccagcggaagggaggacttggacattttcccagaacctgtggcctttctgaacctgagaggtgacatcgggtctcactggctgcagtttaagctcttgacagaaatctcctccgctgtgtttatattgactgacaatatcagtaagaaggaatacaaattgctgtactccatgaaggagtcaaccacaaaatactacttcatcctgagtccctaccgtgggaagcgcaacacaaacctgagatttctgaataagttaattcctgtgctgaaaatagaccactcacatgtcctggtaaaggtcagcagcactgacagcgacagcttcgtgaagaggatccgggccatcgttgggaatgtgctgcgggcaccctgcaggcgggtatctgtggaggacatggcgcacgcagcccgcaaactgggcctaaaggtcgacgaggactgtgaggagtgtcagaaagcgaaagaccggatggagaggattaccaggaaaatcaaagactcggatgcctacagaagggacgagctgaggctgcagggggacccctggagaaaggcagcccaagtggagaaggagttctgccagctccagtgggccgtggacccccctgagaagcacagggctgagctgaggcggcggctgctagaacttcgaatgcagcagaacggccatgatccctcctcgggggtgcaggagttcatctcggggatcagcagcccctccttgagtgagaagcagtacttcctgaggtggatggagtggggcctggcacgggtggcccagccgcgactgagacagcctccggagacgcttctcaccctgagaccaaagcatgggggcaccacagacgtgggggagccgctctggcctgagcccctaggggtggaacacttcttgcgggagatgggacagttttatgaggctgagagctgtcttgtggaggcagggaggctgccggcaggccagaggcgttttgcccacttcccaggcttggcctcggagctgctgctgacagggctgcctctggagctaatcgatgggagcacgctgagcatgcccgtccgctgggtcacagggctcctgaaggagctgcacgtccgactggagagacggtcaaggctggtggttctgtcaaccgtcggggtgccaggcacgggcaagtccacactcctcaacaccatgtttgggctgcggtttgccacagggaagagctgcggtcctcgaggggccttcatgcagctcatcacagtggctgagggcttcagccaggacctgggctgtgaccacatcctggtgatagactccgggggcttgataggtggggccttgacgtcagctggggacagatttgagctggaggcttccttggccactctgctcatgggactgagcaatgtcaccgtgatcagtctagctgaaaccaaggacattccagcagctattctgcatgcatttctgaggttagaaaaaacggggcacatgcccaactaccagtttgtataccagaaccttcatgatgtatctgttcccggccctaggcccagagacaagagacagctcctggatccacctggtgacctgagcagggctgcagcccagatggagaaacagggcgacggcttccgggcactggcaggcctggccttctgcgaccctgagaagcagcacatctggcacatcccaggcctgtggcacggagcacctcccatggccgcagtgagcttggcctacagtgaagccatatttgaattgaagagatgcctactcgaaaacatcaggaacggcttgtcgaaccaaaacaaaaacatccagcagctcattgagctggtgagacggctgtgagtgtgcagagaaacccagttcaggtgtaggaggctgctgtgggcagccctgtctgatggggcacccgtgtggggctgtgctctggtgcctgagaatggctggtgcccaatcgacatgagaagacgaggaaaagacagggtttggagtctcctcaacagtgttaaaagaggaagtgacctcacagaccagctcagagatgttaccaagaatatcacagcccccagggtagggagacaagcagcagtttgttctgtctcagctcctgtcaaggatcctgcggggtgggccctctgtatagctgctctctgtcactggcccctggagtgggagcagcgtccttagtcactgcaggcccaggcgggcaggtggtcccaggacagaggtggggaagttgtcctgaggaagcagaagtaggccttgctcccgcccaacccaagggcctccagtggaccagcattcaagatgtgagtgcccgtggtgtgcaaggcactcccatggcaccgtatttattgactgatctgtgaaggcttccctgacccctgcccaggaagagttcactggtcgctctgttgtgccccacagcactttgttatacctctgccacacacttcacgcagcgcgttgtaactcatgtgtttacatgtctgtccccccagactgtgagctccttgagggcagggactgtacattctccagctctgtgtccccagggcctggcacattgtagacgcttaataaatgtctgttaaatgaatgagtgcacaaaaaaaaaaaaaaaaaaaa

SEQ ID NO: 4518 - DNA, 7023 bp, Homo Sapiens
  NM_017925
tcagaatcagatgtacctcttttctgccttcctatgggagctactattgagtgctgggatcctgaaaccaaatatccacttccagttttttcaacttttgtcttgacaggttcttcagccaaaaaggtatatggagctgccattcagttttatgaaccttactctcgggaacttctatcagagaaacagcttatgcacctgggcttgttgacgcctgtggagagaaaaatggtctccaaatccatcaatacaaacaaatgcatttgtttactctcacactggcctttttttgaagcttttaggaaatttcttatgtttatctacaaactttctgtgtctggaccacatcctcttcccattgaaaagcacatttcacattttatgcaaaacatcccttttccttcaccacaaagaccgagaatccttgtccagctgtcagtccatgatgcattaatattatcacagccagtttctacacctttaccactaagtggagccaactttagcaccttgctaatgaatctgggtcctgagaattgtgcaacactgctgctctttgttttacttgagagtaaaattctgctgcattctcttaggccagctgtcttgactggggtagctgaagctgttgtagctatgatctttccatttcagtggcaatgcccatatattcccctttgtcctctttcactggctgcagtgcttagtgcacctttaccatttatagttggagttgactcaaggtattttgatcttcatgacccaccacaagatgttgtttgcattgacttggatacgaacatgttatatgtatcagatgaaaagaagaacatgaactggaagcaacttcccaaaaagccgtgcaaaaatctacttagcaccttaaagaaattgtatccccagctgtcttcagttcaccaaaaaactcaagaaggctcagcgattgacatgactccaattgaagcagatttctcctggcaaaagaagatgacacagcttgagatggaaattcaagaggcatttttgcgctttatggcgtctattttaaaaggatatagaacatatctcagaccaatcacagaggctccttcaaataaagccacagctgctgattcattgtttgaccgacagggatttttaaaaagtcgagatcgtgcctatgcaaaattctatacccttttatccaaaacacagatttttattcgtttcattgaagaatgcagttttgtaagtgataaagatactggattagcattttttgatgactgcatagaaaagttgtttcctgataaaggcacagagaaaacagataaggttgattttgattcagcagaagataccagattgatagaactagatgattcacagaaaagtgagcatactgtatttataatgccgccagagccacctcctgatgatggaaaggacctgtcaccaaagtacagttacaaatactttccaagactggaccttaagctttttgacagaccgcaggagttgaaactttgttttagtagacaccctactgggaatagcattacaaagagtccacctctcatggctaagagaactaaacaggaaataaaaacagctcataaattggcgaagagatgttatacaaatccaccacagtgggccaagtgtctgtttagtcattgttacagtttatggtttatttgtcttccggcctatgttagagtttctcatcctaaagtcagagcacttcagcaggcatatgatgtacttattaagatgaggaaaacagatgtggatcccttagatgaggtgtgctatcgagtagtgatgcagctttgtggactttggggtcatcctgttttagcagtgagagtcttatttgaaatgaaaactgctaggataaagcctaatgctattacttatggttattataataaggtagtcttggagagcccgtggcctagcagtacccgcagtggtattttcttatggacgaaggtacggaatgtggtacgtggcttggcacagtttaggcagccgcttaaaaagactgtgcaaaggtcacaggtctcctcaatatcaggtggtcagtctgaccaaggatacgggtctaaggatgaacttataaaggatgatgcagaaattcatgtgcctgaagaacaggcagcaagagaattgataactaaaacaaaaatgcaaacagaagaggtgtgtgatgcctctgctattgtggcaaaacattcacaacctagtccagagcctcacagtcctactgaacctcctgcatggggcagcagtattgtgaaagttccgtctggtatatttgatgtcaacagcaggaaaagtagcactggtagtatatcaaatgtgctgttttctactcaagatccagttgaagatgcagtctttggcgaagctactaatctcaagaagaatggtgatagaggagaaaaaagacaaaagcattttcctgagaggagttgtagttttagttctgaaagtcgagcaggaatgttgcttaagaagagtagtttggattcgaattcaagtgaaatggctatcatgatgggagcagatgccaagattctcacagcagcattgacatgtcctaagacttctctacttcatattgcaagaacccatagctttgagaatgttagctgtcacctacctgatagtaggacttgtatgtctgaaagcacttggaatcctgagcacagatcatctccggtgccagagatgcttgaggaaagccaagaactccttgagcctgtggttgatgacgtacctaaaactactgcaacagtagatacatatgagagtctactaagtgatagtaacagtaatcagtccagagacttgaaaacagtatccaaagatctgaggaataagagaagtagtttatatggtattgctaaggtggttcagagggaagatgttgaaactggactagatcctttgtctcttttagccactgaatgtacaggaggaaaaactcctgattctgaagataagttgttttctccagttattgcacgtaatctggctgatgaaatagaaagctatatgaacctaaaaagtcccctaggtagtaaatcttctagtatggaattacacagagaggaaaacagagagtctggcatgactactgcatttattcatgctctagagaggagatcaagcctacctttagatcatggttcaccagcacaggaaaatcctgaaagtgaaaagagctcacctgcagtgtccaggtctaaaacttttactgggcgtttcaagcagcaaaccccctctcgaactcataaagaacgttcaacttctttgtcagcactggtgcgttcttcgccacatggctcgttgggttctgtagtaaattctttgtcagggctaaagctggataatatactctcagggcccaagatagatgtcctgaaatctggtatgaaacaagcagcgacagtagccagtaagatgtgggtagctgttgcgtctgcctacagctactcagatgatgaggaagaaactaatagagactacagcttcccagctggcctagaagaccatattttgggggagaatatatcgcctaacacaagtatctcagggttggtccccagtgaacttacccagagcaacacaagtcttggcagtagcagcagtagtggagatgtaggaaaactgcattatccaacaggtgaagttccatttccaagaggcatgaaagggcaagactttgaaaaatcagatcatggttcttctcaaaataccagcatgtctagcatctatcagaattgtgcaatggaggttttgatgtccagttgttcacagtgtagagcttgtggagctttagtttatgatgaagaaattatggctggatggacagcagatgactcaaatttgaatacagcttgtccattctgtaaaagcaacttcttgcctcttctcaatatagaattcaaagatttgagaggttctgcaagctttttcctgaaaccaagtacctctggtgacagtttacaaagtggaagcattccattggcaaatgaatccttggagcacaaacctgtatccagtttagcagaacctgacttgatcaactttatggacttcccaaaacataaccagatcataactgaagaaacaggctctgcagttgaaccaagtgatgaaataaagagagccagtggagatgtccaaactatgaaaatttcatctgtgcctaatagtttatcaaagcgaaatgtgtctttgactcgaagtcacagtgttggaggcccattgcagaatattgactttacccagcgaccgtttcatggcatctcaacagttagtcttccaaatagtctgcaggaagttgtggatcctttaggaaaaagacccaatcctccccctgtttctgtgccctacttgagtcctctagtactccgtaaagaacttgaatctttgctagaaaatgaaggtgatcaggtgattcatacatcttctttcatcaatcaacatccaatcattttctggaacctcgtttggtatttcagacgtttggaccttcctagtaacttgccaggacttatcctcacatctgaacattgtaatgaaggtgtacagcttcctctgtcatctctgtcccaggatagcaaacttgtgtatattcagctgttatgggataatatcaaccttcatcaggaaccaagagaacctctgtatgtctcatggaggaattttaattctgaaaagaaatcatctctcctgtcagaggaacaacaagaaacaagcactttagtagaaaccatcaggcagagtattcagcacaataatgttcttaaacccatcaacctactttcacagcaaatgaagccaggcatgaaaagacaaaggagtttatacagagaaatcctcttcttatcattagtgtctctaggaagagagaatattgatattgaggcatttgacaatgaatatggaattgcatacaatagtctgtcttcagagattcttgaaaggttgcagaaaattgatgctccaccaagtgccagtgtcgagtggtgcaggaagtgttttggagcgcctctcatttaaatagagattcactagaatgttgacacacaaggcttggggattagatttcatctggaaacattcaagtttttttttccaaatcgtaagaactggtgaatacggaattgaagtaactcttggggacaatatataatgaattatgattcatattgcattaccttgaaatatgaagtgccatttgaatgtcccagggcttattaatattgaagattttcaacccctgaactgcttttctgcctctgtggaaaactactttgggattcttcagtatttgtagtagtttgatagaaataatgaggaaccatattcattctaggcattgtttatatttgaagttactgagtttgaggaatggcaaattaaatttgcctaacccccaaaacaaatgaaatatctcaattataaaagcaacatggccgggcacggtggctcaggcctgtaatcccagcactttgggaggctgagcaaggtgggtggatcacttgaggccaggagttcgagaccagcctggccaacacggtgagaccctgtctttactaaaaatacaaaaattagccaggcgcaccactgtagtcccagctactcaggctgaggcaggagaatcgcttgaactgaggcagaggctacagtgagtggagatcacgccactgcaactccagcttgggtgacagagtgagaccgtctcaaaaaaaaaaaaaaaaaaaaaagagagcaacatatttgtgtaagtttgtatatgtgtagggctgtgtaggtatgtgtatatacagccatattctaagtgtatatttattaaaatagattgcatgttgcaatacggttttctgaaaggggtctcattgactattaaataaatgactactactaaacttgtctgtagtcattaatcttaaaattacctgaaaatctgatgacagctgccttccctaactttaatgtattaggttggcacaaaattaattgtagtttttgccactattaatggcaaaaaccgcaattatttttgtaccaacataatacacctttcatattatgtattatcttgcttaatgggttttatcttgattatccagttacttccatcctcttcccaatgttaatttgcaatagttttaaaatgggaacaaatgaatcaatcatcagatagttaaaatgaaattaaatcagctgcctaataatttatggaattcattggaatgtgcttaaaatgctaaagtgtatgtcattgaacatgaaatcttttttcaggcacatacattgttggtattgatgactttttaaaacctgtgggataaacttgcactgcacacggaagttttattcttgtatatttagatttgtatgcttgtgagtaaaaatgtgcatttgtaaatactgtgtttttaggttgaatcaattaagtcttaaaactgtaaatttattaagcttgttgccagtaggtttaagaaaatcatgatctcacatgcctcactttgacatttatcatgccttttattaaaaatatcccttaggaacagtaagtttgccttaactctctgcatggtttaaaaagccattggttttgtgtgtgtttacagtaattatgcagatgactaaatgagttgacacagtaaaattacttccatatggtacagtaacaacctaactcccttctacctgatgtaaccatttacaaattatagttattgtaccagtctttcaacatttcagggttaatctgacctatgcagaattctagtgtgaatttattgtgaaaatgctaaatgaaacaatttgtcagaaattatgtacaattttcattaccttcaaaatggatcttttgcactgtctgagagtatatatttttgcaactcaagacttggtactagttttaatacttaacacttactgacccaacagaagtttggaattaccttgcatataaaaattgaggttgaataaaatgaaaaattgttgttttctgttaca

SEQ ID NO: 4519 - DNA, 4093 bp, Homo Sapiens
  NM_017929
attacagaaggcgatgggccgagagctgaggaactacaactcctagagtactccgcgccgccgggacgccgcgcggctgcggggctgggcgagcgcaaagatgtccgcgcccgctgccgggaggcgaggccaactcgggatatcccggagcctctggggaggcggtcactccgacgtctgaggacctgggccttggacccggactcgttatgaagagcgattcttcgacctctgcagcccccctcagggggctcgggggacccctgcgcagcagcgagccggtgcgcgcggtcccggcccgggcgccggccgtggaccttctggaggaggcggccgacctcctggtggtgcacctggacttccgggcggcgctggagacctgcgagcgggcctggcagagtctggccaaccacgccgtggcagaggaacccgcgggcacctcattggaggtgaagtgctccctgtgtgttgtggggatccaggccctggcagaaatggatcggtggcaagaagtcctctcctgggtccttcagtattaccaggtccctgaaaagctaccccccaaagtcctggagctgtgcattcttttatacagcaaaatgcaagagcctggagctgtgctggatgtggtgggtgcctggctccaagacccagccaatcaaaaccttccagaatatggagccttggcagaatttcacgtgcagcgggtgctgctgcctctgggctgcttatcggaggctgaggagctagtggtgggctctgcagcctttggtgaggagcggcgactggatgtacttcaggccattcacacagcgaggcagcagcagaaacaggaacactcaggctctgaggaggcccagaagccaaacctggaaggctctgtctcccacaagttcctgtcactaccgatgttggttcgccagctttgggactctgcggtgagccacttcttttctctgcccttcaaaaagagtctcctggctgccttgatcctctgtctcctggtggtgagatttgatccagcttccccttcctccctgcacttcctctacaagctggcccagctcttccgctggatccggaaggctgcattttctcgcctctaccagctccgcatccgtgactgagggtccctgcgcaccacagcctctctgctcctcacgtccgtggccacagaagcagagcgacagagcgacacatccacaggcgcccctggggaaatgggaccagcctaatctcgcggagtgcactgtgtcttgctgcctgggtgccctctcctttgcaccctacttcggctggtcgcggtagatgatgtggaaacaaagcaggaccagcaggcacagcacctccagaacagtgccccggatgaccagaggccccttgaaaaggaggggtttggggacagggactgtgtccatgaaacattccatcttcttggtgaaggcaaggggttggttcttcaggtcaggatgttaatggagctggaagttcagaaaaagcctggtgaagtgacccttggcctttcacttcttgagaaacatacttctttgctgggcatggtgactcacgcctgtaatcccagcactttggaagggtgaggtgggtggatcacttgtggccaggagttcaaaacctgcctggccaacatggtgaaaccccatctctactaaaaatacaaaaattagctagatgtggtgcacgcctatagtcctagctacttgggaggctgaggcaggagaatcacttgagccagggaggcaaaagttgcagtgagctgagattgtgctaccgcactctctcaaaacaaacaaaaaaacatgccccacaggacagtaccttaattagctagagtagatctgagagggcctcttcttgcctgcactgtgctccccagagctgatctaattctgtatcaataggctgttcccatggtcttgccatgcgcttgaagctgcaggagccttctcactgttcaggctggggtgtggttttcagaaccaccgggttgactactgaaaaccaagtgagccttacagctcttatcgctgggtaaagtgatcttgcctggtgcctcttggtcttcagctcaattttccaggttgtcctggccaagtcttgctctgttacgctcagtgcctctgcccactctttccccgccagcccttccctcccgccctgcaaacttgtcccttggctgtttcaccaggttctgcctgtatccttgcctccttggtacacaccatttcaggttcttccctttctgtgtcccattgtcctagttatgttctgttgtttgtgtaatgcccaaatttttctgctcgtgtggccttgaaaagtaggccagcctcagaggctgctgagctgaaaatggaactgagtaatcaggtgagctggaagggatgtggggggcggggcagacgggagacatgggttttgaaggcagtgaacaataaaaccttagggaggtggcaccgaggccttagcatttgaggagctgaaatgtttcagtgttgttttctcaccagccacaagcatcttatgagtttctgtgcaaggaagcgtagagcactgctgtgctgtcaggatgaagaagggctttctgcaggggctggcctttctctacccagaggccaagcaggctgccctgcactgtgtccttggtgttgatgcccaaaatagagaaggtgcttgctagcttttccttggtacattttcgggggttgcaaggcaacaagttttcttttgttttgtttgtttgtttgtttgtttgtttttgagatggagtctctgtcacccaggctggagtgcagtggcgtgatctcagctcactgcaagctccgcctcccgggttcatgccattctcctgcctcagcctcccgagtagctgggactacaggtgcccaccacctcgcctggctaatatttttgtatttttagtagagtctgggtttcactgtgttagccgggatggtctcgatctcctgaacttgtgatccacccacctaggcctcccaaagtgctgggattacaggtgtgagccatcgcgcccggccaacttttctttagaaaaatgagtaaagtaggtaaacttcacaggccccttagaattaaatccttagggcatggttcaagtctgtaggaagcaaatctatacttttttatatgggcttttaagtaaagcttagaaccctggggggagaaaagcagtcaggtgaggtttgagattccttctatagaatgatttcttaaaatgaaaatctgggcccacttaactaccctagataaaacgcttcaatggcttcccatggctcactggataacatctaaattcttcatggaattgaaggcccctatgtgctggttttggctaagatctcccctttgatgtgggtcccctgttgattatatgtgcggccttccagctgcccaccatcacagctacagctcgctccccttggcctctgtgccttggctcgcactgttcctactgaaggcctagcacctgctcttggcctggtgagcccctccaccttccaggcttactcaaagaattctttctgcccctccctgtgtcccgggacctgtttcatatcgcttctgtggtcgtgaccccatggtcttgtaattgtgaacttctttgctgccccttcgaagctggggagtgcttgttgcagatgcatccaagaggggtaattgcgtatcaacagtggatttgctggttgtttctacagggttctgaagcatgcaacatagaacagatacctttaaatttaggggcgctaaggaaagcaggaaccagtaatcctcttctgtggtgggatgggagggtgggggagaggggtggaatggagaggaaacaggctattgttggccagccctgggtggaggtgggtgcaagcaggacagatagtgcctgggggtgggggcggagggttcgcctctaggaaggggctagaagggatgaggaaatagttcatagcttcgtgcaggtgatccctattctgcgtgtatgtgtttgcacatgagtgtttgtagaccatagaccattaaaaaatacggaattcaaaagttacaaaaagggtaaaaaaaaaaa

SEQ ID NO: 4520 - DNA, 2616 bp, Homo Sapiens
  NM_017931
tttccgcgaccgccccgcccactcccaggaaggcccgggtgcccagagctcgcggtggactccgacccggcgcaacatggccgcagcctcgcctctgcgcgactgccaggcctggaaggatgcgaggctcccgctctccaccacaagcaacgaagcctgcaagctgttcgatgccacgctgacccagtatgtaaaatggaccaatgacaagagtctcggtggcatcgagggctgcctgtcaaagctcaaagcagcagatccaacctttgtgatgggccacgccatggctactggccttgtgctgattggcactggaagctccgtgaagctggacaaagagctggacctggctgtgaagacaatggtggagatttcaagaacccagccgctgacaaggcgggagcagctgcacgtgtctgcagtagagacatttgccaatgggaactttccgaaagcctgtgaactatgggaacagattctccaggaccacccgacagacatgttggccctgaaattttcccatgatgcttatttttacctgggctatcaggaacagatgagagattctgttgctcgaatttaccccttctggacacctgacatccccctaagcagctatgtgaaaggcatctactcttttggcttgatggaaaccaacttctacgaccaggcagaaaaactcgccaaagaggctttatctattaacccgacagacgcatggtcggtgcacaccgtcgctcacatccacgagatgaaagcagagatcaaggatgggttggaattcatgcagcactcagagaccctctggaaggactctgatatgttggcttgtcataactattggcactgggctttatatctgattgagaagggcgaatatgaggccgcgctgaccatctacgatacccacatccttcccagcctgcaggccaacgatgcaatgctggacgtggtggacagctgctccatgctctaccgcctgcagatggaaggagtgtctgtgggccagcggtggcaggatgtcctgcctgtggcccggaagcacagccgagaccacatcctgctgttcaatgacgcacacttcctgatggcatccctgggtgcacacgacccccagaccacacaggagctgctgaccaccctgcgggacgccagcgaatccccaggggagaactgccagcacctcctggcccgagacgtggggctgcccctgtgccaggccctggtggaggctgaggacgggaaccctgaccgcgtcctggagctgctcctgcccatccgctaccggatcgtccagctcggtgggagcaatgcccagagagacgtcttcaaccagctgctgattcacgcggccttaaactgcacctccagcgtccataagaacgtagcccggagccttctgatggagcgtgatgccttgaagcccaactcgcccctgaccgagcggctcatccgcaaggcagctaccgtccacctcatgcagtgagccagcctggccgcctccaccctgcagaacctcagtggtggcgtcactgcgtccagtcagctgctccaccgggttagggtcaggagacggccagagcctgtttgttagggctgttagagggtgatcttcagttttacaggaagtgggtcacgggttaattttaaatgtgattccgaatctcctttcagtcctcgagaagggccaatgagcatttttcagcagtcacagccagtgtgagtgctgctctttccacctgccttgcaaattctgtttcccaggggaatgtgtctactgcctggtggttcaaaggttggaaggcagggcagaggtgggggctgattctgctgggacaggtcttccagaggcagcctccccccactgcctgtccccgtccccaccaggctgcccttgggatggaccttttcattcttttctttatattctagacagtctctgttgtctcattgtgttgctgtcccatttttcaggtgagggtaccggggtaggggagtggcctgcccagggtcacactatgagaggcccccacctgctgcctttggacgcagccccctgctgctgcatccaccacccttcttacagatcagcgcgcacatggggtccttctgctgtctctggggcgagtcttggagccccctggggggctctgttggtgctgatttggacccgtttctctttttaaactgcacatcataacagggcttcatgtcgagcatgattttaatcataaatgcacttctgaggtgcaaggattgagctcagagctgctctgttgtggcaaaacccaaagtgctgtgatgtgtggctgtgacaagcctggagcgggtcctgtgagcgccgcctctgtctcctgcttccccactgaacgcctgctgaatgtgccgctgactcagctgtgctgctttcagccctcctgtgaggggcggtcccagtgcacagatgtttttcaagttcctcagtttgtactgaaattagggattcatcagggcaggaagcaggcaggcctctcagaagggagaggaggcctccaaatctattgagtccccacagtttgctcaagcccaggcaaatttctgtgattaaaatgaattcatcagttcctccaaaaaaaa

SEQ ID NO: 4521 - DNA, 2837 bp, Homo Sapiens
  NM_017933
gggagcggccgcccccgccgccgccgcgcgctcgccgggcccgggcggagctgcgcagtcctctcgcagctgcgccaggacagccggcgcgcggccgtgcccacaagttgccggcagctgagcgccgcgcctcctcctgctcgcagccccctacgcccacccggcggcggtggccagcgccaggacgcacatcccgcggacaccgaccccagatgtaaagcgggaccccagcccctcgccccccggcgcgatcgacagtctcgccagcgtctcctctgccaaaacccagggctggaagatgtggcagccggccacggagcgcctgcaggagagatttgcagacacagaagcggcacagagaaggccattgtgaagatcaaggcagaaaccggagttatggcatcataagccaaggaatgccaaggattgctggcaaccacctgatgttagaagagtcgaggacatgttcttctccagagcttttggatggtgtgtggccctgccaacctttacattttggacttccagcctccgaaatgcactttcagaccatgctgaagtctaaattgaatgtcttaacactgaaaaaggaacctctcccagcggtcatcttccatgagccggaggccattgagctgtgcacgaccacaccgctgatgaagacaaggactcacagtggctgcaaggttacctacctgggcaaagtctccaccactggcatgcagtttttgtcaggctgcacagaaaagccagtcattgagctctggaagaagcacacgctagcccgagaggatgtctttccggccaatgccctcctggaaatccggccattccaagtttggctccatcatctcgaccacaaaggggaggccacagtgcacatggataccttccaggtggcccgcatcgcctactgcaccgccgaccacaacgtgagccccaacatcttcgcctgggtctacagggagatcaatgatgacctgtcctaccagatggactgccacgccgtggagtgcgagagcaagctcgaggccaagaaactggcccacgccatgatggaggccttcaggaagactttccacagtatgaagagcgacgggcggatccacagcaacagctcctccgaagaggtttcccaggaattggaatccgatgatggctgaatgaacttgagacgcttcagcaaaggcagcattggtcacggagttcaagggaatagatgagtaagcaacgtttcaaatttgggatgaaaagactgccaaactattggctgaccaaggtttttaaattcagaagagcaattctaaatctaaagaaatgtatcattaaagtaattacgttacattgaaacctgctgctgctgtgactgtgaggagggtgggagtgtggatggggaggaaggttctaggctctcttatttttctcatttcccaatgcctctctgtgggagagctccatgccagttttcaccacgctcaggcaaatactctgcagctgttattggatgggccattccgatctgccttatgaaattccacaagaatgttaggggcacctatgggatctctagtggggtgggcagggtgctgatggggacgctggccgcagggaggaaggaacatctcgggagggccctctgttcctctcccacggcagatgccctcctctgtatgcaaatcagcacagcctttattgagctttacaactaacaacctgatagttggcagttaattcacagttacagataatgcttttatttacataaatataccaagtagtaccctcttattgtattcacttcatctattttcttagaatacttgcaattactaatgaccccttccctttccctcctgctgccctgtccaccctctttccccttctaacatccttagagggatgaaatctcagcatatgttgcaggacaccaaaaggaagaaaacaatcaagcaaataaaataaacagtcaaacaaaccaggagtttaaaacaacaaccccaacaacagaagccttggcaaagaggaataagtgatcagcaagtgaacacactctatgtcaactctccttttatccagctgagatttatggtaacttatttaattaatggtcctgtctgatgcatccttgatggcaagcttcaaatctgatttggtatcaccgaggaaaccttgcccccatcactcagcattgcacttagatacagaatgagttagataaacttggcttgtctagagacccatgtcatcttaacctaaagggaaatcttattgcgttatcataaaattgatgatatcttagggtcagaattgccctttttttttattttgaatgggaagttctcactaaaacaatcctgagatttcttaatttcatggttctttaaatattataaacacagagtcaacatagaatgaaattgtatttgttaaaatacacacattggaggacaagagcagatgactacttttcgaagtaatgctgctccttcctaaaagtctgttttcaatcctggtaatattaggggcactgcggcacctaagaagccttaaatgagagctaatccaatctagagagcgatggtgtcagcatttcggtctgcatatctgtgtgtccgtatctgcgtttgtgtgcgtgtacgtgtgcccctgtgtgtgggcccagttttcaggcatgtagaataagcatggagtcatattgaggaggactcacttcttgaagatatgcttgttgctttacaacatatgtaagctattctttagcataaatgcattcattctttaataaaaatatgtttgcattaataaagctgaggagtttcataaaaaaaaaaaaaaaa

SEQ ID NO: 4522 - DNA, 3923 bp, Homo Sapiens
  NM_017936
ctcctccgctccctgcgctcccgccacctcggcaactccgcgcccgcctcccgcctctgtcggaagcctccgccgcagtaaggctcccggtctcgctgctgtctctttaaatggtggggctacgagccgcccctgcagctgctcccgggcggcacgatgaccgacacccggcggcgggtgaaggtgtacacgctcaacgaggaccggcagtgggacgaccggggcaccgggcatgtgtcgtctggctacgtggagcggctgaagggcatgtccctgcttgtcagggctgagagcgacggttctctacttttagagtcgaaaataaatcctaacactgcataccagaaacaacaggacactctgattgtgtggtctgaagcagaaaattatgacttggcccttagctttcaagaaaaagctggatgtgatgaaatttgggagaaaatatgtcaggttcaaggaaaggacccttccgtggacatcactcaggaccttgtggatgaatctgaagaggagcgttttgatgatatgtcatcgccaggcttagaattgccatcttgtgaattaagtcgccttgaagaaattgcagaacttgtggcatcatctttaccttcacctcttcgtcgtgaaaaacttgcactggcactagaaaatgagggttatattaaaaagctcctggagctttttcatgtgtgtgaagatttggaaaatattgaaggactgcaccacttgtatgaaattatcaaaggcatctttctcttgaatcgaactgctctttttgaagttatgttctctgaagaatgtataatggacgtcattggatgtttagaatatgatcctgctttatcacaaccacgaaaacacagggaatttctaacaaaaacagccaagtttaaagaagtgattcccatatcagatcctgagctgaaacaaaaaattcatcagacatacagagttcagtatatacaagatatggttctaccaactccttcggtctttgaagaaaacatgttatcaacacttcactcttttatctttttcaataaggtagagattgttggcatgttgcaggaagatgaaaaatttctgacagatttgtttgcacaactaacagatgaagcaacagatgaggaaaaaagacaggaattggttaactttttaaaagaattttgtgcgttttcccaaacgctacagcctcaaaacagagatgcttttttcaagactttgtcaaacatgggcatattaccagctttagaagtcatccttggcatggatgatacacaggtgcgaagtgctgctactgatatattctcatacttggttgaatataatccatccatggtacgagagtttgtcatgcaggaggcacaacagaatgatgatgatattttgctcatcaacctcattatagaacatatgatttgtgatacagatcctgaacttggaggagcagtccagcttatgggcctgcttcgaactttagttgacccagagaacatgctagccactgccaataaaacagaaaagactgaatttctgggtttcttctacaagcactgtatgcatgttctcactgctcctttactagcaaatacaacagaagacaaacctagtaaagatgattttcagactgcccaactattggcacttgtattggaattgttaacattttgtgtggagcaccatacctaccacataaagaactacattattaataaggatatcctccggagagtgctagttcttatggcctcgaagcatgctttcttggcattataaaccgtgtcagcatggttgcctggctacctgctcatgagggacttgattaatagcaaattggcaatttaacgagccacttccatgatctccaaagaaaccaaaatacaaacacaatatttaatcttgccaaccgaagacgatgtgactgcatgaagtgcccttcgttttaaaagaaagattattggattaaaagatgagttttacaaccgctacataatgaaaagttttttgtttgaaccagtagtgaaagcatttctcaacaatggatcccgctacaatctgatgaactctgccataatagagatgtttgaatttattagagtggaagatataaaatcattaactgctcatgtaattgaaaattactggaaagcactggaagatgtagattatgtacagacatttaaaggattaaaactgagatttgaacaacaaagagaaaggcaagataatcccaaacttgacagtatgcgttccattttgaggaatcacagatatcgaagagatgccagaacactagaagatgaagaagagatgtggtttaacacagatgaagatgacatggaagatggagaagctgtagtgtctccatctgacaaaactaaaaatgatgatgatattatggatccaataagtaaattcatggaaaggaagaaattaaaagaaagtgaggaaaaggaagtgcttctgaaaacaaacctttctggacggcagagcccaagtttcaagctttccctgtccagtggaacgaagactaacctcaccagccagtcatctacaacaaatctgcctggttctccgggatcacctggatccccaggatctccaggctctcctggatccgtacctaaaaatacatctcagacggcagctattactacaaagggaggcctcgtgggtctggtagattatcctgatgatgatgaagatgatgatgaggatgaagataaggaagatacgttaccattgtcaaagaaagcaaaatttgattcataataatggcaacggcctaggatcagtacctgttgaaaaaaactggttctccacccctcccccatacaaaatccacaacaaagcgcagtggtctcttgtgaatgactgacacagatcagcctcttacacttgacttctgctcatcaagtgccaattcaatggagcaggaggaggggatatcatatatttaggggaaagacttaagcctttgagctctccagcttggaccacacattgcccttttctcagggaaggaaatggaaacaaaaagccaacagggcaggggttttgtaagtggaactctggattgactggtcagttgctacaatcagaatatgctttcttggaccatgtttgagactcagaagaatgggcctttctgccataattcttcactagtcaagaatgccagcagtttctttgtataaagagacctgcctttaaaatcatacattctgaacattttagtcaagctacaacaggtttggaaaacctctgtgggggaggggcgagtataaagttttcctcttttttaactgttccctttgcccttcaaactgcagatatttttttttttaagtggggacttctccctacttgattaaagattgagtggaattctagatgtggtcatttgtgtcataatttttttgttttattttgtttttgattttttttttcctcccctgagtgtatgcttagttgttgagtatatatatttgggaccattaaaactttttttgatgtaatataacctaacgttgtgctggtacctgttttaccatgtgtaatttttgttctacatcacagttcttaatttgtttagagttttatgaaagatggtatagtttttattgacaaaagcaaagtaatcttacaactatgtgcatacaaaagcaatactattttgtgactaaatattttatattaaaatttacatcagcaactgtcttgagaattcagggaaatagaatggaatttaaaacttcaacagttttgttaaatctagaaacatgaaattagtattccaaagagattctgaaatttcttttcttggggaaatgacggtacattaaatcaaaattgaggatggatgatttaaaaacatttgacttttgaataataaaaagaaaagtgaagagtaagagaaa

SEQ ID NO: 4523 - DNA, 2658 bp, Homo Sapiens
  NM_017939
gcgcacggcttgcccatgtgtgctgcagccgtcagccggcccagctgagcagcagcaacggaccttgttaacggcgcggcagcctccaccgcctgctgttgccctcctctctcggtggtctgtccgcccagcgcacgtcaccatgggcaagagccggacgaagcgcttcaagcgacctcagttctcccctacgggcgactgtcaggccgaggcggctgcggcggcgaatgggaccggaggcgaggaggacgacgggccggcggcggagctgctggaaaagaaatcccagtgcttgtggaggttttgaagtttgtgatgacatggtgactaaggatatcatgacccctctggttgcgctgctaaaagagtgtagtgctggactggattcaaatgagatgtctctgcaggagaaaaaagatcagaacagaaattctattgagaacatagccaatgagactgtgaacgtgctgtggaatatatgtgaatgcagtagtagagcagtgtctatattcaacaaagaagggtgtttggagattgtgttaaagtatttaagtaggttccctaccaatgttgacctggctatttcagtagcatattgtttgcagacagtgactgaggataacccagagctgctgaagtctttcagtgctacagcattgaacatgctggaatcagcactgctttctcccgtcagttccatggaatctcttctattgaagacattggtagcaggcacaatttggaatctaaaggacattattccatgcaagagtcaagcagaaatcataaatgccttactaaagatcttatctgaagttttgggaatggatgctggtgaaatggttattcaaatgaaagaggctgaaacgcaaaggttaaaaactgctgcagaggctgaggaaatattagagaacactaatggggatgatttgattgaagatgatgaaatggaaggaatttctcataaaagaagagtcagaaggaaaactttcgtttcagatttacttccgcccactgacaaggaactgagagagactatagcattgctgacagcccaacagactgctctggaaattattgtcaacatgtgctgcaatgaagatccctctgatgacgaatgggaagagctttctagcagtgatgaaagtgacgcatttatggagaattccttcagtgagtgcgggggacagctgttttctcccctctgcctctcccatgaagttcacacggctctcaccaactacctcatcccaaagaagatttttgagaaaactgcctttccaaacagcattgcagttgacctatgttctaggaaccctacttggaaacctttgattagaaaaatgaacactattcagtgcagagccctcttctgtctccagagtcttgtgtccctcctggatgtggagcacctgggaggagccgcagcccttcagacgcttgcacagcatctgtcacagctgcttttttctcaaccagattttgctaaacatgttgactttctagaagccataagtagtgctttgagggcccttttgcaaacaatggcctccaagaacatttcccagtgcatgactcctgatcagctgatgacattatgcaaagcaggcattcatagtagtaatgtcggggttagagtgaatgtcgttagcattttaggaatcactggcagcgtccttgccaaagaagatggtacacttgaaactcttaagaacattgggtgctttctgcttgaagttaccaccaaagatccttcccttgtggtagcaggagaagctttggatgccctctttgatgtttttgcagatggtaaagaagccgaaagagcctcgattcaaattaaattattatctgctctgaaagaattccagccggtctttaaaatgaagatacgtaaagaagggagaggtaactatagcacagatcagctgtgtgttcttgacaatgtgaaaatgaatttgcgaagatttattgcttatcaagaaactgttgagaaaagactgacttcttaaacaatccaaaaaagaaaccagttcttcccccaaagtattcaatgcttagaatactaaaaggttttctttgaatgtatatgtttctgaaagtcattttttaatgattacaggcgtgagccaccgtgcctggccagaaactcttttttaagcgatgagatctgtgtggcatttctagcgctctctaaattatgtctctggcatattttaatcactggaaactcaaagagtggaagagtggaagtgcgaaggaatctcaggtagctcttaactaattcgccagcagtgaagaaacttcaaccaatcatgttttccttgaattttgcaaagaaagaaaatccaaagcattgcttggatgttcttttaaggcattttatatcagttgaaccttaaactgaaatatgaagacaagctttataaactagttttttgatatgaagtatatcaattatgtttgccttttgtgaagaagtaaatgagttgaatttgtatttcacttactagattatactaatgagctaatggggtcattgccatcctccctactcatgactttgatgagttattgctgtaacatcacttcttgatttaatttgatatggaatcagaattgggagaaggtatttttaaataaacaactttttaatgg

SEQ ID NO: 4524 - DNA, 4568 bp, Homo Sapiens
  NM_017940
aggctgcccgagcttctgagcgagcgcggtgcttttgggaacgcgggacgggcgatctgcggcgccaggagctgggccgaggcgcggcggcgcggctgccggctgccctgtgaatgggaagttacgcgaagtccacccagcgtttctgaggcaatctgaaggcaaatcctgtttagacccaggcgaaggttcccggtgacccgggctctcaccagccaattgtcccttgccgtcctcctgagggtgcctggagcttaagcactgtgtgctcttggcctccacactggggatgccgctgactcccactgtccagggcttccagtggattctccgaggccctgatgtagaaacttccccattgggtgcaccaagagcagcctcacatggtgtgggctgacatcaagagctgccagatccaacagatggccaatctttcctaagctgctcaccttacaagaaaacgaatcgtactgctaagaattcaaacttcagcagtcatggggagccttggaaggagcccgaatcactgatggaattggacagtgcatggagatggttcagcaggacaaggtgtcattggaggacagtgtggagtgcagagagacatgctttgaaatgggattgatccagtcctccttccttcactaccacatgaatgctgggcagcccagggtcaacccaccgcaccctcaactcagacggttacctggcacgctggccacagtctacctcactcttatcagagtctgagctactggcagtgctttcagctctgagttcaggcacctcgaaccttgtttttgtggtgaaggaacctaaagtgctgtggggagtgatcacatttttcacaacatccctggctccacctcttctgccacaaacgtcagcatggtggtatcagccggcccttggtccagcgagaaggcagagacgaacattttagaaatcaacgagaaattgcgcccccagctggcagagaacaaacagcagttcagaaacctcaaagagaaatgttttgtaactcaactggccggcttcctggccaaccgacagaagaaatacaagtatgaagagtgtaaagacctcataaaatttatgctgaggaatgagcgacagttcaaggaggagaagcttgcagagcagctcaagcaagctgaggagctcaggcaatataaagtcctggttcactctcaggaacgggagctgacccagttaagggagaagttacgggaagggagagatgcctcccgctcattgaatcagcatctccaggccctcctcactccagatgagccagacaagtcccaggggcaggacctccaagaacagctggctgaggggtgtagactggcacagcaccttgtccaaaagctcagcccagaaaatgacgaagatgaggatgaagatgttcaagttgaggaggctgagaaagtactggaatcatctgcccccagggaggtgcagaaggctgaagaaagcaaagtccctgaggactcactggaggaatgtgccatcacttgttcaaatagccacggcccttgtgactccaaccagcctcacaagaacatcaacatcacatttgaggaagacaaagtcaactcaactctggttgtagacagagaatcctctcatgatgaatgtcaggatgctgtaaacattctcccagtccctggccccacctcttctgccacaaacgtcagcatggtggtatcagccggccctttgtccagcgagaaggcagagatgaacattctagaaatgaatgagaaattgcgcccccagctggcagagaagaaacagcagttcagaaacctcaaagagaaatgttttgtaactcaactggccggcttcctggccaaccagcagaacaaatacaaatatgaagagtgcgaagacctcataaaatctatgctgaggaatgagcgacagttcaaggaggagaagcttgcagagcagctcaagcaagctgaggagctcaggcaatataaagtcctggttcactctcaggaacgagagctgacccagttaagggagaagttacgggaagggagagatgcctcccgctcattgaatcagcatctccaggccctcctcactccggatgagccagacaagtcccaggggcaggacctccaagaacagctggctgaggggtgtagactggcacagcaccttgtccaaaagctcagcccagaaaatgacgaagatgaggatgaagatgttcaagttgaggaggctgagaaagtactggaatcatctgcccccagggaggtgcagaaggctgaagaaagcaaagtccctgaggactcactggaggaatgtgccatcacttgttcaaatagccacggcccttgtgactccaaccagcctcacaagaacatcaacatcacatttgaggaagacaaagtcaactcagctctggttgtagacagagaatcctctcatgatgaatgtcaggatgctgtaaacattctcccagtccctggccccacctcttctgccacaaacgtcagcatggtggtatcagccggccctttgtccagcgagaaggcagagatgaacattctagaaatgaatgagaaattgcgcccccagctggcagagaagaaacagcagttcagaaacctcaaagagaaatgttttgtaactcaactggcctgcttcctggccaaccagcagaacaaatacaaatatgaagagtgcaaagacctcataaaatctgtgctgaggaatgagcgacagttcaaggaggagaagcttgcagagcagctcaagcaagctgaggagctcaggcaatataaagtcctggttcactctcaggaacgggagctgacccagttaagggagaagttacgggaagggagagatgcctcccgctcattgaatcagcatctccaggccctcctcactccggatgagccagacaagtcccaggggcaggacctccaagaacagctggctgaggggtgtagactggcacagcaacttttccaaaagctcagcccagaaaatgacaatgatcacgatgaagatgttcaagttgaggtggctgagaaagtgcagaaatcgtctgcccccagggagatgcagaaggctgaagaaaaggaagtccctgaggactcactggaggaatgtgccatcacttgttcaaatagccatggcccttatgactccaaccagccacataggaaaaccaaaatcacatttgaggaagacaaagtcgactcaactctcattggctcatcctctcatgttgaatgggaggatgctgtacacattatcccagaaaatgaaagtgatgatgaggaagaggaagaaaaagggccagtgtctcccaggaatctgcaggagtctgaagaggaggaagtcccccaggagtcctgggatgaaggttattcgactctctcaattcctcctgaaatgttggcctcgtaccagtcttacagcggcacatttcactcattagaggaacagcaagtctgcatggctgttgacataggcggacatcggtgggatcaagtgaaaaaggaggaccaagaggcaacaggtcccaggctcagcagggagctgctggatgagaaagggcctgaagtcttgcaggactcactggatagatgttattcaactccttcaggttatcttgaactgaccgactcatgccagccctacagaagtgccttttacatattggagcaacagcgtgttggctgggctcttgacatggatgaaattgaaaagtaccaagaagtggaagaagaccaagacccatcatgccccaggctcagcagggagctgctggatgagaaagagcctgaagtcttgcaggactccctggatagatgttattcgactccttcaggttatcttgaactgcctgacttaggccagccctacagaagtgctgtttactcattggaggaacagtaccttggcttggctcttgacgtggacagaattaaaaaggaccaggaagaggaagaagaccaaggcccaccatgccccaggctcagcagggagctgctggaggcagtagagcctgaagtcttgcaggactcactggatagatgttattcaactccttccagttgtcttgaacagcctgactcctgcctgccctatggaagttccttttatgcattggaggaaaaacatgttggcttttctcttgacgtgggagaaattgaaaagaaggggaaggggaagaaaagaaggggaagaagatcaacgaagaaaagaaggagaaggggaagaaaagaaggggaagaagatcaaaacccaccatgccccaggctcagcggcatgctgatggaagtggaagagcctgaagtcttgcaggactcactggatagatgttattcgactccgtcaatgtactttgaactacctgactcattccagcactacagaagtgtgttttactcatttgaggaacagcacatcagcttcgcccttgacgtggacaataggtttcttactttgatgggaacaagtctccacctggtcttccagatgggagtcatattcccacagtaagcagcccttactaagccgagagatgtggatccgca

SEQ ID NO: 4525 - DNA, 3468 bp, Homo Sapiens
  NM_017943
ggatccgtggcccctcccccggccaaccgtcgattgggccggcgcgtgacgtcactccgttttagccaaacaaatgggtttcggggcgagcgttgggcgccgccgcgccgcgctgggtgctcggtccgactcagcggtggggagtgagccaggcctcccgccaccgctgctgccgccaccactgcgtcgggctggtgcagccccgggccaggccgcggccggggcaggagcgcaggggctttgttatgcacctaaagccatattggaagctccagaagaaagagcaccccccggaagtcagcagggaaacgcagagaactcctatgaaccaccaaaaggctgtaaatgatgaaacatgcaaagctagccacataacatcaagtgtctttccttcagcctctctcggtaaagcatcatctcgaaagccatttgggatcctttctccaaatgttctgtgcagtatgagtgggaagagtcctgtagagagcagcttgaatgttaaaaccaaaaagaatgcaccatctgcaacgatccaccagggcgaagaagaaggaccacttgatatctgggctgttgtgaaacctggaaataccaaggaaaaaattgcattctttgcatcccaccagtgtagtaacaggataggatctatgaaaataaaaagttcctgggatattgatgggagagctactaagagaaggaaaaaatcaggggatcttaaaaaagccaaggtacaggtggaaaggatgagggaggttaacagcaggtgctaccaacctgagccttttgcatgtggcattgagcactgttctgtgcactatgtgagtgacagtggggatggagtctatgctgggaggcctctgtcagttatacagatggttgccttcttggagcaaagagccagtgctctgctagctagctgttcaaaaaactgcacaaactcacctgcaattgtgaggttttctggccaatccagaggtgtgcctgcagtgtctgagtcctattctgccccaggagcttgtgaagaacccacagaaaggggaaatcttgaggttggtgaaccacagagcgaaccagtccgtgtccttgacatggtagccaagttggagtctgagtgcctgaagcggcagggccagcgtgagcctgggagcctctcaaggaataacagcttccgtcgaaatgtgggcagagtattgcttgcaaatagcactcaggctgatgaaggcaaaacaaagaaaggcgtcttggaggcacctgacactcaggtgaatcctgtggggtctgtatctgtggattgtggcccttcaagagctgatcgttgttctcctaaggaggaccaggcctgggacggtgcttctcaggactgccccccattgccagcaggagtgagtttccacatagacagtgcagagttagagccgggttcgcaaactgccgtgaaaaacagcaacagatatgatgtggaaatgacagatgaactcgttgggttacctttttcctctcatacctattcccaagcctctgaattgcccacagatgctgttgattgtatgagcagagagcttgtgtcccttactagccgaaatcctgatcaaagaaaagaatctttgtgcattagtatcactgtgtccaaggtagacaaagaccagccttccattttaaactcctgtgaagacccagttccagggatgttgttttttttgccacctggtcagcacttgtcagactattcccagttgaatgaaagcacaacaaaagagtcttcagaggccagccagcttgaagatgctgctgggggtgacagtgcatctgaggaaaaaagtgggtctgctgagccatttgtactgccagcctcttctgtggaaagtacattaccagtgcttgaggcatccagttggaagaagcaggtgtcgcatgacttcctggagaccaggtttaaaatccagcagcttttggagcctcagcagtacatggcttttctgccccaccacattatggtaaaaatcttcaggttacttcccaccaagagtttagtggcccttaaatgtacctgctgctatttcaagtttatcattgagtactacaatatcaggccagcagattctcgctgggttcgagatccacgctatagagaggatccttgcaaacagtgcaagaaaaagtatgtgaaaggggatgtgtccctgtgccgatggcaccccaagccctattgccaggcattgccctatgggccagggtattggatgtgctgccaccggtctcagaaaggattccctggctgtaagctggggcttcatgacaatcactgggttcctgcctgccacagctttaatcgggcaatccataagaaagcaaaagggactgaagctgaagaggaatactaaagtccatgtgagaggcaacaaaaggaccggtttctaaagctgcaaaacacctagatacaccgttcaaatgagcgtagccccctgagtcatcactctagaagaatctgtacatcatcaggactgcattgctcaggcattttctaaactctaaatttacgagctgtacaaaaaaattggtcttgttgtttatagtggcatctcatgtttgaacccgggtggtatcccacagttggattcagttggctgtgaataactgcctgttttcctaaatcaaacccatcctcaaaggatgaagactcaccaccatccaggacattcagaagagttcactgcagatgctgcaggtagtcctcaaaaatgggttccagaaatgttttgagcactggcaacatatttgaaataagtgaatattgtcctgtgaaaagaatagcaggacttttagatgaaaagtattcttaaaaagaaaagtcaggcaccccaccttagacctcgtatgcttgatcctgtgagattgatgtttgtggctggaggtggatttcatgccctgtggtgtttacagtgtatataatggttgtgttttcatggggctatgaaagtgcacgttaaacctgagcgcctttacctttagatgagtgctttggcccctctgtgaatagcacgattaaaatccagttgtatataatggacagctaacggaacaatataatcaccacaatgcagctaggatagtgttgcggctataattttgtgttttttttttttaattgtctagtcttaaatttgtacatcttgtataaaatatgaatgtttcccaaataaactatgaatgtttcctgtataatatatgaatgtttctgagaagaaactctaaatagttgaaaggctaacctgctcaaaggataccaaataatggtttaactggacaacctgaaaattagcatagaaaacaatcctttgttatattttagtgatccacaagattgagaaaatattatatagttagataataacattcttgtctactttatcctgtctggttacaaaattttttaaaacttaaataaaaacatgcatcttaaatggaaaa

SEQ ID NO: 4526 - DNA, 7777 bp, Homo Sapiens
  NM_017944
agaggggaaaagaacgtcaggagagtgaacgggagcaaataaaacgctgtccattctgactggaagggccagagccgtgtctaagggcgggggccgggaggtggcccgcggtggtgtctctaccaggacgaggcctggggtatctgaagaggggatgacgtccaggcgctttgctaaagggaagccagaagggtatgagttgctagggtcagagatggggctttcggctcgagtctttccctgcagggcagagagtccgaagagcccgagaaggcagggaggacagtgggcctggtccttccccggccggcagagggagtcccgagatggaacgtccagctctcctctaacgaaaagcgtttgcatggctgtctcgccaattctgtacctcccggggctgaggaagagccgaggtgactagaagctagcgacaagtgccggccacctccgacgccaggcgccgggcttggagcccgacgggccgaattctcgcgagagcggccgccgccatttttccattgattgcagcgggctgggggaggggccgacgacgaaggcggctgtggtagcggcggcggcggcggcggagccctgggtcggtgtctgcgcgctggtgtctgaggcccaggctgaggcctccgctattgctggagcgcaggcggcggagaggatgactgccgctgccattctctcttgagctagcgagccgccgccaccctccaccctcccccggcagggcggagaggagcggccggagtcagcgatggtgcccggcgaggagaaccaactggtcccgaaagaggcaccactggatcataccagtgacaagtcacttctcgacgctaattttgagccaggaaagaagaactttctgcatttgacagataaagatggtgaacaacctcaaatactgctggaggattccagtgctggggaagacagtgttcatgacaggtttataggtccgcttccaagagaaggttctgggggttctaccagtgattatgtcagccaaagctactcctactcatctattttgaataaatcagaaactggatatgtgggactagtaaaccaagcaatgacttgctatttgaatagccttttgcaaacactttttatgactcctgaatttaggaatgcattatataagtgggaatttgaagaatctgaagaagatccagtgacaagtattccataccaacttcaaaggctttttgttttgttacaaaccagcaaaaagagagcaattgaaaccacagatgttacaaggagctttggatgggatagtagtgaggcttggcagcagcatgatgtacaagaactatgcagagtcatgtttgatgctttggaacagaaatggaagcaaacagaacaggctgatcttataaatgagctatatcaaggcaagctgaaggactacgtgagatgtctggaatgtggttatgagggctggcgaatcgacacatatcttgatattccattggtcatccgaccttatgggtccagccaagcatttgctagtgtggaagaagcattgcatgcatttattcagccagagattctggatggcccaaatcagtatttttgtgaacgttgtaagaagaagtgtgatgcacggaagggccttcggtttttgcattttccttatctgctgaccttacagctgaaaagattcgattttgattatacaaccatgcataggattaaactgaatgatcgaatgacatttcccgaggaactagatatgagtacttttattgatgttgaagatgagaaatctcctcagactgaaagttgcactgacagtggagcagaaaatgaaggtagttgtcacagtgatcagatgagcaacgatttctccaatgatgatggtgttgatgaaggaatctgtcttgaaaccaatagtggaactgaaaagatctcaaaatctggacttgaaaagaattccttgatctatgaacttttctctgttatggttcattctgggagcgctgctggtggtcattattatgcatgtataaagtcattcagtgatgagcagtggtacagcttcaatgatcaacatgtcagcaggataacacaagaggacattaagaaaacacatggtggatcttcaggaagcagaggatattattctagtgctttcgcaagttccacaaatgcatatatgctgatctatagactgaaggatccagccagaaatgcaaaatttctagaagtggatgaatacccagaacatattaaaaacttggtgcagaaagagagagagttggaagaacaagaaaagagacaacgagaaattgagcgcaatacatgcaagataaaattattctgtttgcatcctacaaaacaagtaatgatggaaaataaattggaggttcataaggataagacattaaaggaagcagtagaaatggcttataagatgatggatttagaagaggtaatacccctggattgctgtcgccttgttaaatatgatgagtttcatgattatctagaacggtcatatgaaggagaagaagatacaccaatggggcttctactaggtggcgtcaagtcaacatatatgtttgatctgctgttggagacgagaaagcctgatcaggttttccaatcttataaacctggagaagtgatggtgaaagttcatgttgttgatctaaaggcagaatctgtagctgctcctataactgttcgtgcttacttaaatcagacagttacagaattcaaacaactgatttcaaaggccatccatttacctgctgaaacaatgagaatagtgctggaacgctgctacaatgatttgcgtcttctcagtgtctccagtaaaaccctgaaagctgaaggattttttagaagtaacaaggtgtttgttgaaagctccgagactttggattaccagatggcctttgcagactctcatttatggaaactcctggatcggcatgcaaatacaatcagattatttgttttgctacctgaacaatccccagtatcttattccaaaaggacagcataccagaaagctggaggcgattctggtaatgtggatgatgactgtgaaagagtcaaaggacctgtaggaagcctaaagtctgtggaagctattctagaagaaagcactgaaaaactcaaaagcttgtcactgcagcaacagcaggatggagataatggggacagcagcaaaagtactgagacaagtgactttgaaaacatcgaatcacctctcaatgagagggactcttcagcatcagtggataatagagaacttgaacagcatattcagacttctgatccagaaaattttcagtctgaagaacgatcagactcagatgtgaataatgacaggagtacaagttcagtggacagtgatattcttagctccagtcatagcagtgatactttgtgcaatgcagacaatgctcagatccctttggctaatggacttgactctcacagtatcacaagtagtagaagaacgaaagcaaatgaagggaaaaaagaaacatgggatacagcagaagaagactctggaactgatagtgaatatgatgagagtggcaagagtaggggagaaatgcagtacatgtatttcaaagctgaaccttatgctgcagatgaaggttctggggaaggacataaatggttgatggtgcatgttgataaaagaattactctggcagctttcaaacaacatttagagccctttgttggagttttgtcctctcacttcaaggtctttcgagtgtatgccagcaatcaagagtttgagagcgtccggctgaatgagacactttcatcattttctgatgacaataagattacaattagactggggagagcacttaaaaaaggagaatacagagttaaagtataccagcttttggtcaatgaacaagagccatgcaagtttctgctagatgctgtgtttgctaaaggaatgactgtacggcaatcaaaagaggaattaattcctcagctcagggagcaatgtggtttagagctcagtattgacaggtttcgtctaaggaaaaaaacatggaagaatcctggcactgtctttttggattatcatatttatgaagaagatattaatatttccagcaactgggaggttttccttgaagttcttgatggggtagagaagatgaagtccatgtcacagcttgcagttttgtcaagacggtggaagccttcagagatgaagttggatcccttccaggaggttgtattggaaagcagtagtgtggacgaattgcgagagaagcttagtgaaatcagtgggattcctttggatgatattgaatttgctaagggtagaggaacatttccctgtgatatttctgtccttgatattcatcaggatttagactggaatcctaaagtttctaccctgaatgtctggcctctttatatctgtgatgatggtgcggtcatattttatagggataaaacagaagaattaatggaattgacagatgagcaaagaaatgaactgatgaaaaaagaaagcagtcgactccagaagactggacatcgtgtaacatactcacctcgtaaagagaaagcactaaaaatatatctggatggagcaccaaataaagatctgactcaagactgactctgatagtgtagcattttccctgggggagttttggttttaattagatggttcactaccactgggtagtgccattttggccggacatggttggggtaacccagtgacaccagcactgattggactgccctacaccaatcagaagctcagtgcccaatgggccactgttttgactcggaatcatgttgtgcactatagtcaaatgtactgtaaagtgaaaagggatgtgcaaaaaaataaaaaaaaacaacaaaaaaagctaaccttctattagaaaaggggacaggggaatgagtaaacttcttttattgcggacaaatgtgcacatagccgctagtaaaactagcctcaaacaggatgctcatagcttaataataaaagctgtgcaaaggccatgaatgaatgaattttctgtttatttcactgatgcacacattacctcattgacaattcagaagtaaatccaacgtgtgttgactcttggaaagcagcaaaaacaggagctgaagaaaagaaattcttggaaccagccgtaacccagtaaggaattgtgaagttgtgtttttattttgtttcattttttgcagagtattaagaacattattctggaacatcagaacgtttcccttagaccgatcccagcaggtggcagctcagattgctgcagtgttgtaattataactgattgtacttaagttatggatgtagagaatatgtttcattcatttattcagcatgtaaataaaattgatcctgttgagttatcataattgcagttcaactatctgccatgattattcttttcacgtatcattcattctgtacatttgtgtacattgagaagtatagcaatctatgtaaatgtaatcctcagtgaggttcctcagtgctaggtcccataggattgtcgttgcccttgttaatgaggtttctctgttcagcggcttcaatttttttctctttgtacatctagttttgaagatttacttcaagtttgaatcttctagaatgcttgtaagtccagttttaatttttagagtcaatttgtagttacatgtagtttaacttttgggaaacgtcttaacattgttctgaataaacttgctaatgaggtcaggtcatggtacagactgatgcagtcaacatgatttcattgcagagtttattagtatcagcaagtttttgctttgctaaataaaagtactcaatgaacacaattctacataaattttgacataccatctaatttataaaaatcaataaaaaaggttttggtaaaactttttcatgccagatgctgtttacaacaatgaacatgccaataaaacatttgttcattctgttgtgttattttagtcattaaacttctgtggatgaagaatctgggttaagaatagatttgtcatctttaaatatgacattttgtaatgtgtattggatatctcatttctatgataaaggtatatttacagtaaagttctcataagagaaatgaaaagctgtgttaatatctaactttggggaaccctgtcagtatttcagatccgatttttaccctttttttcttataagaaagataaaattagaaaatactgttagcaaatgtggctctgccatttgaatataatcaccgagaattccatgtcttaaaagtctcctggaatccacaatgaaaaaaaaaatcttttctaaggtatttttctggctaatttttatttgaagaaagctatagcatttagcgaaatttgactgaagtaatgttctgagtttgcattagtgggattggtgatgttctcagaagaaaattggaaacacttgtgatgaattgtctttcagatcacttagattttctgatgtaagaggacagctgtttggttctgatacaggcctgcttacttgggatgtagggttagtaaatggggtttctgctttaaaggactgacttgctatcacacaaaagaggcagacttgtaaacacaatgggctttggagtttggtctgattgggtttggtttagtattcctatgagcgtaaatggtaaaattcttctgatacccactctttagactgtgccttctgctctgttctttgttttatgtttaactgctgtttctaattgcaggtgtattacagatacaaataagagtaaagaaaatatatttcattatagaaaagaaaaaattaaaagcttcttgcttttcagtgcctgatagagtgaaaacacaaagttgcactttaataatttcaataaaagctaatctgtgtcagcctccctctgcttcagagagtcaggtgagcatccataacctaacaggcagagccctagcgatgtggatcaagtttcctgagcccgggggcggtggagcctcatgatctcttatcttttgaggctgaggcaggtcacatgcaacaaattgtgaccctgctccccacaagtcatgcaaaggttttgaagagcttttaccgtggggcagatgaacttgtgtcaaccatgcacaccctgtgagaaccaagtacctgtgtttctaaggcgggcactcaaggtgaggggtgcattctggccaaagaaacaaaagctgtggtttcaggaccatgccgtgtgtagctgatctgtacgggacgtgtatgtaaggaagagcaatcatgatagataagaacagtgtgtgaagcagccttcacactagagtgtttggtcatctcttataatgtaagggaaggtactttaaaattctgggaagatgcgatgaactcatgtcccagtcagaaaataatccaatgaaataagcattggttgccaggccacagttaggaattgtattgtgatacatctagaggccaagagagcaggagagagctaccaacttacactgtggtttaagctaaatgaccgcacagcatcatagcattgcagtgttgttactaaatctggaagtgacctgtgaatgtatggaatacaataaagtcttttattctggttcatttgctagtacttcctttttgattggatactgtagttcttcctctggattttattttgttcagcgtcaaggccctaattttgcaaatgtagtctaaaccacattacgtggactagaggatactctgaattagcaagttttttgtttgctgaataaaactattccatcttaa

SEQ ID NO: 4527 - DNA, 2958 bp, Homo Sapiens
  NM_017945
gaacgtgcctgcgcaatgggtgtcgggtccgctttttcccaatccggacgtaatcgtggtttttgttctgcaataggcggcttagagggaggggctttttcgcctatacctactgtagcttctccacgtatggaccctaaaggctactgctgctactacggggctagacagttactgtctcagctctaggatgtgcgttcttccactagaagctcttctgagggaggtaattaaaaaacagtggaatggaaaaacagtgctgtagtcatcctgtaatatgctccttgtcaacaatgtatacattcctgctaggtgccatattcattgctttaagctcaagtcgcatcttactagtgaagtattctgccaatgaagaaaacaagtatgattatcttccaactactgtgaatgtgtgctcagaactggtgaagctagttttctgtgtgcttgtgtcattctgtgttataaagaaagatcatcaaagtagaaatttgaaatatgcttcctggaaggaattctctgatttcatgaagtggtccattcctgcctttctttatttcctggataacttgattgtcttctatgtcctgtcctatcttcaaccagccatggctgttatcttctcaaattttagcattataacaacagctcttctattcaggatagtgctgaagaggcgtctaaactggatccagtgggcttccctcctgactttatttttgtctattgtggccttgactgccgggactaaaactttacagcacaacttggcaggacgtggatttcatcacgatgcctttttcagcccttccaattcctgccttcttttcagaagtgagtgtcccagaaaagacaattgtacagcaaaggaatggacttttcctgaagctaaatggaacaccacagccagagttttcagtcacatccgtcttggcatgggccatgttcttattatagtccagtgttttatttcttcaatggctaatatctataatgaaaagatactgaaggaggggaaccagctcactgaaagcatcttcatacagaacagcaaactctatttctttggcattctgtttaatgggctgactctgggccttcagaggagtaaccgtgatcagattaagaactgtggatttttttatggccacagtgcattttcagtagcccttatttttgtaactgcattccagggcctttcagtggctttcattctgaagttcctggataacatgttccatgtcttgatggcccaggttaccactgtcattatcacaacagtgtctgtcctggtctttgacttcaggccctccctggaatttttcttggaagccccatcagtccttctctctatatttatttataatgccagcaagcctcaagttccggaatacgcacctaggcaagaaaggatccgagatctaagtggcaatctttgggagcgttccagtggggatggagaagaactagaaagacttaccaaacccaagagtgatgagtcagatgaagatactttctaactggtacccacatagtttgcagctctcttgaaccttattttcacattttcagtgtttgtaatatttatcttttcactttgataaaccagaaatgtttctaaatcctaatattctttgcatatatctagctactccctaaatggttccatccaaggcttagagtacccaaaggctaagaaattctaaagaactgatacaggagtaacaatatgaagaattcattaatatctcagtacttgataaatcagaaagttatatgtgcagattattttccttggccttcaagcttccaaaaaacttgtaataatcatgttagctatagcttgtatatacacatagagatcaatttgccaaatattcacaatcatgtagttctagtttacatgccaaagtcttccctttttaacattataaaagctaggttgtctcttgaattttgaggccctagagatagtcattttgcaagtaaagagcaacgggaccctttctaaaaacgttggttgaaggacctaaatacctggccataccatagatttgggatgatgtagtctgtgctaaatattttgctgaagaagcagtttctcagacacaacatctcagaattttaatttttagaaattcatgggaaattggatttttgtaataatcttttgatgttttaaacattggttccctagtcaccatagttaccacttgtattttaagtcatttaaacaagccacggtggggcttttttctcctcagtttgaggagaaaaatcttgatgtcattactcctgaattattacattttggagaataagagggcattttattttattagttactaattcaagctgtgactattgtatatctttccaagagttgaaatgctggcttcagaatcataccagattgtcagtgaagctgatgcctaggaacttttaaagggatcctttcaaaaggatcacttagcaaacacatgttgacttttaactgatgtatgaatattaatactctaaaaatagaaagaccagtaatatataagtcactttacagtgctacttcacacttaaaagtgcatggtatttttcatggtattttgcatgcagccagttaactctcgtagatagagaagtcaggtgatagatgatattaaaaattagcaaacaaaagtgacttgctcagggtcatgcagctgggtgatgatagaagagtgggctttaactggcaggcctgtatgtttacagactaccatactgtaaatatgagctttatggtgtcattctcagaaacttatacatttctgctctcctttctcctaagtttcatgcagatgaatataaggtaatatactattatataattcatttgtgatatccacaataatatgactggcaagaattggtggaaatttgtaattaaaataattattaaacctaaaaaaaaaaaaaaaaaaa

SEQ ID NO: 4528 - DNA, 4336 bp, Homo Sapiens
  NM_017948
cttacgccgacctagtccaggaattggtacacacagcgatagtgttcaatagaaactaggggattttggtttaggctcttttgcagtcgttgagggggaggtgacggaggcgtcagggaaggtgggaggacggaaaaggaaattaaaagctcttgggaactgaattgtggtaacggaaccttaggaggctgggttggaaatcgagtaggaaggaagagaggatgctccgttgggacacgtgaccagaagttaggggctgcagcggcgctggctttaggtgaacgacgtgaaaattacttttcccactgaaacacacccaagtatatgcccagccttcatgaaagtgaacagagaaacgaagcgcctttatgtgggtggccttagccaggacatttctgaggcagacctacaaaatcagttcagcagatttggagaagtttcggatgtggagatcatcacacggaaagatgaccaaggaaacccacagaaagtttttgcatatatcaacatcagtgtagcagaagcggacctgaaaaaatgtatgtctgttttaaataaaacaaaatggaaaggtggaacattacaaattcaactagcaaaagaaagctttctgcacagattggcccaagagagagaagcagcaaaagctaagaaagaagaatcaacaacaggtaacgccaacttgttagaaaagacaggaggagtggatttccatatgaaagctgtgccagggacagaagtgccagggcataagaattgggttgtgagcaaatttggaagagtcttacctgttcttcaccttaaaaatcaacataaacgtaaaatcatcaaatatgatccctcaaaatactgccacaacctgaagaagataggggaggatttctcaaacaccattcctatatccagcctgacttgggaattagaaggagggaatgaccctatgagtaagaaacggcgaggagagttctctgactttcatggccctcccaagaagataataaaagtgcagaaggatgagagttccactgggtctctggccatgagtacaaggcccaggagggtaatagagagaccacccttaacacagcaacaggctgcacaaaaaagaacttgtgattccattactccttctaaatcatctcctgtacctgtttctgatactcagaaacttaaaaatctaccttttaagacttctggcttggaaactgccaagaagagaaacagcatttctgatgatgatactgattctgaagatgaattgagaatgatgattgcgaaagaggaaaacttacagagaactacacaaccctcaataaatgaatctgaaagtgatccttttgaagttgtaagggatgatttcaaatcaggcgttcacaaactgcattctttaataggtttaggtatcaaaaatcgtgtctcttgccatgatagtgatgatgatattatgagaaatgatcgtgagtatgactcaggagatacagatgaaattattgcgatgaaaaaaaatgttgctaaggtcaaaaacagtacagaattttcacaaatggaaaaatctacgaagaaaacttctttcaaaaatagagaaaactgtgagctttctgatcactgtattaaactacaaaaaagaaaaagcaatgtagagtcagccctcagtcatggattaaagtctcttaatcgtaaatctccctctcactccagtagcagtgaagatgctgattctgcatcagaattagctgactctgaaggaggtgaggagtataatgccatgatgaaaaactgccttcgtgtgaatctcactttagctgatttggaacaattggctggcagtgatctgaaggttccaaatgaagatactaagagtgatggaccagaaaccaccacccaatgcaagtttgacagaggctccaagagccccaagactcccactggcctccgcagaggccgacagtgtattcgtcctgcggagattgtggcttccctgttagaaggagaggagaacacctgtggcaaacagaaaccaaaggaaaacaatttaaagccaaaatttcaggctttcaagggagtaggctgtctatatgaaaaggagtcaatgaaaaaatccttgaaagacagtgttgcctctaacaataaagatcagaattccatgaaacatgaggatcccagtatcatatccatggaagatgggtccccatatgttaatggctcattaggtgaagtgactccatgccaacatgcaaagaaggcgaatggcccaaactatattcagcctcaaaaaagacagaccacttttgaaagccaggatcgcaaggcagtgtcccctagcagttctgaaaagagaagtaagaatcctatttctaggccattagaaggtaagaagtccttaagtcttagtgcaaagactcacaacataggctttgacaaagacagctgccatagtaccacaaagacagaagcttcacaggaagagcggtctgattcaagcggcctcacatctctcaagaaatcaccaaaggtctcatccaaggacactcgggaaatcaaaactgatttctcactttctattagtaattcgtcagatgtgagtgctaaagataagcatgctgaagacaatgagaagcgtttggcagccttggaagcgaggcaaaaagcaaaagaagtgcagaagaagctggtgcataatgctctggcaaatttggatggtcatccagaggataagccaacgcacatcatcttcggttctgacagtgaatgtgaaacagaggagacatcgactcaggagcagagccatccaggagaggaatgggtgaaagagtctatgggtaaaacatcagggaagctgtttgatagcagtgatgatgacgaatctgattctgaagatgacagtaataggttcaaaattaaacctcagtttgagggcagagctggacagaagctcatggatttacagtcgcactttggcaccgatgacagattccgcatggactctcgatttctagaaactgacagtgaagaggaacaggaagaggtaaatgaaaagaaaactgctgaggaagaagagcttgctgaagaaaaaaagaaagccctgaatgttgtacaaagtgttttgcaaatcaacttaagcaattctacaaacagaggatcagtagctgctaagaaatttaaggacatcatacattatgatccaacgaagcaagaccatgccacttacgaaagaaaaagagatgataagccaaaagaaagtaaagcaaaacgaaaaaagaaaagggaggaagctgagaaactacctgaggtgtctaaagaaatgtattataatattgctatggatctgaaagaaatattccaaactacaaaatataccagtgaaaaggaagagggcacaccctggaatgaggactgtggtaaagagaaacctgaggaaatccaggaccctgcagctctgaccagtgacgctgagcagcccagcgggttcacgttctctttttttgattcagacactaaagacataaaggaagagacctacagagttgaaacagtgaaacctggaaagattgtctggcaggaagaccctcgtttacaagacagcagttcagaagaggaagatgttactgaagaaacagatcacagaaactccagtcctggagaagcatcattacttgagaaagagaccactagatttttctttttctctaagaatgatgaacgacttcaaggttctgacttattctggagaggagtaggaagtaatatgagcaggaactcttgggaggccagaacaaccaacctgcgtatggattgtcgaaagaaacataaagacgcaaaaaggaaaatgaaaccaaaataataaatgtcagctggttttgatactgaatgtgaacaaggctcacctaaggaaactgacccagaaaacagttttagctgacaaagaagaaatttcagagtgaaggaattttaaaaatctggctgacggaatatcattctggttgccatctttttctgtggaactcctctgcatttcttcctaagtaattacttcaaaaattaaattcaacttcttataaaggaagaacaagatagtccttgaaaatactttttgtatataatctctttgccctctatcctgagtaactaatggacatcttctcatgcaaggtttatatgaagcctttttaaataaatgagtcaaagcacttgtattttccagcctaggctttgtgtgaattataggctatttgaaattttatttctgattatgtcaaatacaccttccattttgtcatttttgtttaaactgataaattacaagtcaacattgagttttaaaaaaaaaaaaaaaaaa

SEQ ID NO: 4529 - DNA, 6197 bp, Homo Sapiens
  NM_017953
agtcgcgtcaagcaggctattccgggtttgtggctgcttggctccacacgtgggccgccgtaggtattccgaccggtaattcctcctattggtgtgcagcagccacattgaaggatagagtggcagcagaggccaaggatcgtgagttgatggagtttgctgctgaaaatgaagggaagtctgggggaggtctccacagcgtagctgagggggtgcggctaagtccagagcctggcagggagggagtaagggacttagcaggggcggaggagttcggcggcggagaggaggggacagggctgacagggataaaggagataggggatggagaggaaggaagtggacaaaggccagaggaaataccgatggacctaacggtagtgaagcaggaaattatagactggccaggtacagaaggcaggttggctggccagtgggtagaacaggaggtggaggataggcctgaggtgaaggatgagaacgcaggcgtattggaggtgaagcaggagacggatagtagtttagtggtaaaagaagcgaaggtgggtgaaccagaggtaaaggaagagaaggtaaaggaagaggtaatggactggtcagaagtgaaggaagagaaggataacttggagataaaacaggaggagaagtttgttggtcaatgcataaaagaggaattgatgcatggagagtgtgtaaaagaagagaaggatttcctgaagaaagaaatcgtggatgatacaaaggtgaaagaagagcctccgataaatcacccggtgggctgcaagcggaaactggccatgtcaaggtgtgagacttgtggtacagaagaagcaaagtacagatgtccacgttgtatgcgatattcctgcagtttgccctgtgtaaagaaacacaaagcagaactgacatgtaatggagttcgagataaaactgcatacatttcaatacaacagtttactgaaatgaatctcctaagtgattatcgatttttggaagatgtggcaagaacagcggaccatatttctagagatgcttttttgaagagaccaataagcaataaatatatgtactttatgaaaaatcgtgcccggaggcaaggtattaacttaaaacttctacccaatggattcaccaagaggaaggagaattcaaccttttttgataagaaaaaacaacagttttgttggcatgtgaagctccagtttcctcaaagtcaagctgagtacatagaaaaaagagtaccagatgataaaactattaatgaaatcctaaaaccttacattgatcctgaaaagtctgatcctgtaattcgtcaaaggttgaaagcctacattcgctctcagactggggttcagattttaatgaagattgaatatatgcagcaaaatttagtaagatattatgaactagatccttataaaagtctcctagacaatttgaggaacaaagtgatcattgagtatccaacattacatgtggtattgaaaggatccaataatgacatgaaagttcttcaccaagtgaagagtgaatctaccaagaacgttggcaatgaaaattgagcattttttctggaagaagaaagtgaaaacttccagacaactgcagcagactctgcattgatgggctgttggctgattggggtattgtcaatgggtgattggaattttttctttgtatgaaaaataagcttaactcttttaaaaaatgtattttataacctcttgaattaattgacttgtaagacccatttattcatattaagaactctcctttgcacttgatcagcatagtacttattaggccctggctttttaatatgcttaattgcttaattccataaactgaaaactttttttttcttttttctttctttttttgagatggggtcttggagtgcaagtggtatgagcatagcttcctcaaattcctgggctcgaatggtcctctcactgcagcctcccaacaggctggtaccaccacactcagctaagttttttgttgttgtttttttttggtagagacagggttgcgctctttcgcccaggctggtctcaaatttgtggcctcaagcaatccttccacctcagactccaaagcattgggattacaggcatcagccaccacacctggccttgaacattttttatttgttaatttcatgcgtgacgaaacccaaggatcacccatgtcaaccacaaagttggcattccctttagtagaacctcactaaacggaaaggctgtacaacgcaccgtctagccacaggagaactaatcttctatcagttgccctttcttctttggagtttttatgtaacttacccttgtgagacaagttttctacttgagaaactcctagtacaatgtcttatactagaagcctggataaatactattaactactgtttcttatattcacttcagaaaatcagtggctccacattgtttgagccattagtgataacaaatttggatctacttactcaagtcttatgaattctgtgcctttcatcacattcctagcccactctcatcattactgcagaagggtgttgtgatgaccagttttatactgtgttttgatatgtctagcaataacttaaagaaaaaaaaacctgggaaatcttcaacatgttattggaacatatatgtatgtattaatgtatatacatggcttaacttatacgttatggcagctctgtatacagtttgatctcatgtactgaaaaaaaattcttaattttattggagtttataccactgtgaaactgcaatatgactgtaagagagtaaaaagattgttacatctatattgtatgtgtgtacttaatggttaaaaagcaatgataaaactggacattaatgaaattgatttttagttacagttggaataagttttttaccaaaaagaaaccagagacgttagttaaggagacttaaaaagatctgaaatatgaaaagagaatgagaagatgagcagaagataaatttgtgggacacaagtataacttggggtagaaactggagaagagaatcgaaaaacaataatgccagaaggacccttggtatgaaagtactaatggaatgtgattcatagaaagttcatagaaagtgagtccttgcaacttgagaaacatacatacatatatatttataatctctaaagcaacatcaggaatcttctaatatatgataaagaatttgtgtagaattacgttgttcacagtattattggagagacaaataagatttcaaggaattcatttataatcaaaagtgaaatgtgtcttcttgaaaccagcaagaaatagatgaattgagtgaaacgtgttgttattaggagaagtgggataacgtatacaaaaagaacttgcgatctgaatatgatctgaatatgagggtggataggaattttttgacagtgaaatctgttatgatgtagtctcatttccaagaaaagtcttgagttccatccccccttctgaatttaaattgaaacctggacagaaaacaaactatcctgtagtttccactgctcaggaggaaaaaaagaaatctatattatctaatgcatctttgccatctttattttctagaattctattagacttttcaattataggctattaggaaagaatataactcttagaattcccctaaatataattatcaactcatttgattaatatgcatattttttcccgtaagatttacaatacacgtgtgttttagtgaattaccaatggcttggagagaatgaaattggaataactaactgaaaaccctagatgtttgtagcattgagacccaatatctttttggaggccctctccatgttagcttattgtcaaattctggtgtgtaaacaaactccttgacccatgttaagttcagcatcctgcattttgttcatgaatcacattttaaaaggagaaaagctccacctggttttctttatttttttaaacagtgatttcaaagagaagataggcctttcataattgctaattatacatataggattaatagtcataaattatagtaaataaaacttgtacctattccttttataaatatgaattggctaggcacagtggctcacagctgtaatcccagcactttgggaggctgaggcgggcagatcacaaggtcaggtgtttgagactagcctggccaacatggcaaaaccctgtgtctactaaaaatacaaaaattagccaggcgtggtggcaggcacctgtaattccagctactcaggaagctggggcacgagaatcacttgaaccctggtggcagagtttgcagtgagctgagattgttccactgcattcctgggcactgcctgggtgacagaatgagactctgcctcaaaaaaaaaaaaagttattaaaaatagatatttaagattccaaaatgtagttgatccagtttgtttccctgtagcaagtagtgggatttgggtttcatgacatataattaaaatgttaatcacataactataatgccaacaattttctttatacatttttgtttaattatgttgacatatactttgtgttgtaccttatttcatgttactaaattttacataaagatgctggtctatttttatttaatcatatactgttatggtttgaatatagtttgttcctaccaaaactcatgttgaaattagattccccatgtgctagtgttgggaggcagagcctaatggaaggtgtttgggtcatgggggcagatagatcccacatgaataaactaatgccctcctactggggtgagtgagttctcattcttgctgtcgtgggaatggattagttctcacaagcaagggttactaaagagtctggctttcttgattttctcctttttgcctcctgccttcccatgtgatctctttgcacatacctactcccctttcactttgtaccaagagtggaagcaacatgagaccctcaccagatacagctgcccaatcttgagccttccagccaccagaatcatgagccaaataaaactctttttaaaaataagttacccagtcttagatattctattatagcgacacaaaatggactaagctgtactctgttgcattaaaatgtgttgtttatatgcaagtgacaaaaactcaaaatagtgtcagcatgaagggcagttcattggcttatatacagggaagtccaggcaatgactgggtcctgggtccaaacgtcaaaagcagtcatcttgccatcctacacacttggctctgattattttcttctttatggattggttttcttttcagattttccctttggggatattctgtatgggatgaggaacagtgaggtgagaggatggtggataacagcaattgacattttcagcttaccttagcataacaaggctgaaagcttttataaagcaagctatgtaaaattttggagaagtacttttattttgcccagattggatcacattccgttcctgagctaatcaagagaggaattcacccaaaggagggggaaatttttagaagaaagccagaatgtagggagcaggtgaggaaaggtagttactgggaatacgaaagtaacacattcattgcaccctgtttgaatttgagtagcaagaagtttctgatttgtactaacagaaggagtaaagttcagatttaatctgcaagtcttgattgtttttaactagagattttaatctcttcttcttattattgctgctttgagttgccattataggtttttggattttttttttaatgccatccatttttatttgacatcatgttgttgctagtttgagcagatgcacatagcatatgtttccattaccaatttggaaatttttcccagtggcatcagcatttgagagatactgattttgaaattagagtactaggggaaaatgcttcaaaaatgaagactacttaaataaaaattggctttaaataaacctttggggatctgtacttgactaaaaagtattttctttaaactttggtctttgaaaactaaagtgtgtgtgcatgtgttcattaaaatgacctataacatgaacattttccatactggagtgtgatgtactgtactcattttgaactttagaaccaaatgcatcctttagcatttgatgagctgctatataattctatttccagttttattttcttgccaaataaagtaccaaagctca

SEQ ID NO: 4530 - DNA, 2453 bp, Homo Sapiens
  NM_017955
cgggcgctccttcctcagcggcgggaagctggcggcagcggcggtggcggtggctgagcagaggacccggcgggcggcctcgcgggtcaggacacaatgtttgcacgaggactgaagaggaaatgtgttggccacgaggaagacgtggagggagccctggccggcttgaagacagtgtcctcatacagcctgcagcggcagtcgctcctggacatgtctctggtgaagttgcagctttgccacatgcttgtggagcccaacctgtgccgctcagtcctcattgccaacacggtccggcagatccaagaggagatgacgcaggatgggacgtggcgcacagtggcaccccaggctgcagagcgggcgccgctcgaccgcttggtctccacggagatcctgtgccgtgcagcgtgggggcaagagggggcacatcctgctcctggcttgggggacggccacacacagggtccagtttctgacctttgcccagtcacctcagcacaggcaccaaggcacctgcagagcagcgcctgggagatggatggccctcgagaaaacagaggaagctttcacaagtcacttgatcagatatttgaaacgctggagactaaaaaccccagctgcatggaagagctgttctcagacgtggacagcccctactacgacctggacacagtactgacaggcatgatggggggtgccaggccgggcccctgcgaagggctcgagggcttggctccggccaccccaggccctagctccagctgcaagtccgacctgggcgagctggaccacgtggtggagatcctggtggagacctgagcaggagccctgagtgctcacagccgcctctgacgcattgacacgtgagcactggctcccacggagggtgcgcctgccgccagcggcccagccttgctgccctgtctgctgattctgagaaatcccagaacagcccattaccagtggggctgcagccctaggcccgtcccactcacctcccccctgtggagcgccaggcagaggctgttctggaaggcttcttgtcttctgacgtccccacagccctgggcccctcgtgtctctttgtgtcccccactgtagaggacggtgagccgcagctgcatcaacctccttttacctttagataggtgaatttttacaattcagttttacatgttttgggcagtattttgtcttaagatatattttttaaactttttataccttatctctttagattttttcagctattttcttaaaagtatattttttctataaacatcctttgctgctacattagaacttttatagcctaaacaattgcagttggtgtgtttcatttttttaaggtttaaataagggttttttgttttgttttgttttttgcagtgagcatcactacagtctcagtcaacagtgtgaatgtatcatgttttactttaaatgtgtgtgtgatacttcttcattatgtcctgcgctgcagtgagacctgggtgaaaatcaggagccgcacacagccacatcttcctagacctaagagtaaattatggaggattttatttatgtctatttatatgtaaatgtcattgaagacaaaggtcaaatatttgtctgtttgtagatcacaggcaccagttggtcttcagggacctcatagcccctcggtggtgccttctcaaggcagtgttcctggaggctcccatcagggtcagcccatgcacctgccctgggtgaggaagtagcattgctgctggatgagaaacgcctgcgctgctctgttagactggtgctgaaacaaaaggttaaggctaggttgaagtctagaatgaaagaaatctgaatccatgtcattcataaccccttgatctgtagtgtcatgggtgctgccgcaggcagggagtgagctgggggtgcctgcagccttccactcctgccccgcctcaccccacatgctccctgtttctcatgctttctctaacttcctcaccccttaaccaaaaaggtgtgttttcttttgtgcatatagccattcttaaatatcagtgatgtaaacctcactttattaaaaaattatccagcaaacaaaatgggaatgtggtgttagttacgaccacggcctgaccctccagcaacctttctgcaggatcagttctgctgtattatctggtggtgctttctaaggtggggaaaggaattgcacttggctgcattaaatggacgctgggttacttttatttcccccccccacagggttgcagagcaaattctttttacattgttcagcgcccggctggagttgggggtgtccacgacctctgacagcccccgatgtcgaaagttaatcctcatggaccctagtttaaagggtatgtgttttataggaataaatctaaagcactattttgtttctgtatagcatttttatcttttagaaacatcatttgttcagc

SEQ ID NO: 4531 - DNA, 2232 bp, Homo Sapiens
  NM_017956
ctctttgcacgtcatttccggcaccggcatggccgggtgagctgcaggctaccttatttaagaccgggaatttagtcagcctggtgagccgactctgaggagatggagtatcgctgaggtgatgagagagaatgtggttgttagcaacatggagagagaaagtgggaagcccgtggctgttgtcgcagttgtgactgagccttggtttacccagcgatacagagaatatctccagaggcagaaactctttgatacacagcaccgtgtggaaaagatgccggatggctcggtggcgctaccggtgctgggagagacgcttccagagcagcacctgcaggagctgaggaatcgtgttgccccaggcagtccctgtatgctcacgcagctcccggatcctgttccttcgaagagggcccagggttgttcacctgcccaaaaattgtgtcttgaggtgagtcgctgggtggagggtcggggagtcaagtggtcagccgagttggaggctgatttgccccgatcatggcaacggcatggtaatctcttgttgctgagtgaagactgtttccaagccaagcagtggaaaaatctgggaccggaactctgggagaccgttgccttggcacttggcgtccagcgtttggcaaaacgagggcgggtatcaccggatggtactcgaactccagcagtgacactgctgctgggtgaccatggctgggtagagcatgtggataatggtatccgttataagtttgacgtgacccagtgtatgttctcctttggaaacatcactgagaagcttcgagtggcatcgttgtcctgtgctggagaagtgctggtggatctctatgcagggattggttattttacattgcctttcctagttcatgctggtgctgccttcgtccatgcttgtgagtggaatccccatgctgtagttgctctgagaaataaccttgagatcaatggagtagcagatcggtgccaaatacactttggagataacagaaaactgaagctctcaaatattgcagatagggtgatcctggggctgattcccagctctgaagaaggctggcccattgcctgccaagtgttaaggcaggatgctggaggcattttgcatatccaccaaaatgtggaatctttcccagggaagaatcttcaggctcttggagtcagcaaagtagagaaagagcattggctgtatcctcagcaaattaccaccaaccaatggaaaaatggagctaccagggattctaggggaaaaatgctgtcaccagccaccaagccagagtggcaaaggtgggcagaatctgcagaaactcgaatcgccactcttcttcagcaggtgcatgggaaaccatggaagacacaaattctgcacatccaaccagtgaaatcctatgctccccatgtggatcacatagtcctggatctggaatgctgcccctgtccttcagttggctagaggaggtagatcctgggacacatgggatccacgtgcgagtggcccttaaatgtatcagttcagtccaggttgtcatcccttttgtcccctggtgatcagtttttttcatattttatagccctgaaagcaggctctagatcaattcaaattatttcatttgtctttcattgataacagaaaatgaaatacctgtttgggagaagcagcatggcccattgaaatgaggctcatctgtgcaattatgaattccaaattctgacctcagttctggaattgaagtttcagtatgttttggcctcgggtttcgttatttgcaaaatgagagtttctttgaactgtctcacgtgactattaagcaactatacacaggacatcggttattttagagtgaaagacacagtgctttttccaaattgctctggctaccatatagaaaattgactgaaggagggccaagatggaaacagagagaccagtgaggaggcttctgtggttgtccaggtctgaggtgatggtaacttggactcggatggtggtaatgggaggtagattgatatgataaataaaattgacagaccaagcaatggaatcagaattaagtccttaacatgaagctgctttgttattatgactgactaaattagagagagaagggaacaaaaattattttagtgtatttccattcccttactgtggcattcctaaatgattgtgaggggttgtcttataaatttggtttgttgtggtagaaaaaaaaaaaaaaa

SEQ ID NO: 4532 - DNA, 2711 bp, Homo Sapiens
  NM_017966
tgggcgcggctgcggtttaacccgcggtggcggcggcgacggcggccctggcagggaaggatggagacgctgaaggataagaccctgcaggagctggaggagttgcagaatgactcggaggcgattgaccagctggccctggagtcccctgaggtccaggacctacagctggaacgggagatggcactggccaccaaccggagcctggcagagcggaacttggagttccagggtcccctggagatcagccgctcaaacctctcggatagataccaggagctccggaagctcgtggagcggtgccaggagcagaaggcaaagctggagaaattttcttcagcactgcagccagggaccttgttagaccttctgcaggtggaaggcatgaagatcgaagaagagtccgaggccatggctgagaagttcctggagggcgaggtgcccctggaaacgttcctggagaatttttcctccatgaggatgctgtcccacctgcgccgggttcgcgtggaaaagctccaggaagtggtgaggaagcccagggcttcccaggagctggccggcgatgcccctccaccccgtccaccacccccggtgcgcccagtcccccagggaacaccccctgtggttgaagagcagccgcagccaccattagccatgcctccctaccctttgccctacagcccatcccccagcctgcctgtgggccccactgcccatggagccctgccaccggcccctttcccagtagtgtcccagccctccttctacagcgggcctctgggccccacttacccggcagcccagcttggacccaggggtgctgcgggttactcctggtccccacagaggagcatgccaccccggccgggctatcctgggaccccaatgggtgcctctgggcctgggtaccccttgcggggaggcagggcccccagtcctggttatcctcaacagtccccataccccgcaacaggaggaaaacctccctacccaatacagcctcagctccccagctttccaggccagccccagccctcagtgcccctgcagcccccttatccccccgggcccgcccctccctatgggttcccaccaccgccggggcctgcctggcctgggtattagacacactcctggccctcggcccctccctagtcccacccacgctcaacctttggcccagccatcgccgagattcgagggtcaactggaagtggcgttggtgctccctgtggacttgcgtcggcacccagaggccttggagggacaaggcactgggcggtgtgactggtcatggcacttgctggccttctggccagaggtcctcctggaagcccctcctttcagtgcctggctgcagcggtgctagccaggctggagtccagcacctctcgccggtgtctgtgtgagtgagcgcatgtgcgcatttatgagcatctacttgcggctgcactcagggccatttgaacccagtgcagagttatctctatgaggaggccccgggtctccagccccctccatctcccctggggtttggcatatttgacatggagccccatgccaagggatgcagctgttggtgtctgtccagtccattcaaggctagcctgcccatgcactgtggcaggggttggattggagggagagaacagagttgggaaaaacaacaggtttgagtcctataaagccataatttaactccagtagctgatgtcagacaagcttgtcctatgtcctatttgagtggcagcagcgccagcccagcaagaaggctgggggttgtcaaggttgtccccagaccttgcttgcagtggttggagaacccagggggctgccttgggccctctggccagagggaagcgggcagctctagccctggagattgtggtcacattggggcttgtttaggattggagggccaggtcacctccccagccaccctcccttctctcctctggggtccccactttagggcgactttgcccgaggcccacgcatccatccactcctttagtgccttgaatctcattcacaagcagccccctcccttcccctccccttctcactctgttgatgtaatcctcccacccccagtgtccatcctaagacaggcatcaaaagaggccctaactttacttcccaaatggtgctttttaaaaaacaccatcactacattaggggcaattttttcacacctccctgtcttcagaatgtaaagggtggggattatgtctctgtttaatatgcagccccctgcactgtggggtttggggcatgttcagtaataagaatgaatacaatagacaaagggggtgtgatgagtgttaacttggttgttccagaggtaaaccaggtctcagggaagagcctggagctgctattgcttaggaagttgtacgtgccttgaaatgtccactacctgaggacgcagcatctggtgggcccggggctgctggggccaaggagggaccttgaccttctggtgcctgcccctccccggcctatgtgccatccgcgtgacgctaggtcagcgctgccggttctttaccaaatgtgcttgcttctcctaagttatttataaagagaaatcactaatggactctactggtttgagtgcttctgagctggatgaccgaccgcctgtatgtttgtgtaattaattgccataataaactttgatgagtcacataaaaaaaaaaaaaaaaaaa

SEQ ID NO: 4533 - DNA, 3000 bp, Homo Sapiens
  NM_017969
cattcctttgagggtcgtgggcagacgccattttggccccagcggtgcttctaggaagtagaacgccggctcgcatgcctgcccgcccgccagcctgccgggtacggccttttccgccggggcttccaggtcaaagaattcgcctttgccgctaccgctttcttaccctccgcacccgttaagttctccggtcgggcggcagtctctgaacacttagccgcgccatccggggtcacaccgcctggaaggaggtgacgggggcggcgcggggcgcggacactccccgctgagagtccgcctgccatggactcggaatattacagcggcgaccagtcagatgatggtggtgctaccccagtacaggatgaacgggattcagggtcagacggtgaggatgatgtaaatgagcaacactccggatcagacactggaagtgtagaacgtcattcagagaatgaaactagtgatcgagaagatggcctccccaaaggacatcatgtgacagactctgagaacgatgagcccttaaatcttaatgctagtgactctgaaagtgaggagcttcacaggcaaaaggacagcgactctgaatctgaggaacgtgcagagcctcctgcaagcgattctgaaaatgaggatgtcaatcagcatgggagcgactctgagagtgaagagaccaggaaattacctggtagtgactctgaaaatgaggaacttcttaatgggcatgcaagtgactcagaaaacgaagatgttgggaagcatcccgccagtgattctgagattgaggagctccagaagagtcctgctagtgactctgaaacagaagatgctctaaaacctcaaatcagtgactctgagagtgaggaacccccaaggcaccaagccagtgactccgaaaatgaggagcctcccaaacctcgaatgagtgattctgaaagtgaggagcttcctaaacctcaggtcagtgattcagaaagtgaggaacccccaaggcaccaggccagtgactctgaaaatgaggagcttcccaaacctcgtatcagtgactcagaaagtgaggaccctccgaggcaccaggccagtgactcagaaaatgaagagcttcccaaaccccgaatcagtgattcggaaagtgaggatcccccaaggaaccaggccagtgattcggaaaatgaggagctacccaaaccccgagtcagtgactctgagagtgaggggcctcagaaggggcctgccagtgactcagaaactgaggatgcgtccagacacaaacagaagccagagtcagatgatgacagcgacagggagaataagggagaggatacagaaatgcagaatgactccttccattcagacagccatatggacagaaaaaagtttcacagttctgatagtgaggaggaagaacacaaaaagcaaaaaatggacagtgatgaagatgaaaaagagggtgaggaggagaaagtagcgaagagaaaagctgctgtgctttctgatagtgaagatgaagagaaagcatcagcaaagaagagtcgtgttgtctctgatgcagatgactctgacagtgatgctgtatcagacaagtcaggcaaaagagagaagaccatagcatctgacagtgaggaagaagctgggaaagaattgtctgataagaaaaatgaagagaaggatctgtttgggagtgacagtgagtcaggcaatgaagaagaaaatcttattgcagacatatttggagaatctggtgatgaagaggaagaagaatttacaggttttaaccaagaagatctggaagaagaaaaaggtgaaacacaggtaaaagaagcagaagattcagattctgatgataacataaagagaggaaaacatatggactttctgtcagattttgagatgatgttgcagcgaaaaaagagcatgagtggcaagcgcagacggaaccgcgatggtggcacctttattagtgatgcagacgacgtcgtgagtgccatgatcgtcaagatgaatgaagctgctgaggaagacagacagttgaacaatcaaaaaaagccagcactgaaaaaattaactttactgcctgctgtagttatgcaccttaagaagcaggaccttaaagaaacattcattgacagtggtgtgatgtctgccatcaaagaatggctctcacctctaccagataggagtttgcctgcactcaagatccgggaggagctgctgaagatcctgcaagagctgcctagtgtgagccaggagaccctgaagcatagtgggattggacgagcagtgatgtatctctataaacaccccaaggagtcaaggtctaacaaggacatggcagggaaattaatcaatgagtggtctaggcctatatttggtcttacctcaaactacaaaggaatgacaagagaagaaagggagcagagagatctagaacagatgcctcaacgacgaagaatgaacagcactggtggtcagacacccagaagagacctggaaaaggtgctgacaggagaggagaaggctcttagacctggagatcctggattctgtgcccgtgcaagggtcccaatgccttcaaacaaggactatgttgtcaggcccaaatggaatgtggaaatggagtcatccaggtttcaggcgacctccaagaagggtatcagtcgactggataaacagatgagaaagttcacagatataaggaaaaaaagcagatctgcacacgcagtgaaaatcagcattgagggcaacaaaatgccattgtgaccttgcctggaatgtgtccccatctctactctaagaaatgcgcaatggactctttggagaaagaagatattttaaaacatttttagtgtgtctgtaaatggttcagcgtgtatcagatgttgtcataggactcacatttctctcagttatatttaaaaccgttgtgtactttgtacaaaggaatactagtcatacttctataaactttacacaataaaatttcattctggtttttgg

SEQ ID NO: 4534 - DNA, 749 bp, Homo Sapiens
  NM_017971
cggaagcgctcgtgaccaccatttccgacccgggcaagatggcagcggcgctgcgcgtgcgttgttgagtgttcgggacgccggcctgcaggcgccatggtcttcctcaccgcgcagctctggctgcggaatcgcgtcaccgaccgctactttcggatccaggaggtgctgaagcacgccaggcacttccggggaaggaaaaatcgctgctacaggttggcggtcagaaccgtgattcgagcctttgtgaaatgcaccaaagcccgatacctgaagaaaaagaacatgaggaccctctggattaatcgaattacagctgctagccaggaacatggactgaagtatccagcgctcattgggaatttagttaagtgccaggtggagctcaacaggaaagtcctagcggatctggccatctacgagccaaagactttcaaatctttggctgccttggccagtaggaggcgacacgaaggatttgctgctgccttgggggatgggaaggaacctgaaggcattttttccagagtggtgcagtaccactgaggactgttgctgtattgattaggaaaagagacagagtaatttgcagtttgtttgatttatacttttgtttatctacaacccaataacagacatgagggatggccctgtctctctgggacagagcctcacagatgatgtccatgttttgtgtgaatgaaactcaaacactcttcagtttttagagtcaaaaaaaaaaaaaaaaa

SEQ ID NO: 4535 - DNA, 3354 bp, Homo Sapiens
  NM_017974
actagcgagcgccctgcgtaggcaccggctcctgagcccgtgcttcgggtgagggggcgggtcttccggccctctcgaaaatcatttccggcatgagccggaagaccgtcccggatggcctcggggactgccagtgtgtggaggtgagctccgggattgccggcattcccgcttctgctggttgcttcatgctgcaggctgcggccgtcagccctcgctcgcattggtggcgctgaggtgccggggcagcaagtgacatgtcgtcgggcctccgcgccgctgacttcccccgctggaagcgccacatctcggagcaactgaggcgccgggaccggctgcagagacaggcgttcgaggagatcatcctgcagtataacaaattgctggaaaagtcagatcttcattcagtgttggcccagaaactacaggctgaaaagcatgacgtaccaaacaggcacgagataagtcccggacatgatggcacatggaatgacaatcagctacaagaaatggcccaactgaggattaagcaccaagaggaactgactgaattacacaagaaacgtggggagttagctcaactggtgattgacctgaataaccaaatgcagcggaaggacagggagatgcagatgaatgaagcaaaaattgcagaatgtttgcagactatctctgacctggagacggagtgcctagacctgcgcactaagctttgtgaccttgaaagagccaaccagaccctgaaggatgaatatgatgccctgcagatcacttttactgccttggagggaaaactgaggaaaactacggaagagaaccaggagctggtcaccagatggatggctgagaaagcccaggaagccaatcggcttaatgcagagaatgaaaaagactccaggaggcggcaagcccggctgcagaaagagcttgcagaagcagcaaaggaacctctaccagtcgaacaggatgatgacattgaggtcattgtggatgaaacttctgatcacacagaagagacctctcctgtgcgagccatcagcagagcagccacgagacgctctgtctcttccttcccagtcccccaggacaatgtggatactcatcctggttctggtaaagaagtgagggtaccagctactgccttgtgtgtcttcgatgcacatgatggggaagtcaacgctgtgcagttcagtccaggttcccggttactggccactggaggcatggaccgcagggttaagctttgggaagtatttggagaaaaatgtgagttcaagggttccctatctggcagtaatgcaggaattacaagcattgaatttgatagtgctggatcttacctcttagcagcttcaaatgattttgcaagccgaatctggactgtggatgattatcgattacggcacacactcacgggacacagtgggaaagtgctgtctgctaagttcctgctggacaatgcgcggattgtctcaggaagtcacgaccggactctcaaactctgggatctacgcagcaaagtctgcataaagacagtgtttgcaggatccagttgcaatgatattgtctgcacagagcaatgtgtaatgagtggacattttgacaagaaaattcgtttctgggacattcgatcagagagcatagttcgagagatggagctgttgggaaagattactgccctggacttaaacccagaaaggactgagctcctgagctgctcccgtgatgacttgctaaaagttattgatctccgaacaaatgctatcaagcagacattcagtgcacctgggttcaagtgcggctctgactggaccagagttgtcttcagccctgatggcagttacgtggcggcaggctctgctgagggctctctgtatatctggagtgtgctcacagggaaagtggaaaaggttctttcaaagcagcacagctcatccatcaatgcggtggcgtggtcgccctctggctcgcacgttgtcagtgtggacaaaggatgcaaagctgtgctgtgggcacagtactgacggggctctcagggctgggaggaccccagtgccctcctcagaagaagcacatgggctcctgcagccctgtcctggcaggtgatgtgctgggtatagcatggacctcccagagaagctcaagctatgtggcactgtagctttgccgtgaatgggatttctgaagatttgactgaggtctctcttggcctggaagaataacactgaaaaaacctgacgctgcggtcacttagcagaggctcaggttcttgccttgggaaacactactagctctgaccttccatacctcacttgggggagcacagggccccgctgggcctcctcaccaacggcagtgccaaaatcagcccccacatcaaggtggtgttctctgtgctttctctcgtccttccaaagtcggttctggcctaacgcatgtcccaacaccttgggttcatttgcccggtgaactcactttaagcattggattaacggaaactcccgaactacagacccctccctggtgggttgcatgaatgtgtctcattactgctgaaatgtcctcacatctctttcactgttcttcagagctttctggctctctttcccccacaaaattcgacatatttaaaaatctccgtgtggctttaaaaaatggttttttgtttttttgtttttttgaggtgggagaggatgtgtgaaaatcttttccagggaaatgggttcgctgcagaggtaaggatgtgttcctgtatcgatctgcagacacccagaaggtgggtgcacactgcatgcttgggggtgccaagggattcgagacctccaacatacttgtctgaaggtggtgattctggccatggcccctctgccaagcctgtgtgcgatgcccttggtgctttagtgcaagaagcctaggctcagaagcacagcagcgccatctttccgtttcaggggttgtgatgaaggccaaggaaaaacatttatctttactattttacctacgtataaagttttagttcattgggtgtgcgaaacaccctttttatcacttttaaatttgcactttattttttttcttccatgcttgttctctggacatttggggatgtgagtgttagagctggtgagagaggagtcaggtggccttcccaccgatggtcctggcctccacctgccctctcttccctgcctgatcaccgctttccaatttgcccttcagagaacttaagtcaaggagagttgaaattcacaggccagggcacatcttttatttatttcattatgttggccaacagaacttgattgtaaataataataaagaaatctgttatatacttttcaaactccaaaaaaa

SEQ ID NO: 4536 - DNA, 2173 bp, Homo Sapiens
  NM_017980
atcctttctatttggagttgactctgctgccctttggagatcccagcgcgtaacgtgagctcgcgaccagcgcgggggaggcgcccacacgcccgtcccgtcttggtgtctggccccaggcggccgcgcctcccctccgaggtggtcccatagcccctgcaccaggcggcccgcgcccgcgacctcaaggcggctgccccgcgccatggcggcccggctgggtgcgctggccgcgtcggggctgtaccggcggcgccagcaccggcagagcccgccgccagccacgggcaatatgtcggacgccttggccaacgccgtgtgccagcgctgccaggcccgcttctcccccgccgagcgcattgtcaacagcaatggggagctgtaccatgagcactgcttcgtgtgtgcccagtgcttccggcccttccccgaggggctcttctatgagtttgaaggccggaagtactgcgaacacgacttccaaatgctgtttgctccgtgctgtggatcctgcggtgagttcatcattggccgcgtcatcaaggccatgaacaacaactggcacccgggctgcttccgctgcgagctgtgtgatgtggagctggctgacctgggctttgtgaagaatgccggcaggcatctctgccggccttgccacaaccgtgagaaggccaagggcctgggcaagtacatctgccagcggtgccacctggtcatcgacgagcagcccctcatgttcaggagcgacgcctaccaccctgaccacttcaactgcacccactgtgggaaggagctgacagccgaggcccgcgagctgaagggtgagctctactgcctgccctgccatgacaagatgggcgtccccatctgcggggcctgccgccggcccatcgagggccgagtggtcaacgcgctgggcaagcagtggcacgtggagcactttgtctgtgccaagtgtgagaagccattcctggggcaccggcactatgagaagaagggcctggcctactgcgagactcactacaaccagctcttcggggacgtctgctacaactgcagccatgtgattgaaggcgatgtggtgtcggccctcaacaaggcctggtgtgtgagctgcttctcctgctccacctgcaacagcaagctcaccctgaagaacaagtttgtggagttcgacatgaagcccgtgtgtaagaggtgctacgagaagttcccgctggagctgaagaagcggctgaagaagctgtcggagctgacctcccgcaaggcccagcccaaggccacagacctcaactctgcctgaaggccctcttgcgcagctgcctctcggcccctccgccttctcccctcctgctgtccatgcttggccccctcgtccccatccacctgtgccctccgcatcttaccctccctttctctttcctcattgccttctcccttcctgttccctcatctctgccttccccatgtctctcctctccttggccgtggcttctgtctgtgaggaggcaggagctggggagtgggagcctatgaccccacgtctgacagccatgtccacctgtgcccacagcttccgcccacagacctccagggacaggagcaaattgcaccacagctccccgcctggcctggccctccccaggcggctcagtggctcatgctgtcctgtgagagcccctgccccagagcggccccactaagcgcatgtggctcctgggctacccacagccagggcagcctgctggagccacagggccagggccatgcagatggaggcctctgggagccacctccaatccctcaccactcactcaaccagtggcacagtgtccttgtgcccacactgagccagcaagtcctgctgtccacacccacaagctacctggagggacaggacccacctccatccttcggaaggccttcctggaatcccaccttggcctccgccctcggttccgccccgcccctctccccccgaccttggggcttgtgtcgagcccttgggtggggccaggaggaggtgatggcgtcagaggaggtgtggtcagaggtgacttgttcccacctccagggaggacgcttcgtcttcggccagcgcagacctggtgtttgtttgttgggctcacgcttgcacaatgaaggcttgttcacacaaccacaaaaaaaaaaa

SEQ ID NO: 4537 - DNA, 1939 bp, Homo Sapiens
  NM_017983
accggcgacccggcccgtggagccggcgcgggcgggctgctgaggtggctgtcgccggctccgagctgcggcttcccgggccgagcccccgatggaggccgaggccgcggacgctcccccgggcggggttgagtcggcgctcagctgcttctctttcaaccaggactgcacatccctagcaactggaactaaagccgggtataagctgttttctctgagttctgtggagcagctggatcaagtccacggaagcaatgaaatcccggacgtctacatcgtggagcgcctcttctccagcagcctggtggtggtagtcagtcacacaaaaccacggcagatgaacgtgtatcacttcaagaaaggcacagagatctgtaattacagctactccagcaacatcttgtccataaggctgaaccggcaaaggctgctggtttgcctagaagagtccatttatattcacaacattaaagacatgaagctgttgaagaccctcctggatattcctgcaaacccaacaggtctatgtgctctctctatcaaccattccaattcttacctggcctatcctggaagcctgacttcaggggagattgtgctttatgatggaaactccctgaaaacagtctgcactattgctgcccatgagggaacactagctgccatcaccttcaatgcctcaggctccaaactagcaagtgcgtctgaaaaaggcacagtcatccgggtgttctctgtccctgatgggcaaaagctctatgagttccggagagggatgaaaaggtatgtgacaatcagctctctagtgttcagtatggattcacaattcctctgcgcctccagtaacaccgagacggtacacatcttcaagctggaacaggtcaccaacagtcgaccagaagagccttcgacctggagtggctacatgggaaagatgtttatggctgctaccaactacctccctacccaggtgtcagacatgatgcatcaggacagggcttttgccactgcacgcttgaacttctccggacagaggaacatctgtaccctctcaacgatccagaagttgccacggctgctagttgcgtcatccagtggacacctttatatgtacaatttggatcctcaggatggaggagagtgtgtcttaatcaaaacccacagcttgcttggctcaggaacaacagaagagaataaagaaaatgacctcagaccttccttacctcagtcttatgcagcgaccgtagccagaccaagtgcatcttcagcctccacggtgccaggttattctgaggacggcggggcgctgcgaggagaagttattcctgaacatgagtttgcgacgggaccagtgtgtcttgatgatgagaatgagtttcctcctataatcttgtgccgtggaaatcagaagggcaaaacgaagcagtcatgatgagaagcacacctcagaaatcaggacatcccccctatcaggtggttttggagaaaacaaggaaggcggaagaatggagtgcaattgtgtgagcagaaaggggggcaggaatcccgggtgctccactgcttaaaccacaggacctggttaactcctcaccaagcttcccacgaccctggttgccaatgggcgcgggagacattgtatacacatcatgctatttaaaatacgttcaaactatagtgtaaatgctaattaaccatattggtatataaccggaattttatattaaaaggggcctcctttttaaatatatgccgtgtaaaaaatgtacttataggaacatctctttgaattgtatttcttgtatattacatacttagagagagactcttttagccaggcaaagtcttttttggctgtggctggaataaatcatttattacttgggagtcccattttggacactaataataaaatcatggcaatgcaaaaaaaaaaaaaaaa

SEQ ID NO: 4538 - DNA, 2356 bp, Homo Sapiens
  NM_017984
cgccgttttcccggggagatgcgccgcccggtctccctgccagcggagtgctgggccgaggacagggcggcaggggtgacagtggggtccaggagagtctcaaaatcctaagctttcagtatttgttattgtgaaagaagttaattcacctgaaacagaggaggggcaacctgagttatcagaaagtgacttcctggccttcccttctttactgatcagaggcacacaaagcgtagtttctaagctgaatgatgacaacgttgcagaataaagaagaatgtggaaagggaccaaagagaatctttgccccacctgcacaaaaatcttacagcctgttaccttgtagccctaactcccctaaggaggagaccccggggatcagttccccagagacagaggccaggataagcctgccaaaggccagtttaaagaagaaagaggaaaaagcaaccatgaagaatgttccaagcagggaacaggagaaaaaaagaaaggcacaaatcaacaagcaagcagagaagaaagaaaaggaaaaatcaagtcttaccaatgcagaatttgaggagattgtccagattgttctgcagaagtcccttcaggagtgcttggggatgggatctggccttgattttgcagagacttcttgtgcccagcccgtagtatctacccaatcagacaaggagccaggaattactgcttctgctactgatactgataatgctaatggagaggaggtaccacatactcaagagatttcagtgtcttgggaaggtgaagctgcccctgagataaggacatctaagttaggccagccagatcctgcaccctctaagaagaaatccaatagactcaccttaagcaaaagaaagaaggaagctcatgagaaggtggagaaaactcaaggtggacatgagcacagacaggaagaccgactaaagaaaacagttcaggatcattctcagatcagggaccagcaaaaaggagagataagtggttttggtcaatgtctggtctgggtccagtgttccttcccaaactgtgggaaatggaggcggctgtgtgggaacattgacccctcagttctcccagataattggtcctgtgatcagaacacagatgtgcagtataatcgctgtgatattcctgaggagacctggacagggcttgagagtgatgtggcctatgcctcctacatcccaggatccatcatctgggccaagcaatacggttacccctggtggccaggcatgatagaatctgatcctgacttaggggaatattttctttttacttcccatcttgattccctgccgtctaagtaccatgtgacgttttttggagaaacagtttctcgtgcatggatcccagtcaacatgctaaagaacttccaggagctgtccctggagctatcagtcatgaaaaagcgcagaaatgactgcagccagaaactgggggtggccctgatgatggctcaagaggcagaacagatcagcattcaggaacgggttaacttgtttggtttctggagccgattcaacggatctaacagtaatggggaaagaaaagacttacagctctctggtttgaacagcccaggatcctgcttagagaaaaaggagaaagaggaagagttggaaaaggaggaaggagagaaaacagacccaattttgcccattcgtaagcgagtcaaaatacagacccaaaaaaccaagccaagagggcttgggggtgatgcaggcacagcagatggccgaggcaggacactgcagaggaagataatgaagagatctctaggcaggaaatccacagctcctcctgcacccagaatgggaaggaaagaaggccaagggaattcagattctgaccagccaggccctaagaaaaaatttaaagctccccagagcaaggccttggcagccagcttttcagagggaaaagaagttagaacagtgccaaagaacctgggcctatcagcgtgtaagggggcctgcccctcatctgcgaaagaagagcccagacaccgggaacccctgacccaggaggctggaagtgtcccccttgaggacgaagcctccagtgacctggacctggagcaactcatggaagatgttgggagagagctggggcagagcggggagctgcagcacagcaacagtgatggcgaggacttccccgtggcgctgtttgggaagtagctggtgctcctctgctccctctttttctcccttctctggggcgcaggagggagaagttgctaagtgctgggtctgttcattggctatgaggttcaaatgtgtgtggtgcagtttctgtgttaataaagcaggttacagtcgaaaaaaaaaaaaaaaaaaaa

SEQ ID NO: 4539 - DNA, 3818 bp, Homo Sapiens
  NM_017988
ttggacactactctaggaccgggtaactataactacccaatattgcagccatggagtccatgcttaataaattgaagagtactgttacaaaagtaacagctgatgtcactagtgctgtaatgggaaatcctgtcactagagaatttgatgttggtcgacacattgccagtggtggcaatgggctagcttggaagatttttaatggcacaaaaaagtcaacaaagcaggaagtggcagtttttgtctttgataaaaaactgattgacaagtatcaaaaatttgaaaaggatcaaatcattgattctctaaaacgaggagtccaacagttaactcggcttcgacaccctcgacttcttactgtccagcatcctttagaagaatccagggattgcttggcattttgtacagaaccagtttttgccagtttagccaatgttcttggtaactgggaaaatctaccttcccctatatctccagacattaaggattataaactttatgatgtagaaaccaaatatggtttgcttcaggtttctgaaggattgtcattcttgcatagcagtgtgaaaatggtgcatggaaatatcactcctgaaaatataattttgaataaaagtggagcctggaaaataatgggttttgatttttgtgtatcatcaaccaatccttctgaacaagagcctaaatttccttgtaaagaatgggacccaaatttaccttcattgtgtcttccaaatcctgaatatttggctcctgaatacatactttctgtgagctgtgaaacagccagtgatatgtattctttaggaactgttatgtatgctgtatttaataaagggaaacctatatttgaagtcaacaagcaagatatttacaagagtttcagtaggcagttggatcagttgagtcgtttaggatctagttcacttacaaatatacctgaggaagttcgtgaacatgtaaagctactgttaaatgtaactccgactgtaagaccagatgcagatcaaatgacaaagattcccttctttgatgatgttggtgcagtaacactgcaatattttgataccttattccaaagagataatcttcagaaatcacagtttttcaaaggactgccaaaggttctaccaaaactgcccaagcgtgtcattgtgcagagaattttgccttgtttgacttcagaatttgtaaaccctgacatggtaccttttgttttgcccaatgttctacttattgctgaggaatgcaccaaagaagaatatgtcaaattaattcttcctgaacttggccctgtgtttaagcagcaggagccaatccagattttgttaattttcctacaaaaaatggatttgctactaaccaaaacccctcctgatgagataaagaacagtgttctacccatggtttacagagcactagaagctccttccattcagatccaggagctctgtctaaacatcattccaacctttgcaaatcttatagactacccatccatgaaaaacgctttgataccaagaattaaaaatgcttgtctacaaacatcttcccttgcggttcgtgtaaattcattagtgtgcttaggaaagattttggaatacttggataagtggtttgtacttgatgatatcctacccttcttacaacaaattccatccaaggaacctgcggtcctcatgggaattttaggtatttacaaatgtacttttactcataagaagttgggaatcaccaaagagcagctggccggaaaagtgttgcctcatcttattcccctgagtattgaaaacaatcttaatcttaatcagttcaattctttcatttccgtcataaaagaaatgcttaatagattggagtctgaacataagactaaactggagcaacttcatataatgcaagaacagcagaaatctttggatataggaaatcaaatgaatgtttctgaggagatgaaagttacaaatattgggaatcagcaaattgacaaagtttttaacaacattggagcagaccttctgactggcagtgagtccgaaaataaagaggacgggttacagaataaacataaaagagcatcacttacacttgaagaaaaacaaaaattagcaaaagaacaagagcaggcacagaagctgaaaagccagcagcctcttaaaccccaagtgcacacacctgttgctactgttaaacagactaaggacttgacagacacactgatggataatatgtcatccttgaccagcctttctgttagtacccctaaatcttctgcttcaagtactttcacttctgttccttccatgggcattggtatgatgttttctacaccaactgataatacaaagagaaatttgacaaatggcctaaatgccaatatgggctttcagacttcaggattcaacatgcccgttaatacaaaccagaacttctacagtagtccaagcacagttggagtgaccaagatgactctgggaacacctcccactttgccaaacttcaatgctttgagtgttcctcctgctggtgcaaagcagacccaacaaagacccacagatatgtctgcccttaataatctctttggccctcagaaacccaaagttagcatgaaccagttatcacaacagaaaccaaatcagtggcttaatcagtttgtacctcctcaaggttctccaactatgggcagttcagtaatggggacacagatgaacgtgataggacaatctgcttttggtatgcagggtaatcctttctttaacccacagaactttgcacagccaccaactactatgaccaatagcagttcagctagcaatgatttaaaagatctttttgggtgaggtgtcttacttctattttgaaggattatttcagtttcaatcatgggtgagctgatttacatctttatatagttggcttggaggaagtacttctatgggaaagtgaacagttctgtgacaggaaacatctctgtccatgccagcatagtagttgtatggacttctaaccagttgagttttttaaagcattgaggattttttcctcttaccaactcctcttcaggtttttaaagacccagcccttcccaatctcaaagagaaaaaggaaactgagttatcttgaataacataactttttaatcaaatgtttattttggcttgtggatcttggtgttatttaaaaaattgaggtgatggtcattgcaagctcatctattaagtactatatggtacacagtctatgagtcattagtcttcattttaatatgtaaaaaatcttgatgctgtattgatttgtttgcatttaagatgacagtgagaaaatgataagcataaagagaagtatcaggttatttgctttttccaaacttttcagatgaactattgtttagtacagagactgagcaaatactacaaaattcaacttaaccttcatttcattggtttaaatgcgttattaaccatcttaagtgcaaactaatcattgtaaattatattttagcatggtctgcctcaaatagtaatgtatttttctgcattcacttggatatatttagaatcacttttttcctcctgtatcaaggaagaggtatgtgctgatttgtttggatatttgacaaggcactctgatgtgacttccctgactactaccttcatatttcatttcaaattcaaacttctgaggttgcagcatatatgaattgcattttcaaaagaagatttgtaagaattaaactatatttatgagtaaacttttgaggtttctgctgtattgtttcaaatgtaataaactttacttctgtaaaaaaaaaaaaaaaa

SEQ ID NO: 4540 - DNA, 5309 bp, Homo Sapiens
  NM_017991
ttttactcggtgcccgcagcgccggggcgtggaggcgttaacgcgcacgcgcttagggatccggccgtggccgagcgcgcggccgtaagaccgcgggtgactagcatgcagatacccatgctctgactttctgcccctccactgacatggcccaccggggtggggagagggacttccagacttcagctcgacgcatgggcacctcgctgctcttccagctttcagtgcatgaacgggagctggacctggtttttctggatcatagctatgccaagccttggagtgcccacccagatgccagtagtgcccgccccacccgcatgctctttgtcactccccggcggcagcacgaaagtaccatatgattgttaaatacctgtgaagtatgtgtggcccggtcctatttcctcacctgtttacagtgaatcagacgtcccaatagatgtggagacggtcacatcaacgcctatgccactctatgacaatcagaaggcacgcagcgtgatgaatgagtgtgaacggcatgtcatctttgccaggactgatgcagatgcccctcctccaccagaggactgggaggagcatgtcaacaggactggctggacaatggcccagaacaagctattcaacaagatcctcaaagccctgcagtctgaccggcttgcccgcttggccaacgaaggggcttgtaatgagccagtgctgcgccgtgttgctgtggacaagtgtgcaaggagagtgcggcaggctctggcaagtgtgagctgggataccaagctgatccagtggctgcacaccacccttgtggagaccttgagtctgcccatgctggcagcctacctggatgctttgcagacgctgaaggggaagatcccaaccttgattgaccggatgcttgtgtcatccaacacaaagactggggctgcaggagctgaggccttgtctctcctactgaagaggccctgggaccctgctgtgggtgtgctttctcataacaaaccaagcaaactccctggctctccgctgattctcatcgcctcctctggtccctccagctctgtgtttcccacttcacgccgccaccgcttctggcaatctcagctgtcctgcttgggcaaggtcatccctgtagccacccatctgctgaacaatggcagtggggtaggagttctacagtgtctcgagcatatgattggggcagtgagaagcaaagtgctggagattcacagccatttcccacacaaacccattatcttgattggctggaacacaggagctttggtggcctgtcatgtgtcagtaatggagtatgtcactgcagttgtctgccttgggtttcctctgcttactgtggatggccccagaggggatgtagatgatcccctcttggatatgaagactccagtcctctttgtcattggtcagaattcccttcaatgtcaccctgaagccatggaggacttccgggagaagattcgagctgagaacagcttggtggtggttgggggagctgatgacaatctcagaataagcaaagcaaagaagaaatcagaagggttgactcagagcatggtggacagatgtattcaggatgagattgtggactttctgactggagtgctcactcgtgctgagggtcacatgggctctgaacctcgggatcaggatgctgagaagaagaagaagccccgcgatgtggcccgcagagacttggcctttgaagtccctgagcggggcagtcgacctgcctccccagctgccaagctgcccgcctcaccctcaggctcagaggatctctccagtgtgtccagcagccccacctccagtcccaagaccaaagtgaccacagtgacctctgcccagaagtccagtcagattggaagttctcagctgctgaagagacatgtgcagcggacagaagctgtgctgacccacaaacaagctcaagttcccatttcatcagaaccaccagaggaaggagagaaagaggatcttagggttcagctgaagcgacaccatccctcgagtccccttcctggcagtaagacctccaaacgaccgaagatcaaggtgtcccttatctcccaaggggacacagctggagggccttgtgctccttcccaaggaagtgctccagaagctgcaggtgggaagcccatcaccatgacactggggcaggcttcagcaggggccaaggagctcacaggacttctcaccacagccaagtccagttcttctgaaggtggagtctcagccagcccagtcccttcagtggtctccagcagcactgcacccagtgccttgcacacactgcagagccgcctggtggccacatctcctggcagctccctcccaggggccacatcagccagcagcctcctccaaggcctcagcttcagcttgcaggatatcagcagcaagacctctggccttccagcaaatccctccccaggaccagccccacaggccaccagtgtgaagttgcccacccccatgcagagcctgggtgccatcaccacgggcaccagcaccattgtccgtaccattcctgtggccaccactctctcctccttgggtgccactcctggtgggaagcccacagccatccaccagctgctgaccaatgggggcctcgctaagttggcaagcagcctccctggcctggctcagatctctaaccaagcatcaggcttgaaggtccccaccaccattactctgacacttcgtggccagccgagcaggatcactacactgagccctatgggctcaggagcagccccatccgaggagtcctcttcccaggtgctgccctccagctcacagcgcctgcctccagcaccctgaagatgctgtgtgatatgtcctccttaccaagttggtgatggctgcctcatggtgggccctggacaggtgtgtggtcctgctgagctgtccacgtgtcggaagacctgtttaagacagtcatttttgcctctccgccaactgtcttcagagaaaccattaggttaggtgatacggtgccagcaagggaagcaccatcgtccaggatctgcaaatctggttcctgggaaccccagactcctcagcagatctggctgtacatggatcagaaccacttcttcccccgcttaagctgtggtttgacccaagggtcagcatataggactgcctgctgcatttaatgaaggtgtttccttttggaagtctgtgctaccctctgcgcctagttgggaggagacatccatctggtctgggatttcgggagttagaatggaaagctctttgctaaagactggagtcatcctggcctgccaactggtggttcagagccggacgggcttgttttggacatcactgttgccttcactcagcagccacgggagagtgctccccatgcaactccaccttagaaaccacgtcagatactgagtagcttgctgactcctggaaacttctggtttttgttagtatcataatgaaggcaaagagaactaggctgtcatctttcagcctctttgacttactctagatgttgggagcagtggttgccaggtgaaacctgggccctttgtctttttcaccatgctttgggcagtttctgtatccagagagtccgcaggttcagataagctgaagaagagtaatagaacagcaaaggaagtggcttgaaggatgtgctagtaagccctgtggtttgtgcttaggtctctgctctgctacccaaggaactggtggttcagctggagataaaaagaagaatttgccaagtcagagaagaaaccccaaccccggaaaatcctctgtctccagtctctggaggtgaagcagggacaataagctaaggtagtatcttggccatcccaggaaacttgtggcattaggacgatgaaggccatgcttcagtgttttcgtttctatttcatgagactttttgtcttcctgcttacaagtgggaagatgattgacagtgactctactatgcagggctgttggtaccaacctgagccctataggtggcagtccctggagaagtggtcacagaagatggagctctgatcccctgcttacctcttcacaacacttgtgtgcaaagatagttttagatttggtttagaagctatcctccagaacaggctcccatacttagaatgtttctagttaaggtaataaattaggcaacccaagtgtgactccactcaagtgtccttttctgtaggcaggaagggcccacaacatggcttaaaatgtagtccatggttctggcccacagtacagtgtgtatctataccaggtcacctgtgttcaatctgggagccttcctggccagtctgagtggcagccagaagggagctcatagtgtctaggagtctcaggcaaggtaggtcagggtactgtgggcaggggggatgtgtgtgataggagagggtaccctaaaccccataccttccctccctgacctgaaaagctgatctcaacagggattcacacagaattaggctgtgtttttgcattagctggtaggtgactttctcaaaattcttaaattcagaaagtatttagtaaacttgaggaaggtatgaaatctggaggaggcatccaggacccaggggtttgatagctttacaggtaggatcataccacaccaaaagagcagtggacaataagactatatgagctatatgaagcttttaggaatcatttaggacagacagagccctaaacaacccattcatgacttaagttgttggctcagtgtatgctggggacaaagaaaaactaacaagccgacctgcctttatgataaattctagtgtgcttacaagggatgacttcctgaggtgtgatctgtccaccttgaagaactccacaactgaagaaggggagctgtgagaacgtggattgttctacaacttgcacagggtaacagaggaagtggctgaggcctagagtcacgttttccagttcccttcgcaaactatatttcttggaacgcgaaaggaagctttacctatttcatagaagacctggaatccataacctcagaaggcaatattattgatagaaaatgtggaaggatcaggaagttcttagattcttggatgacagatgcatgttgatgccctatggagatgtccttgtgttttgaggtcactgaggtaggaagacctgtctactcttggtttcaccactagaacagtcttgggctggatgggttatagagctgagcggctgtgatggttctgtttttacattaacaaaaacaattaaaaacaccaaaaacaacaaaaaaaaaaaaaaaaaaaaaaaaa

SEQ ID NO: 4541 - DNA, 2343 bp, Homo Sapiens
  NM_017996
agttccggtggctggcggaaacgggaacgtgcagccgcgggtgcaggagtcctggggcatggcgggggcggggcagggggaggcgcgcacagaacaggctggggcatccctcgccctggctctttgagcccggaccagacaggtgctgggaatacagcaaggaattagaccagttccctgctctctggtatggtgggacagatactaaaaagagatgtgataatggatcatcatgtttctaccatcaagcctcgaagaatccaaaaccaaaatgtcattcaccgcttggaacgccggcggatcagttcaggcaaggcaggtacccactggcaccaagtccgagtgttccatcagaatgtcttccccaacttcacagttgtcaacgttgaaaagcctccttgtttcttgcgtaaattctcacctgatggacgctactttattgctttttcttcagaccagacatctcttgaaatctatgagtaccagggctgccaggcagcagaggacctactgcagggatacgaaggagaaatcctgtccaatggcaatgaccagcggtcagtgaatatccggggccggctctttgaacgcttttttgtcctgctgcacattaccaatgttgcggccaatggtgagcacctgaaccgggagtgtagtctcttcactgatgactgccgctgtgtcatcgtgggctcagctgcctacctcccagatgagcctcaccctccattttttgaggtatatcggaacagtgaatcagtgacccccaacccacggtcccctctagaagactattccctccatatcattgaccttcacaccggccgcttatgtgatacacgcacgttcaagtgtgacaaggtggtcttgtcacacaaccaagggctgtacttgtacaaaaacatcctggccatcttgtctgtgcaacaacagaccatccatgtcttccaggtgactcctgaaggcactttcattgatgtgcggaccattggccgcttttgctatgaggatgacctgctcactgtgtcagctgttttccctgaggtacagcgggacagtcagacaggcatggccaatccctttagggatcctttcatcaattccctcaaacaccggttgctggtatatttgtggcgccgggcagaacaggatggtagtgcaatggccaagaggcgcttcttccagtattttgaccaactgcggcagctgcgaatgtggaaaatgcagcttctggatgaaaaccacctgtttatcaagtacactagtgaggatgtagtaacactgcgagtcacagatccatcacaggcatctttctttgtggtgtacaatatggtgacgacagaggtgattgctgtgtttgagaatacatcagatgagcttttggagctctttgagaacttctgtgacctttttcgtaatgctaccctgcacagtgaagttcagtttccctgctcagcttctagcaacaattttgcaaggcagatccagcgccggttcaaagacactattataaatgccaagtatggagggcacacagaggcagtacgccggctgctgggtcagctccccatcagtgctcagtcttacagcggtagcccctatctggatttgtctctcttcagttatgatgacaagtgggtatctgtcatggagcggcccaagacttgtggagatcacccaatcaggttctatgcccgggactcgggcctgctcaagtttgagatccaggcggggttattgggccgccccatcaaccacacagtgcgacgccttgttgccttcacctttcacccttttgagcctttcgctatttctgtgcagaggactaatgctgagtatgttgtcaacttccatatgcgacactgctgcacgtaggtgcctcaccagagccagattatctggtcttccaagactttgccactcacttatctcagtggactccaaagcaaaagctcccgactactagctctgttagttccagcctgctatacctcagatgggagagagccagagagaggagtgagggtggctcaacctaatggaatttttaaattgtatacaatactgctactgattgttataatatcctcttgcgttttccctgtgggaatgcccagcattaattaagtccatttcatttttgctttactttgcatttgattgctgtgaagatgaaagcattagacttttatccccttcatgtcacttcttcggcattatggtttgcatctgaaagcagttaaatcttgtttactgatgagaatgacatacatcctttccatttagctcataagcacggctatctttttaagagaaaaataaagccatggtattttcatactt

SEQ ID NO: 4542 - DNA, 2335 bp, Homo Sapiens
  NM_017998
aggttcgaatctccgccgcttcgcggttgcttctcaacgtccgggccgcatctcggcggcggcgagggctgagcgcgggagctgcctccgagccggagccccagccctaggccctgcgcgagctgccccgccctaccccctccagcgtcctgtcgcctcctcgcccgacttcggcctgtccctctctcacgcgctcagtcctcgctcttcgccccccgcagctatcggcactcggtctcccgcgcctggcgggctccgcccgagcctctgggcccatggccaagcggcgtgcggccgagccggtgacgttccacgtgccttggaagcggctcctgctttgcgacttcgctgagcagccgccgccaccgcctctctggatccggccgcccggggtcgcgcatgctgggcagctcctcggcgtcccagagcagcaccgaaagcgcaaaatcgacgcagggaccatggcagagccctcggcttcgcccagcaagcgccgtgacagcggggacaacagcgccccgagcggccaggagcgtgaggaccacggtctggagacaggcgatccgccgctgccgccgccgcccgtactgccggggccgggggaggagctcccgggcgcccggctcccggggggcggtggcgacgacggggcggggcgcgcaggacccccgcggggagactggggggtcgcatcgcgccagcacaatgaagaattttggcagtataataccttccagtactggaggaatcctttgcctcctattgatctggcagacattgaagatttaagtgaagacaccctgacagaagcaacacttcagggcaggaatgaaggggctgaggttgacatggagtcctgatgtaaggagccgaagcagtgggattggctgatttgaggagatgtctctaagtgaattctcgtattcttaagggaaaagttattttccatacttgaagttatatttccaaacctgagaaatgaagaaagattgttctgacattaaatacctacagttactactgaacctcttaataaggatttgtcaaggatagagtacagttgtaggggaagtattttatgtatgcattcttagagcaaaaagttttgtttaaattctagaattgaaggtactgatcttataaaaagaaattctagcagttttagaaataggtgggaaaaactcaaatattcctcctatctgcaccaaaaagtttatttgtggtatataaaatgaatattgttttataataacttgttaataaagtactttctaatacattctattgactctgttagttgaacaaatagctgacttgaacatctatgcaaacttaagatgggcgggattgttgtaaaagctattgttttaaaagagctttctaaatgtaaagtagtgataatttcaatttgggtagcgtgtttgcaaagcttccaatatttgatgttggttaagctctactatgggcaactgaagatggataaagaaaaatgaaaactgaatcggtgcctgcttccccctgttttcccaggattagaggaaaaaatttattgtataatcagcttcttggttttgaattgcttcgaggcatggttttattccttattactttagacctgtagttttcaacactgacagcactttaaaaatctttgcctgggcctcactcttgagagattctcatttaatagttctgaggtgggtcttggatataactatttttttaaacacctgtcctgtttccctccattcctctcatgtgcagacagggttgagaaccagtagactaatggtcgtttttcctgtttaaaggagataactaatttgagctgaagcaatgcttcttaattagctttgtttttgttttgctctgttggtggctttgttacaactgaattattgtgttattactatttcattgttaaagaaataaagtaagcaatttgtgatgtgagtatcagtgattaagttaactaacttttgtactgcatccagaatgttggttttgcaattgagtaactggttcttgcttgcattttttgttgttgatgacattagatccaaaattcaagacaaatggtaaatgccattgagagggaaagagaaaaacttgattttttttgtgtaatgaaggatttaagaatgggttgacattaataagaatgctttagaacagaagacaaactgtattgcattgtggtcagacatggttcaaagtcttgtactgccacttcctacctatgtatctttaagccagttatttttcatctccaagcctcaaatttctcacctgtaaaatgagaaataataaatagtatctacctcaaaaaaaaaaa

SEQ ID NO: 4543 - DNA, 1564 bp, Homo Sapiens
  NM_018004
gaagcacatctggacagctgtgcggcctccttgcgggccgacgtcagccgagcacgtcccccacgtcctctccttctcgccacttattatttattcgttttcccaaagaagcgactagggacccaagtttaaaaattcctccccccactcaatgcgagacgtggccagatcccatccaacacacggtttaattttcatggggctctgggatcaaaagaacagaaacagcaacaacaaaagcccagccgctgtctgattttaagctggcaaagtgggaaaaataaagtgttgagtaaacagaccaagttggatcatggggaatttcagaggtcatgccctccctggaaccttcttttttattattggtctttggtggtgtacaaagagtattctgaagtatatctgcaaaaagcaaaagcgaacctgctatcttggttccaaaacattattctatcgattggaaattttggagggaattacaatagttggcatggctttaactggcatggctggggagcagtttattcctggagggccccatctgatgttatatgactataaacaaggtcactggaatcaactcctgggctggcatcatttcaccatgtatttcttctttgggctgttgggtgtggcagatatcttatgtttcaccatcagttcacttcctgtgtccttaaccaagttaatgttgtcaaatgccttatttgtggaggcctttatcttctacaaccacactcatggccgggaaatgctggacatctttgtgcaccagctgctggttttggtcgtctttctgacaggcctcgttgccttcctagagttccttgttcggaacaatgtacttctggagctattgcggtcaagtctcattctgcttcaggggagctggttctttcagattggatttgtcctgtatccccccagtggaggtcctgcatgggatctgatggatcatgaaaatattttgtttctcaccatatgcttttgttggcattatgcagtaaccattgtcatcgttggaatgaattatgctttcattacctggttggttaaatctagacttaagaggctctgctcctcagaagttggacttctgaaaaatgctgaacgagaacaagaatcagaagaagaaatgtgactttgatgagcttccagtttttctagataaaccttttcttttttacattgttcttggttttgtttctcgatcttttgtttggagaacagctggctaaggatgactctaagtgtactgtttgcatttccaatttggttaaagtatttgaatttaaatattttctttttagctttgaaaatattttgggtgatactttcattttgcacatcatgcacatcatggtattcaggggctagagtgatttttttccagattatctaaagttggatgcccacactatgaaagaaatatttgttttatttgccttatagatatgctcaaggttactgggcttgctactatttgtaactccttgaccatggaattatacttgtttatcttgttgctgcaatgagaaataaatgaatgtatgtattttggtgc

SEQ ID NO: 4544 - DNA, 1974 bp, Homo Sapiens
  NM_018006
gccgagaggaggcctccaatggctggctggggggcttagaattttatttttggtttacagcgcagaagaagagcagtgaggccggggcgcgggtggggagggcaaggcggcggctcaaaaaaaaagccagcccctcgcggcccgacagagtctcggcgccccgcgggtcggtggagcctcaggggtgagcgcaggccggagacaggggaacccgccgcgggacaggggaaggccggacggaacgcgggtaagctgccgcagcttccggccgggccactagcgcggaccctacggccggggcgggacttccggcaaggcgcggaagcggcggtagctgcagctggcgaagttgggcgactggcggatgcaggccttgcggcacgtcgtgtgcgccctgtccggcggcgtggacagcgccgtggccgcgctgctgctgaggcggagaggttaccaggtgacaggggtgtttatgaagaactgggactcactggatgaacatggggtctgtactgccgacaaagactgtgaagatgcttacagagtttgccagatcttagacatccctttccatcaagtgtcctacgtaaaggagtattggaatgatgtgttcagtgactttttgaatgagtatgaaaaaggaaggactcccaatcctgacatagtttgcaacaagcacatcaaatttagttgcttttttcattatgctgtggataatcttggggcagatgccattgccacaggtcactatgcaagaacttccctggaagatgaagaagtctttgagcagaagcacgttaagaagcccgaagggcttttcagaaatcggtttgaagttagaaatgcggtaaaactcctccaggcagctgacagctttaaagaccagaccttctttctcagccaggtttcccaggatgccctgaggagaaccatcttccctctggggggattaacgaaagagtttgtaaagaaaatcgctgctgagaatagacttcatcatgtgcttcagaagaaagagagcatgggcatgtgtttcatcgggaagaggaattttgaacatttccttcttcagtatctgcagcctcgacctggtcactttatttccatagaagacaataaggttctgggaacacataaaggttggttcctgtataccttgggccagagagcaaacataggtggcctgagagagccctggtacgtggtggagaaggacagcgtcaagggtgacgtgtttgtggccccccggacagaccacccagccctgtacagggacctgctgaggaccagccgcgtgcactggattgcggaggagcctcccgcagcactggtccgggacaagatgatggagtgccacttccgattccgccaccagatggcactagtgccctgtgtgctgaccctcaatcaagatggcaccgtgtgggtgacagctgtgcaggctgtgcgtgcccttgccacaggacagtttgctgtgttctacaagggggacgagtgcctgggcagcgggaagatcctgcggctggggccgtctgcctacacgctccagaagggccagcgcagagctgggatggccactgagagccccagtgacagcccagaagatggtccaggcctgagtcccttgctctgacagagatggatctgctagaaggaacctggagagcaggacccatggctgggcggctggtgagcagtccaggtgcccaagggccagcttgctgctgcccaaagcagaggaagccgggctggctgagggtccgaaaagcctgcaggggcccggcgagccccaggaagagcctcagctccaggctggggctctggctgctggagcatctgctggctggtggggtggcccgagttccccttcaccgcccccagggagggtttcccacctcagagtacaccgaggggacctgcagagggggctgtcgggacagcgtggaataaacattatttcaaggacaaaaaaaaaaa

SEQ ID NO: 4545 - DNA, 1834 bp, Homo Sapiens
  NM_018009
aaacagcaagcagggctctggcagctgctgcagacggcttcacacagggacgcgggctgccatcttgctctaagtgaaagtgaaagaaaagtcggcagcagagggaacagggaagaaacctaaaggctgcaggctgccaggtgtgcttggagagcccccttcttccgccgggcctcgcaagcagcgtaggactgtggagaagggcggtgggcaaggagggaactcgagagcagcctccatgggcacacaggagggctggtgcctgctgctctgcctggctctatctggagcagcagaaaccaagccccacccagcagaggggcagtggcgggcagtggacgtggtcctagactgcttcctggcgaaggacggtgcgcaccgtggagctctcgccagcagtgaggacagggcaagggcctcccttgtgctgaagcaggtgccagtgctggacgatggctccctggaggacttcaccgatttccaagggggcacactggcccaagatgacccacctattatctttgaggcctcagtggacctggtccagattccccaggccgaggccttgctccatgctgactgcagtgggaaggaggtgacctgtgagatctcccgctactttctccagatgacagagaccactgttaagacagcagcttggttcatggccaacatgcaggtctctggagggggacctagcatctccttggtgatgaagactcccagggtcaccaagaatgaggcgctctggcacccgacgctgaacttgccactgagcccccaggggactgtgcgaactgcagtggagttccaggtgatgacacagacccaatccctgagcttcctgctggggtcctcagcctccttggactgtggcttctccatggcaccgggcttggacctcatcagtgtggagtggcgactgcagcacaagggcaggggtcagttggtgtacagctggaccgcagggcaggggcaggctgtgcggaagggcgctaccctggagcctgcacaactgggcatggccagggatgcctccctcaccctgcccggcctcactatacaggacgaggggacctacatttgccagatcaccacctctctgtaccgagctcagcagatcatccagctcaacatccaagcttcccctaaagtacgactgagcttggcaaacgaagctctgctgcccaccctcatctgcgacattgctggctattaccctctggatgtggtggtgacgtggacccgagaggagctgggtggatccccagcccaagtctctggtgcctccttctccagcctcaggcaaagcgtggcaggcacctacagcatctcctcctctctcaccgcagaacctggctctgcaggtgccacttacacctgccaggtcacacacatctctctggaggagccccttggggccagcacccaggttgtcccaccagagcggagaacagccttgggagtcatctttgccagcagtctcttccttcttgcactgatgttcctggggcttcagagacggcaagcacctacaggacttgggctgcttcaggctgaacgctgggagaccacttcctgtgctgacacacagagctcccatctccatgaagaccgcacagcgcgtgtaagccagcccagctgacctaaagcgacatgagactactagaaagaaacgacacccttccccaagcccccacagctactccaacccaaacaacaaccaagccagtttaatggtaggaatttgtattttttgcctttgttcagaatacatgacattggtaaatatgccacatgcctttggtggaagtacaaaaaaaaaaaaaaaaaa

SEQ ID NO: 4546 - DNA, 3223 bp, Homo Sapiens
  NM_018010
atgaggggcggggctgcttcccgaccaccatttccacagaggcagggcaagaagagggccacaggtgacgtcattcaggaaagccgccctgattggagggaaggaggcggagtctagtttccctggtgacggattgtccggtggtcgcctggtaaccggtcgtggctgtactggcggcggcagggctggcggcttaggccgcagaggtctgtgggcctgagcccacgctggactctgtccgttctgcgatgactgctgctctggccgtcgtcacgacgtcgggtttggaagatggggtgcctaggtcccgtggcgaagggaccggggaagtggtcttggagcgggggcccggcgcggcctaccacatgttcgtggtgatggaggacttggtggagaagctgaagctgctccgctacgaggaggagttcctccggaagagcaacctgaaggccccgtccagacactattttgcactgcctaccaaccctggcgaacagttctacatgttttgtactcttgctgcttggttgattaataaagcgggacgtccctttgagcagcctcaagaatatgatgaccctaatgcaacaatatctaacatactatccgagcttcggtcatttggaagaactgcagattttcctccttcaaaattaaagtcaggttatggagaacatgtatgctatgttcttgattgcttcgctgaagaagcattgaaatatattggtttcacctggaaaaggccaatatacccagtagaagaattagaagaagaaagcgttgcagaagatgatgcagaattaacattaaataaagtggatgaagaatttgtggaagaagagacagataatgaagaaaactttattgatctcaacgttttaaaggcccagacatatcacttggatatgaacgagactgccaaacaagaagatattttggaatccacaacagatgctgcagaatggagcctagaagtggaacgtgtactaccgcaactgaaagtcacgattaggactgacaataaggattggagaatccatgttgaccaaatgcaccagcacagaagtggaattgaatctgctctaaaggagaccaagggatttttggacaaactccataatgaaattactaggactttggaaaagatcagcagccgagaaaagtacatcaacaatcagcttgagaatttggttcaagaatatcgtgcagctcaagcccagctgagtgaggcaaaggagcgataccagcagggaaatggaggagtgacggaaagaaccagactcctctctgaggttatggaagaattagaaaaggtaaaacaagaaatggaagaaaagggcagcagcatgactgatggtgctcctttggtgaagattaaacagagcttaacaaaactgaagcaagaaactgtagagatggacattagaattggcattgtggaacacacactactccaatcaaagctgaaggagaagtccaacatgactaggaacatgcatgccacagttattccagaaccagcaacaggcttttattaaaacatactggttttcatgtttctgattagttgggttttttatatcaaactatatttcatgttgcatagatttcaaaacataattttatgttcaatgggtatttttttacatatacatactcacatattatatcatggtgattatgatggttaaagcctttacactgaatgtaatgtttaataaagaaattacaaattctcactttctaagaagctttcactaatcattacctatgttaaagctcccacctggtggctcatttttcatagcattccttgtgtaagccaaggtatatgacctgcgttttctgcagatgctgctgctgtcacaacatgaactgctgacacagtcctttaccttgctccacctctgcagtgatcataagtgctttgtgcccagaggccactgaagatggtaggcaggattctttccaagaacccaaactgcctttgcctcagctttatggttacctaaaattgccactttttttaggttaaaaaaaacttcagtatcctcattaacatttgaagttggtttcttatgaatatttcgtggctaaaatgattttatagggaatctatcttctaggatctaagccactaaataaaaggataaatgaatgatgataagtcagtcactcatgtttgactctgttcttagaatgaagagaaggtgcatatgcatgtctcaatttctacctttttctgtggtatcggctatactagggaaccattttgtagaagaaggaacgatgacaggtcgcatgaagatcagcctctagtactgatgatctttacttatgcatcttcctgagcaactttctaggctaggatttctaaattggtgaaaaaagcagcattagagtgccagaattagcactggggaaaactggccaggggaacacaaagcaggagacagcctgcgttaattttttttttttaataattttcaaaagcagtggtagaaaatttgataagaatgctttatgtttaggacaacaaaaataattttaaaaagttattttttaccctaatacttttctccactgaatattattatttttttcttagctttttctttctagatgtattccccaacatgctcacatacacagatctttccctttccttactagacctctctttagtttaagataagtttagacaggagaaagtgtatgtaaactacctgaaaggatgacaatcaatacaatgacaaatatgccagtttatttaatttgtttaaaaaaaaaaaggcagaaaacccaccatgggaaaataagcattttttaaaatctgaagttgctcttttcctgtgtggtctttgggaggagtctaatacaaaaactgaaaacctttggtcctgggaatttattttcatggctgttgtcatggctgagtagttttttgatgaattcaatcaatgcagagaacgcttttagataaatcagaactctccttaaaatgcatttcaatcagaagcaaagtacacccattatttatgcagacatgtaaaaaatctaaaaattcttgcaatgagtagtataagccacctatttttacttccttctctgaaatattccagttaactcagcttgggttctgtgctcctcctctcttcctatagaacactgtgcataccttgaataaagagcttattatactaaaaaaaaaaaaaaaaaaaaa

SEQ ID NO: 4547 - DNA, 3919 bp, Homo Sapiens
  NM_018015
aaagtctttgcagcctcgctacggggcggagtcttgcctgtcagcaggggcagagtagcgatcgtcgccaaagcgcgcggttttatttctctccgctttggacggggcaaactagcttttgggagtgaagcgggtacgcagttatccaacaatgtctggtgagtcaggacagcctgaggctggtccctcacatgcagggctagattggccgaaccctgagaggaatcgggctggggtcccgggaggggtgatccgaagagctggttcccaagggcccaggtcctggatccaaaaggttcttgagcagattatggactcacctcgccagtgtgtcaccccctcggaggtggtgcctgtaactgtgctggccgtccagaggtacctgttagaggatgagccacgcgacacggtgcccaagcctcccctttattgctatgatgtgacgatctcagatggggtgtaccaggagaagtgctacctggaccccagcttgaactctctcgtatatcaaaatattcttaaagttggcattcaaatgagaatttccagggtctcatgtctttacaatgagaaaaggataggccaggggatcctgtgcatagataacgtccactgtggggagacttcagacagtatttctttagaaactcccttcagaaatagagcgcaccaggagaaaccagagaggcctttaagaggcgggaagagtcattacctggcgctgtggaataacgaagatccctatggagatatctggttaacagacaagcaacctgaggaacacaactttagcgataccaaaataatttccctttctcatcttgaaatgacctggactaacagaagaaattttcctgcattgcttgtgaggatcttacataaatcaaaactgcgatactatggaaaacctgataaaaagatgattgaaccatatcagacctttttggaagttgctgacagttcaggcacagtgtcagtgattatgtggaatgccctgtgtcctgagtggtataaaagtttgcgggttggtttagttcttctgcttcaagactattctgttaaaaagagttatccattcagaatacagcctgtccccgtggatccacagatcaaactaatttctacaatggaaatctgcctgaatcttcgagatcccccaacaaatataattatcattccagaaaagcaggtgaaaccagaatggagactgccaaagctaaatcaccgatttaccacaaggtcagaactggatgatatgccagaaaattgcatctgtgatgttattggccttttagtttttgtaggaagggtccagcggtcaaaaaagaaagaaaaccgtgaagatttttggtcatatcgctggattcacattgctgacggtacttcagaacaaccatttatagtggaactgttttcaacatcgcagccagaaatctttgaaaatatttacccaatggcatattttgtgtgtacacagttgaaagttgtcagaaatgacaatcaagtacctaagctgctttacctcaccactacaaatgagagtggagtgtttattactggtcatagaggccagccgtatacgtatgatgccaaggtaaaaaactttattcaatggattagaacaaagtctgattccggggaacagaagaatatggttattggtggatattacccctatccaccagtgccagagacattttccaagtatagtagttctattaaagttgagtcgctcttgacagctataagtgaagtcaggaaggagattgaagacttgcagtatagggaacaaaagcgcattgcaattcaggggataattactgctataaagtatatcccccatagcagtgcgactgaaagtgcctcagcatcagaaacacttcggaatgctaacagaccctcgacctctcaagcagctagagtagaaattcaagaaagaaatggtaaacggcatcaagatgatgagcctgtgaattctcagtatttccaaactacatctacaaatttaagtctgagcaataaaataagaattcttcaaggcccacacgctaatccagttgctgtacctcaaccaggagcttctgtacaaacaaagggaattaaaccgggcatgccaagcatcttcaaccgtcgagcaaatataaatgctaatctgcaagggaaagccagaaaaactataagtgataggtgggagagtcagctgtggagagagaaaaagtttggcttaatagatcacctacactacagccgtgtttatcctgaaagtattccacggaaatttatgtttgaacacagaaagtttcttagtgaccagtataattctcagcctgcgaaatatgtaccaccagaaggaaggcccccaaaacttgatgattttaagagcgcccgaagccttggacattttgaagtaaccatactaggtctgaaccatgagatagcaatcgatgttgctttcctacccatgtattgtccagaagatattcgaacatctcaaatagacacactgttgacctccatgaattacagctgtgcatatccacaggacacaactggaaatgaccgattgccaggtccaagagcggttgcaggtgatattataaaagcagcaactgaactggatagagtgcatatcgtcggtatcttggatatctgtaatttgggtaataataaagtggaagtctatttgcacaagatttatagtccagagaatacttcttaaaagttagcaaatgaaattattacagattatacgagtgtactgctttaaagatattccatcattttgctggtaatttcagtaactgttttcagcaagaatattacatgagctctaaagttattaagcagttttatgttcgttttgtgtttagggagctttttaaaacacttcatttcagattcattattgaaaaaggtcatcaaaataatttttgtgtataagggaatttaccttgcttaccttactagtatgactattatcttgacttctggtaatttatgttcactattccatttgtgaagtgtactttcattctaaagcctcagtataaggcatcctaacttacaagagtaactttccatggacatttaacatccttccaattttattcacatataatgggaaattttgaattgccagtttgaagactgttctcctaaagtgttcaacctgcacttcttacaaccaaggtagtttgtatcattttcaaaagtacacattattagggtctagttgcccctggtccttagcttgctcagctgcaaaataagcgtgctaaattaaattgtcttaaggtttttccacttcattttgtgactttgtgtggttcgaatttctcagtattttaaccagtgtgttgatgttaaagtcaaaggctgcagtatgtctatattcttgctgtactcattggtagtttcagtatatgtaatgtgagtttaaatagtgaaattgtatctcatattaacatttcaaatgctcatattgaaaatggaaaatagtaaacacgggaattgattttattctggttgtctataatacttcattttaaatgtaaatggccactctgcatttgcaaggcccggtggttgacatctgtgtggtttgttagatgagacaaaatgaccattaaatgagtttatagattattctgtatcaagataaatctgattccagttaagctataaacttgtgggattttcttgtagccctatagttctgtgacttcatttgctatacgctttaaatgtgttgagcagcctatgaacctaaagacatactgcagtttgttcataaatgtattcagtcttttattctttataattgtgtgtaaatgttaactaaacagtggattcctctcgtgttacagttttgagtgaattattaaagaagttaaaatgcaataacaaaaaaaaaaaaaaa

SEQ ID NO: 4548 - DNA, 2222 bp, Homo Sapiens
  NM_018019
gtagagtgcgcgacgcttttggcgacccgacctctggctaacctacccccggagccatggcctctgctggggtggcagccgggcgacaggcggaggatgtattgccgccaacgtccgaccagccgctgcctgacaccaagccgctgccgcctcctcagccgccgccggtccctgcgcctcaaccgcagcagtcgccggcgccacggcctcagtcacctgcccgcgcgagggaggaagagaactactcctttttacctttggttcacaacatcatcaaatgcatggacaaggacagcccggaggtccaccaggacctgaacgccctcaaaagcaagttccaggagatgcgcaagctcatcagcaccatgcccggcatccacctgagccccgaacagcagcagcagcagctgcagagcctccgggagcaagtcaggaccaagaatgagcttctgcaaaagtacaagagcctctgcatgttcgaaatccccaaggagtagagtgaggctgacttccttagaaagagggggaagccaatggcctgtctccccactaccatccccaaacgctccttggggcgtggttcctgtggaccccagctcagctcgtcaagctgcaggggcggggctcctgtgctgctgcgcgcgcttcgcctgtgcgggagccagcgcagagcttggctgcgccgggggttcctcgtgtagatccatatgtctagatgcataataactggagtgcctgctggtggaagtcagaatgctcctggaggctgcagagggggtggaggactctcccctgcctctggggagggggccatctgctgcgcccggccccactgacagatctgaagagcacagtaggaagggaggcggctcctctttgcttccttccctctctctcctcccacccccataggatcagtgtgtaccaggtacacattgttcctgttaacagcagcttcttgaaacatttgcatagaattcactggacgaattaagcctgcactcatatggcatagaattgtgagagaatgttttgaaaggccagagggtggcctttttccccaaacagtttggttccttttatgtttgagccagtgaagggaactacgctttgggggcttcagcctagagccctgccaggcagcccctggctccaggttccctgcctcctagcgctctcctcgccttcagctcttgctcccttcctcgttcatcaccctcagtcagtgcccaagagtggccaaaccgcttcacatctgcagtgcttccccagggttgacaaggggccgtcctttccacacaggccagaagaggtcttcaggcgaaccgaccttcccccttctggcatttcagattccccttgctctggttaaaaggtctttccctcgtggcctttgcacttgcggcagcaacgtgtactacactgcagaagggttcagtatgcaccttgtgttgagagagaggcaaccctgggggccagttcaggtggtccccaaccataagctaggtctgaaagttacacagccaagtttgagctcttaaaagttgatgaacagcctcatttccccagcttccctgatttcttccagatgggacgttttatttgtgtgctctcccttgactgtcagattgaagtaagagcagttctctccgttgcctctcgaggaggaggtgcgaagtcctggagtattgtttgggtctcggaatgggcgcataacctgcgctgaccagtttaggggcttagcagatgcctgccagctgacctcgttggcaggagggttgggtggagatgtttttagcagagcttccattagtgtagacctgtagccacctgtcagaaggtgggtggcatattggggacctgggaatgtgtgaaggaggagatcaaatttcagtggctttggacagaaaagaaggctctggatttaagcgggtggtcacctgtgagaccaggtctaccttgggactgttatttaactgaatcagttatttccttgaaatttcacagtagtgggtgggcctgttttaaggctctgacagataccacgaaacatgaagcacgtggaactacaagacccccggggtctttctgagtgcaaggctgaaatggacaagggctcctcacgggggtggagggagccggagcctgccttgtgttccttttttgacttgtgacatttttcaaacacataattaaaaggacttatgctctgctgtctcagg

SEQ ID NO: 4549 - DNA, 6524 bp, Homo Sapiens
  NM_018023
gcggggcggaacgcgccgggcgggctccaccgcgccgtgtgcttccgcaggttgcgggggtcgctggggccttgtggcggggcagctccgcggggcttcgcccgctctctcacctcgccgtgctctctcgcggcggccggcggggcccgcgctgcagccggagacccggagaaaggtgaagaactgaatgtcatcatgtctggaatcaagcgaaccatcaaagaaaccgaccctgattacgaggatgtatctgtggcccttccaaataagcggcataaagcaattgagaattcagctcgagatgctgctgtgcagaagattgagactattatcaaagaacagtttgctcttgaaatgaagaataaggaacatgaaattgaagtcattgaccagcgactgattgaagcaagaaggatgatggataaactgcgtgcctgcattgtagcaaactactatgcttctgcaggtcttctaaaagtttctgagggatcaaagacatgtgatacaatggtttttaatcatcctgctatcaagaaatttttggaatcaccatctaggtcatcatctcctgccaatcagagagcagaaacaccatcagccaatcattcagaaagtgattctttatctcagcacaatgacttcttatctgacaaagataataacagcaatatggatatagaggaaagactctcaaacaacatggagcagagaccaagccgaaatactggaagggatacttctagaattactggctcccataaaacagaacagcggaatgctgatctcacagatgagacttcacgactttttgtaaagaaaacaatagtagtgggcaatgtgtccaagtatatacctccggataagagggaagaaaatgaccagtcaactcataagtggatggtatatgtccgagggtcccgtagagaacccagcattaatcattttgtcaagaaggtttggttcttccttcatcctagctataaaccaaatgaccttgtggaagttagagagcctccttttcacctgaccagaagaggctggggtgagtttcccgtcagagttcaagttcattttaaggacagccagaacaagcggatagatatcatacataatctgaagctggatagaacttatactggcttgcagactcttggagcagagacggtagtggatgttgaactccatcgccattctctcggagaagactgtatctatcctcagtcctcggagtctgacatctctgatgcccctccatctttgcctttgaccattccagccccagtgaaagcttcttcaccaataaagcagtcacatgagccagtacccgatacctctgtggagaaaggattcccagctagcactgaagctgaacgacacactccgttttatgctttgccatcttcattggaaagaacacccaccaaaatgactacatcccagaaagttaccttttgttcccatggcaattcagctttccagccaatagcatcaagctgcaaaattgttccacaaagtcaggttcctaatcctgagtcacctggaaaatccttccagcccatcaccatgagctgcaagattgtgtcaggttccccaatatcaactccaagcccatcaccattgcctcgaaccccgacttccactccagtccacgtgaagcaaggcactgccggctctgttattaataatccttatgttatcatggacaagcagccggggcaggtgattggagccaccactcccagtacaggaagtcctacaaacaagatctccacggcttctcaggtctcccaaggaacaggttcccctgttcctaaaattcatggaagtagttttgtaacatctactgtcaagcaggaggattctttgtttgcatctatgccacctctttgcccaattgggagtcaccctaaggttcaaagccccaaacctataacaggaggacttggagctttcacaaaagtgatcatcaaacaggaacctggtgaagcccctcacgtgcccgcaacaggagctgccagccagtcaccactcccgcagtatgtgactgtgaaagggggtcacatgatagctgtgtcccctcaaaaacaggtcataactcctggagaagggattgcccagtcagcaaaggttcagccctccaaggttgtcggggtaccagttgggtctgctttaccttcaacagtgaagcaggctgtggcgatcagtggtggccagatcctggtagccaaggccagctcttctgtctccaaagcagttgggccaaagcaagttgtaacccaaggagttgccaaagcaattgtgagtggaggtggaggaaccattgttgctcagccagtgcagaccttaaccaaggcccaggttactgccgctggtcctcagaagagtggatcccagggttcagtaatggcaacgttgcagctaccagccactaatttggccaacttggcaaatttgcctcctggcactaaactctacctaactacaaacagcaagaacccttcaggaaaaggaaaactgctgctgatccctcaaggagccatcctgcgagctacgaacaatgctaatctccagtctggctcagctgccagtggtgggagtggtgccggaggaggaggaggaggaggaggaggaggcggcagtggcagcggtggaggcggcagcacaggaggaggaggaggaacagcaggaggaggaactcaaagtactgctggccctggagggatatctcagcacctgacttacacatcttacatcctcaagcaaactccccagggcacatttttagttggccagccatcaccccagacttctggaaaacaactcaccactgggtcagtggtccaaggaacactgggagtcagcacatcttctgcacaaggacaacaaacgctaaaagtcatctctggacagaaaaccacattgtttacacaggcagcccatggaggacaggcatctctaatgaaaatatccgatagcaccttgaagactgtgccagccacctcacagctctcgaagcctggaaccacaatgctgagagtagcaggaggggttatcacaactgccacttcccctgccgtggccctctcagcaaacggtcctgcacaacagtctgaaggaatggctcccgtgtcttcatctacggtcagttctgtaacgaaaacttctgggcagcagcaagtgtgtgtgagccaggccaccgtgggaacctgcaaggctgccacccccaccgtcgtcagcgccacgtccctcgtgcctacaccaaaccccatctctgggaaagccacagtatccggactgttaaagattcactccagtcagtccagtccgcagcaggccgtcctgacgattcccagccagctcaaaccactcagcgtaaacacatctggaggggtgcagacgatcctgatgcctgtgaataaagtggttcagtcattttctaccagcaagccacctgccattctgcctgtagctgccccaactccagttgtccccagctctgctccagcagctgttgcaaaagtgaagactgaaccagaaacacctggaccgagttgcctctctcaggagggtcagacagcagtgaaaacagaagaaagttctgagctgggaaactatgtcattaagatagaccatttagaaactatccagcaactcctaactgcagtagtaaagaagattccattaatcactgcaaaaagtgaagatgccagctgcttttctgcaaagtctgtggagcagtactatggctggaacattggaaaaaggagagccgctgagtggcaaagagcaatgacaatgcgaaaagtcttacaagaaatcctggagaagaatccgagatttcaccacctgactcccctcaaaaccaagcacatcgctcactggtgccgctgtcatggctacaccccaccggaccctgagagcctgaggaatgacggggactccatcgaggacgtgctgacccagatcgacagcgagcccgagtgcccatcatcattctcctctgctgacaacctctgccgcaaactggaggacctgcaacagttccagaaaagggaacccgagaatgaggaggaggtggacatcctcagcctctccgagccagtgaagataaacatcaagaaggagcaggaagagaaacaagaggaagtcaagttctacctgccaccaaccccagggtctgaatttattggggatgtcacacagaagattgggatcaccctgcagcccgtggcactccacaggaacgtgtatgcgtccgtggtggaggacatgatcctgaaggctacagaacagctggtgaatgatatcctgagacaggctttggcagttggataccagacagcttctcacaacaggattcccaaagaaattacagtgagtaatattcaccaggccatttgcaacattccttttctggacttcctcacaaacaaacacatgggaatattgaatgaggaccagtgagcggagtgaggtgccctggagaagcaggctttgaaggcacagcgaagctgtaactgaggaccctgctgctcgggaaggaggtggtttccagtgtgactcggcatgtcatggctacccaacctttgccgctgcctgttcccacgtgtcaccagcacgctgcactccagatgaaatcctcctaggacaggagtttgtttcctgagtgtggagtgaggctgtcagtggatccgtgctttgtcggccagcgtttctgcagtctttgtaaaggccccacgagagcgggccaggccgtgtgcctcaggcccttctccctgggtgtgcttaagggggctccttgggcccgcctccccaggaggtagaaaatgagtggcaggctagagatttcacccattttgtgggctggagttaccagtagctccagcagttaccctgaagagagattgggcttcagccttcagcaggtggttctctcccatgcctggccttggtgtggaggggctgtactctgagcccaagtgagtcagctataggaagaggccatacctagagccaagaaccatgaaggcctgagagacggcagactgagcagaattccttttttgagcacgagagcattactagaaccattgtcaaagcagtggcaagggacggagaggtcccaacaggagtcaggaagaggtttgattataaccaagaaaactcactatgctaggaatagactgtgtgcaccagtcccagacacttggcagaagtgtagcagcgttacacatgtgtgcgaagcagatcgcaggttccacgccatctgcatggcctgcaggagcttctgctgctgaccccatgctgagtggccagtggggagcggcgcccggcaggctcttctggggtcgtctgtcctatccgtggattgtatatactcttctctgttaaggagtttttcccaagaagaaaagtatttaaaagaaataccagtgagtgccttaaagttggagaagtaactgcccatgcccagaaataaggatgccagtgcccagaagcagtgagattagtctgtgtccacaagcagaggccccctcgatgggagggagtggcaggcaggagaaggtggcgctgccaggtgcccgggtctattggaggcgccccatctcagacttcctaacacagcctgtgtggaaggcagaacaaagaatgcatgcccagtcagaaatctgttctattctgctccaggaaaatcggaaacctgtgagtcagagtcagagaaacttacccaagcaacgtaattcctgttttcatgggtcctgtagatgtttgagtcaggaaggtaaggcggggagtgactgaataaactctgccttttaaattgagcatctgggccgggcatggtggctcacgcctgtaatcccagcactctgggaggtcgaggtgggtgggtcacctgaggttgggagttcgagaccagcccgaccaacatggtgaaaccccgtctctactaaaaatacagaaaattagctgggcatggtggtgtgtgcctgtaattccagctactcgggaggctgaggcaggaagaatcacttgaacccaggaggcggaggttgcagtgtgccaagatcataccactgcactccagccctggtgacagaggagaccccgtctcaaaaattgattgatcaattcagcatctgagggctgcaagtacagaaggaatctattctcagcagggcatagggcacgcactggcttaacagtttagtatataaggctcaaatagtctatacctgaactgctataagcaaggtcgatagggaagtggatagattgcttcagcaaagtgaactgtgagatctccaggacagagggagaaagatctgatccaaatgagaacagattggttattgcaggtatcacagcctaaagaaattatctttttgcaaaagaaatattaaatgatttagcagtctccacgtgtgttaatgtttcaaacgtgtatcataatgtgtataattgtgtaacaaaattgtctacaataaatcttttggtatttgtggaaaaaaaaaaaaaaaaaa

SEQ ID NO: 4550 - DNA, 3390 bp, Homo Sapiens
  NM_018025
caggcatcggtgtcgcctcgcagggaacagttgggtggcttccagcttatgccaggagtctcctcctcacccgcacatcgcggggctaggatgggatgtcgtggctgccaaatcctccgaggcaactcctgcctgggacggcctaccacaggatgggcctgagaatccggagcgcaggctcgggccgctaggacaccttcccccgcccgcggacccagccttccagcatcaccggggttcgcggaggagaaagaggaaaggcgtttggcctgccaaggccgccgtagcgagggggcggggcccggaagagcaggatggcggcgcgggacagtgacagcgaagaagatctggtcagctatgggaccgggctggagcctctggaagaaggtgaaagaccaaagaaaccaatccctcttcaggatcagactgtcagagatgaaaaaggaaggtataaacgattccacggggcctttagtggaggtttctctgctggatacttcaatactgttggctcaaaagaaggatggacaccctctacctttgtgtcttcacgacagaacagagcagacaaatctgttcttggtcctgaagattttatggatgaagaggatcttagtgaatttgggatagcacctaaagcgattgtcaccacagacgattttgcctccaaaaccaaagacagaatacgagaaaaggctaggcagttggccgctgctactgcccctattcctggagccaccctccttgatgacctcataacgccagcaaaattatctgttggtttcgaattgctaagaaaaatgggttggaaagaaggacaaggagttggtcctcgagtaaagagacggccacgccgacagaaacctgatcctggagtcaaaatctatggctgtgcattaccccctggaagctcggaaggatctgagggtgaagatgatgactacttgcctgataatgtgacctttgcacccaaagatgtcacacctgtggatttcacacctaaagataatgtgcatggtctagcttacaagggcctggatccccaccaggcactgtttggaacttcgggagaacattttaatcttttcagtggtggttctgagagagctggcgatcttggagaaattggactgaataaaggaagaaaattgggaatttcaggccaggcttttggtgtaggtgccctggaagaggaagatgatgatatctatgccacagaaactctatccaagtatgacactgttctgaaggacgaggagcctggagacggactctatggctggacagcacccaggcagtataaaaaccagaaagaatcagagaaagaccttcggtacgttggcaaaattttggatggattttccttggcttctaaacctttatcttctaagaaaatctatccacctccagagctgccaagagactatcgaccagtgcattatttcagacccatggtggccgccacctccgagaactcacacttactgcaggtattatcagagtcagctggaaaggcaacgcctgacccagggacacacagtaagcaccaactgaatgcctccaaacgggctgagttgcttggagagacgcctattcaaggttcagctacttcagtgttagaatttctgtcccaaaaagacaaagagagaatcaaagaaatgaagcaggcaactgacctgaaagcagctcagctcaaggccaggagtctggcccagaacgctcagagcagcagagcccagctctcccctgcagcggctgctgggcactgctcttggaacatggcattaggtggtgggacggccaccttaaaagccagcaacttcaagcctttcgccaaagatccggaaaagcaaaagcgatacgacgagttcttagtacacatgaaacagggtcagaaagatgctctggaacgctgtctggaccccagcatgacagagtgggagcgaggccgtgagcgggatgagtttgcccgggcggccctgctgtacgcatcttcccattcgaccttgtcctccaggttcactcacgccaaggaggaggatgactcagatcaggttgaagtccctcgagaccaagagaatgatgtcggggataagcagtcggctgtgaagatgaagatgtttgggaagctcacccgagacacgtttgagtggcaccctgacaagcttctatgtaagagatttaatgtccctgacccttatccagattcaactttagttggcttaccaagagtgaagcgtgacaagtactcagtcttcaactttctgacgctcccagagacagcttccttgcccaccactcaagcatcaagtgaaaaagtatcacagcaccgaggtcccgacaaatcaagaaaaccatccagatgggatacctctaaacacgaaaagaaagaagattccattagtgaatttttaagtttggctagatcaaaagccgagccacctaaacaacagtccagccccttagtaaacaaagaggaagagcatgcaccagaattatccgcaaatcagaccgtcaacaaagatgtggacgcacaggctgaaggagaagggagccgcccatccatggacttattcagggccatctttgccagttcctcagatgaaaagtcctcatcctccgaggatgagcaaggtgacagtgaagatgatcaggcaggctctggggaggccaacttccaaagctcccaagacactgacttgggggaaacatcatctgtggctcacgctcttgtgccagcaccccaggagccgccaccttccttcccgatacaaaagatgcagatagatgaaagagaagagttcggcccgcggctgcctcccgtcttctgccccaatgctcgtcagacacttgaggttcctcaaaaagagaaacataaaaagaacaaagacaagcacaaggccaagaaagagcacaggcggaagaaagagaagaaaaagaaacacaggaagcacaaacacaaaggcaagcaaaagaataaaaaaccagagaaaagtagtagctccgagagttccgacagcagcgacagccagagtgacgaggaaaccgcagacgtgtcgccccaggagctgctgagacggctgaaaagtcttccactaagaaggcagtaattgaatgctgccctggctcgtcctagaatcatttctcctccatgatggaagcccagtgattgttcagttaacgcattgtacagagtgtatttatatgtaaattcctgctgtaaaataatttttaaaaccttgacatttcaaagactgccttgaaaggtcgcagaaattgatttctatttttaatttcagttagtatcgggggaaaaaaatccagactgaacagtttaattaaagtggaatttttctattttcaaaaaaaaaaaaaaaaaaaaaaaaaaaa

SEQ ID NO: 4551 - DNA, 6804 bp, Homo Sapiens
  NM_018027
gcagtgcaattccatgttcctcttaagtatgttagccctaccgggagctgagctggccagtctacttggagaggaaaagtagatctggggaaggtggaagggtcagttcctaagtgacttcctcctcggggatggtaagggcatttgctgatctccagtgactgcctggtgcctcatggtcagactcggctgtctcactcccagatatctgattttgcaaaaagggacacacctatctgcagcaaagaagacactgaccagattgcgagcggtgcttttggatgctctgtagccacccggggcccaggaggactgactcggcagcaggattcgtgcatgggaatcggagaccatggcagtgcagctggtgcccgactcagctctcggcctgctgatgatgacggagggccgccgatgtcaagtacatcttcttgatgacaggaagctggaactcctagtacagcccaagctgttggccaaggagcttcttgaccttgtggcttctcacttcaatctgaaggaaaaggagtactttggaatagcattcacagatgaaacgggacacttaaactggcttcagctagatcgaagagtattggaacatgacttccctaaaaagtcaggacccgtggttttatacttttgtgtcaggttctatatagaaagcatttcatacctgaaggataatgctaccattgagcttttctttctgaacgcgaagtcctgcatctacaaggagcttattgacgttgacagcgaagtggtgtttgaattagcttcctatattttacaggaggcaaagggagatttttctagcaatgaagttgtgaggagtgacttgaagaagctgccagcccttcccacccaagccctgaaggagcacccttccctggcctactgtgaagacagagtcattgagcactacaagaaactgaacggtcagacaagaggtcaagcaatcgtaaactacatgagcatcgtggagtctctcccaacctacggggttcactattatgcagtgaaggacaagcagggcataccatggtggctgggcctgagctacaaagggatcttccagtatgactaccatgataaagtgaagccaagaaagatattccaatggagacagttggaaaacctgtacttcagagaaaagaagttttccgtggaagttcatgacccacgcagggcttcagtgacaaggaggacgtttgggcacagcggcattgcagtgcacacgtggtatgcatgtccggcattgatcaagtccatctgggctatggccataagccaacaccagttctatctggacagaaagcagagtaagtccaaaatccatgcagcacgcagcctgagtgagatcgccatcgacctgaccgagacggggacgctgaagacctcgaagctggccaacatgggtagcaaggggaagatcatcagcggcagcagcggcagcctgctgtcttcaggttctcaggaatcagatagctcgcagtcggccaagaaggacatgctggctgccttgaagtccaggcaggaagctctggaggaaaccctgcgtcagaggctggaggaactgaagaagctgtgtctccgagaagctgagctcacgggcaagctgccagtagaatatcccctggatccaggggaggaaccacccattgttcggagaagaataggaacagccttcaaactggatgaacagaaaatcctgcccaaaggagaggaagctgagctggaacgcctggaacgagagtttgccattcagtcccagattacggaggccgcccgccgcctagccagtgaccccaacgtcagcaaaaaactgaagaaacaaaggaaaacctcgtatctgaatgcactgaagaaactgcaggagattgaaaatgcaatcaatgagaaccgcatcaagtctgggaagaaacccacccagagggcttcgctgatcatagacgatggaaacattgccagtgaagacagctccctctcagatgcccttgttcttgaggatgaagactctcaggttaccagcacaatatcccccctacattctcctcacaagggactccctcctcggccaccgtcgcacaacaggcctcctcctccccagtccctggagggactccgacagatgcactatcaccgcaacgactatgacaagtcacccatcaagcccaaaatgtggagtgagtcctctttagatgaaccctatgagaaggtcaagaagcgctcctctcacagccattccagcagccacaagcgcttccccagcacaggaagctgtgcggaagccggcggaggaagcaactccttgcagaacagccccatccgcggcctcccgcactggaactcccagtccagcatgccgtccacgccagacctgcgggtccggagtccccactacgtccattccacgaggtcggtggacatcagccccacccgactgcacagcctcgcactgcactttaggcaccggagctccagcctggagtcccagggcaagctcctgggctcggaaaacgacaccgggagccccgacttctacaccccgcggactcgtagcagcaacggctcagaccccatggacgactgctcgtcgtgcaccagccactcgagctcggagcactactacccggcgcagatgaacgccaactactccacgctggccgaggactcgccgtccaaggcgcgccagaggcagaggcagcggcagcgggcggcgggcgcactgggctcagccagctcgggcagcatgcccaacctggcggcgcgcgggggtgcggggggcgcggggggcgcggggggcggtgtgtacctgcacagccagagccagcccagctcgcagtaccgcatcaaggagtacccgctgtacatcgagggcggcgccacgcccgtggtggtgcgcagcctggagagcgaccaggagggccactacagcgtcaaggctcagttcaagacgtccaactcctacacggcgggcggcctgttcaaggagagctggcgcggcggcggcggcgacgagggcgacacgggccgcctgacgccgtcgcgatcgcagatcctgcggactccgtcgctgggccgcgagggcgcccacgacaagggcgcgggccgtgccgccgtctcagacgagctgcgccagtggtaccagcgttccaccgcctcgcacaaggagcacagccgcctgtcgcacaccagctccacctcctcggacagcggctcgcagtacagcacctcctcccagagcaccttcgtggcgcacagcagggtcaccaggatgccccagatgtgcaaggccacgtcagctgccttacctcaaagccagagaagctcgacaccgtcaagtgaaattggagccacccccccaagcagcccccaccacatcctaacctggcagactggagaagcaacagaaaactcacccattctggatgggtctgagtctccacctcaccaaagtactgatgaatagaggagctacaatgatagctgtttcctggattcctccctctatccagaactagctgatgtccagtggtacgggcaggaaaaagccaagcccgggaccctcgtgtgagccagcccggcctaatctgaccgcctcaacgccattctgagatcacctcactgcctctcatttgccttacccagacgcaccgtcaccctgcaccagctttggccctcagcactttttttctcctgtctccgcattccctcccccttgaaaacctgactgaggagacattctggaaggttccggtcccactgtgtgtcccctggcgctcttgcccatagagagccagacaccaatcctcaatggcaccttggtggcttccctctgccatgacagcccctaggccaggaaccatcaggggggccagccggcatccaattcctgcggataagtagcgttgggagagaacgggaaaggggacttgagttacagggtgacccagaaagacgattcagctgtgtccagcctgccacccatacgtaggccaaccaagcacttcatgaagaggaggcctcgtggcatattcagtttacacctgaaatattccttgatgggacagcttgtggggatggctatgggggaaggggaggttgagaaaggaagttctcgacaccagaaatgcatcggaggaccacaatcagttctatgctgccaaagattaaaaataaataaaaacataaaaaattaagaggggccaagaggaagacattctttctgcaaggaaatttcttttaaattctgaactgctactacacacaagtgaaagtcaaccctatgtaaactggtgtcctctctctagccctctcccttactggcccacttctctctccgtagagagcctgaaaaactgccccaatgccacggtaaaggcgaggaagtcttggctggcgttgctgactcacagtcgccatccatctggacacaaagagagacctgtgggagtcgtagagggtactgttagccccggtccatgcagggggttcagccgagcccaagactcaaagctgctttcctttcaggatttgtagtaacgtaaggtgataatggccaaaagtggttctctctcattaaaccaaccagtaaaagcgtatcctatttttttgcacaaggtgtttcattttcgtttttatgggaaaccaagggaaaagcacattgcgatccattcagtgtttaactgtcgtggctcattttctgttcgttagcacttgtgtgacaaaagagctcagatccgacttctcctatgtgtcacttattccaagaacccaactatgcccttaggtagaaagatttgactcgtgtgtctactagccaacaggcagagcagggttgaaaaaaatatcagctcccaaagggcccatgtgtctacatcatcagttactgtcatgcaccacatttgtgtgcagataccaaaagaggaggaaagaagaaaaaaattaatgtgtgggagctgcacgtttacatgttttgagctatgcttcaaacacaactggaaagccatcaatcttcaaaggcctcaaaaatacttttatagtaacaagtgcacgactttagttgggttattcaagatggcacaaaaaggtttccgcagaggtggtatgctgtgcttttggcgcaagtggtggggggatggggtgggggtggaatttttttctcactctaatgacttcctattggaaaggcattgacagccagggacaggagccagggtgggggtagttttgtgggaaagcagaactgaagttagcttaagcataaaaacaaagaaaaatcttcgcttttcatgtatgtggaatccaagaataaccataggctctaccagaccagaagggtaaggatggacactaaaatgaaacaaataccaaggtattccttctgctgcagcctggagaccaccgagagtcgagctggggcacacacacacctggccgggacccggcagggacaaggcgggccgtggcctcctccaccaagtctctctagacaattcagggcctgctttccccagctccatgcatggctggactggtgattccagggtgcagaagggattcatattcccagaacgctttaagtgtacacctgcaggataaagagataccggttacattattaaatgattctagggattcactgggggatatttttgttgcttttactttcatggttagagctacaaagaacagtgattttttttttttctcccttccccattcagaaacattatacattgggccatttttctttctcccaaagaagattcatggatagtcagactgaactgtgtgcaacaggaaaagtcaaaagggaaaaggtagctgatgaggttacatggttacatgttctacatcatgcatagtagcttgaaatctagtctggagaaaactggatcaagattctagcccactggagttgcaaggaatgagaggcaaaaattctaaagatttgggttatattttcaacttgggggacagagagaaatggagagcaggaattacagttccaacaaacatcatgatagtctggtagtcaagacagagattaagtaaaacaggttttactgtttagctgagttcagttaatacaaaatgtacataaaacgttagtcctttgagactgacatgattaatgatcagtgtggtgggaaatgatgtagttattgtacacaagcacttgcaaactctttatccctatttctttaaaacaaaataaggtgaaatacgaagtccttggtctgatataaagcccctattggattcttcggatgcgtaaaagaaattgcctgtttcagccagaagactggtgaaaacacatacatcagactatgttgtgagccaggttgattttttattttattatatgcaggtgagtgttgaaactgttaaaattccaatttgttttcattcagtattagtttagttctaaatatagcaaaccccatccaggtgctatcagatgaccagttactgcttagttaactaggtgtaaagttttacatatacattaatgtcaatagtttattacaagttgtgtaaaatggactctagtttaataatgggggaaaaaagattaggttgctcctgaaactgactgtagagcatgtaaaatgattttactggattctgttcaactgtaatcaatgaaaaagatgtacgttgtagacaaagttgcagaattaaaaaaagaaatctgcttttaatttattctttttgtattaagaatttgtatagtacctttacattttgcaaaacagtgttgtcaacacttattaaagcattttcaaaatgaaaaga

SEQ ID NO: 4552 - DNA, 1679 bp, Homo Sapiens
  NM_018029
gaaaggcagggaggggaggttgtcccctgctgagaaccattggtttaaggttaatctggctctgctttcatagactactctgttacccaggctggagtgcggtgatgagtgatcatagctcactgcagccttaaactctagtgatcctcccgccttggccttccaaagtgctgagattacagatgtgaaccaccacacccagcccagtcaatttgtttttagaatgttcccaagaatatagttatgttgctaaataagatactaaaataatcccatactatatttcttgacagaaaaactattaaaatgtatacatgataaaaatttcttttatgaagcaaaatatgttttgttttgctcatgaacgtgaggtattttggaaaaatggtaaagaagtgcagagtcaagtcatagcgactaataatgggttattttcttaaattgtatgcttatgttaattctcacagtctttttgtttgggtctgtgacagatcttacaaaagatcttttagacctatgattcttaacaaaattaaagaattaagtcggaaccaattttccacaatgtctcatctaagaaaggactcacagcccagcagcccaggagatgacgcaatggacaggagtgggctccctgaccttcaaggaagatttgagctatctgggaaaaacagacagtatccactggatgcattggaaccccaacccagcattggggatattaaggacattaaaaaagcagccaagtctatgctagacccagcacataaatctcatttccaccctgtgaccccaagtttagtattcttgtgtttcatatttgatgggttacaccaggcattactgagtgttggtgtgagcaagaggtctaatactgtggttgggaatgagaacgaggaaaggggtactccttatgctagcagattcaaagatatgcctaactttattgcccttgagaagtcatcagttctccgccactgctgtgaccttttgataggcattgcggctggatcaagtgataagatttgcaccagcagtctccaagttcagagacgattcaaggcaatgatggcatctattggaagactttcacatggtgagagtgctgatctgctaatcagctgcaatgcagaatcagccataggttggatcagctcaagaccgtgggttggagaattaatgttcacacttctatttggagactttgaatcccctctacacaagctacgcaagtcaagttagttgccaagaaagcacagatgacaacctattaatgctgtgagaatgtttctagatcagtgcatggatggctccattgctctacgggccattgtgtctgagatcccagtctttgaggagaaaaaaaacaatggttaaaaaggcattggggaaatattttgagtttgggggtgtactttgccaccccattattggggagctgtcaccacgaatgttcccaaacttagcaacagcggcaaactactgggccaagatgagcaaccccacatttttgggatttaaagctcctgatgttataccaggatcaaccatcacactccctttgcttcaaatggcatctaccccgtaagatcttgaggggggagtgttgggtggaatcatagatccatgcactcctaacatgaactaattctcattatttaaaaaaaaaaaaaaaaaaa

SEQ ID NO: 4553 - DNA, 4273 bp, Homo Sapiens
  NM_018031
acgtgagggggcgaggggcgggatgcccctccgcgggccccgccaatgatgagctggattgcgtgggacgaagggtcgtcattggacaaccgccgcgggcgccctggtctctgctacctgtagctgagggcgctgttgatgggcagcgcggcgcgctgggaaggctcgttctcgcgagagttcagctcccttcttagccgtggctgcctcagcacctcgaggatcgacatggacgctctcgaggactacgtttggccgcgggcaacctcggagcttatactcctcccagtgacgggtctggagtgcgtgggggaccggctgttggcgggtgagggtcccgatgtcctggtgtacagcttggactttggtgggcatctgcggatgataaagcgagtgcagaacctgcttggccactatcttatccatggcttccgggtacggccagagcctaatggagaccttgacttggaggccatggtggctgtgtttggaagcaagggactccgagttgtgaaaattagctggggacagggccacttctgggagctttggcgctctggcctgtggaacatgtctgactggatttgggatgcacgctggcttgagggaaatatagccttggccctgggccacaactcagtggtgctatatgaccctgtagtagggtgcatcctgcaagaggtgccctgcacagacaggtgcaccctctcttcagcctgcctgattggagacgcctggaaggagctgaccatagtggcaggtgctgtttccaaccagctcttggtctggtacccagcaactgccttagcagacaacaaacctgtagcacctgaccgacgaatcagtgggcatgtgggcatcatcttcagcatgtcatacctggaaagcaagggattgctggctacagcttcagaagaccgaagcgttcgtatctggaaggtgggcgacctgcgagtgcctgggggtcgggtgcagaatattgggcactgctttgggcacagcgcccgtgtgtggcaggtcaagcttctagagaattaccttatcagtgcaggagaggattgtgtctgcttggtgtggagccatgaaggtgagatcctccaggcctttcggggacaccagggacgtgggatccgggccatagctgcccatgagaggcaggcctgggtgatcactgggggtgatgactcaggcattcggctgtggcacttggtagggcgtgggtaccggggattgggggtctcggctctctgcttcaagtcccgtagtaggccaggtacactcaaggctgtgactctggctggctcttggcgactgctggcagtgactgatacaggggccctgtatctctatgacgtcgaggtcaagtgctgggagcagctgctagaggataaacatttccagtcctactgcctgctggaggcagctcctggtcccgagggcttcggattgtgtgctatggccaatggggaaggtcgtgtcaaggttgtccccatcaacactccaactgctgctgtggaccagaccctgtttcctgggaaggtgcacagcttgagctgggccctgcgtggttatgaggagctcctgttgctggcatcgggccctggcggggtagtagcttgcctagagatctcagccgcaccctctggcaaggccatctttgtcaaggaacgttgtcggtacctgctgcccccaagcaagcagagatggcacacatgcagtgccttcctacccccaggtgacttcctggtgtgtggtgaccgccggggctctgtgctgctattcccctccagaccaggtctgctcaaggaccctggggtgggaggcaaggctcgggctggtgctggggcacctgtagtgggtagtggtagtagtgggggtgggaatgctttcactgggttgggcccagtgtctaccctgccctctctgcacgggaagcagggtgtgacctcagtcacatgccatggtggctatgtgtataccacagggcgtgatggagcctactaccagctgtttgtacgagacggccagctccagccagtcctaaggcagaagtcctgtcgaggcatgaactggctagctgggctccgtatagtgcccgatgggagcatggttatcctgggtttccatgccaatgagtttgtggtgtggaaccctcggtcacacgagaagctgcacatcgtcaactgtggtggagggcaccgttcgtgggcattctctgatactgaggcggccatggcctttgcttacctcaaggatggggatgtcatgctgtacagggctctgggtggctgcacccggccacacgtgattctccgggagggtctgcatggccgtgagatcacttgtgtaaagcgtgtgggcaccattaccctggggcctgaatatggagtgcccagcttcatgcagcctgatgacctggagcctggcagtgaggggcccgacttgactgacattgtgatcacatgtagtgaggacactactgtctgtgtcctagcactccctacaaccacaggctcagcccacgcactcacagctgtttgtaaccatatctcctcggtacgtgctgtggctgtgtggggcattggcaccccaggtggccctcaggatcctcagccaggcctgactgcccatgtggtgtctgcgggggggcgggctgagatgcactgcttcagcatcatggttactccggaccccagcaccccaagccgcctcgcctgccatgtcatgcacctttcgtcccaccggctagatgagtattgggaccggcaacgcaatcggcatcggatggttaaggtagacccagagaccaggtacatgtcccttgctgtgtgtgaacttgaccagcccggccttggcccccttgtggctgcagcctgtagtgatggggccgtaaggctctttcttttgcaggattctgggcggattctgcagctccttgctgaaaccttccaccataagcgatgtgtcctcaaggtccactcctttacacacgaggcacccaaccagaggcggaggctcctcctgtgcagcgcagctactgatggcagcctggctttctgggatctcaccaccatgctagaccatgactccactgtcctggagcctccagtggatcctgggcttccctaccggcttggcaccccctccctgactctccaggcccacagctgtggtatcaacagcctgcacaccttgcccacccgtgagggccaccatctcgtggccagtggcagtgaagatggatccctccatgtcttcgtgcttgctgtggagatgctacagctagaagaggctgtgggagaggctgggctggtaccccagctgcgtgtgctagaggaatactctgtcccctgtgcacatgctgcccatgtgacaggcctcaagatcctaagcccaagcatcatggtctcagcctccattgatcaacggctgaccttctggcgtctggggcatggtgaacccaccttcatgaatagcactgtgttccatgtgcctgatgtggctgacatggactgctggcctgtgagccctgagtttggccaccgttgtgcccttgggggtcaggggcttgaggtttacaactggtatgactgaggtatcctgcggtggctggcgtgctgggcatggggcctgctcacagacagcatggagcagggatgggctgtctgtgcccatgctcagcatgccttgaggggaggaggtggtggccgtgggttcctgatgtcggtgcaggagctgaaggtgagtggagtgctgccaagaatatgcccgactccccatgacaagacagaactttgtaacaaacagtaccaatttattttggccgtgggtttttgctttttttccagttgatgactttgtgaacattcccaggtattggagcctctgtggccttaaatgtggctcagtggagggagacccagcatagccaggccagtatggagcacctcacgcacagctctcagaagctgcaggcggacgaacatctgaccaaagaggtgtggtcgaggctcctgaaagagaaagggcctgctggtctcatcctctgcttcctttgcctttaccctatacctctctgcacgtcccaccccattttgctgtgtgctcacccccaggatgtgtacccggttgtagtaggagctgaaatccatgctgagctgtaccaggaacttgcatatctagagacagagactgagtcactggcccatctctttgctcttgtgccccaggccagaataaagaatagagtgtagagtgtcaaaaaaaaaaaaaa

SEQ ID NO: 4554 - DNA, 2082 bp, Homo Sapiens
  NM_018032
gaaagagccgagtgggctcgaggccgacgcgaccatcgtttgtcgacgccgctgccaccgcctgcctgagagaagtcgtcgcggccgaccccgtcgcctccgccggctaccatgtccgcccaggcgcagatgcgggccctgctggaccagctcatgggcacggctcgggacggagacgaaaccagacagagggtcaagtttacagatgaccgtgtctgcaagagtcaccttctggactgctgcccccatgacatcctggctgggacgcgcatggatttaggagaatgtaccaaaatccacgacttggccctccgagcagattatgagattgcaagtaaagaaagagacctgttttttgaattagatgcaatggatcacttggagtcctttattgctgaatgtgatcggagaactgagctcgccaagaagcggctggcagaaacacaggaggaaatcagtgcggaagtttctgcaaaggcagaaaaagtacatgagttaaatgaagaaataggaaaactccttgctaaagccgaacagctaggggctgaaggtaatgtggatgaatcccagaagattcttatggaagtggaaaaagttcgtgcgaagaaaaaagaagctgaggaagaatacagaaattccatgcctgcatccagttttcagcagcaaaagctgcgtgtctgcgaggtctgttcagcctaccttggtctccatgacaatgaccgtcgcctggcagaccacttcggtggcaagttacacttggggttcattcagatccgagagaagcttgatcagttgaggaaaactgtcgctgaaaagcaggagaagagaaatcaggatcgcttgaggaggagagaggagagggaacgggaggagcgtctgagcaggaggtcgggatcaagaaccagagatcgcaggaggtcacgctcccgggatcggcgtcggaggcggtcaagatctacctcccgagagcgacggaaattgtcccggtcccggtcccgagatagacatcggcgccaccgcagccgttcccggagccacagccggggacatcgtcgggcttcccgggaccgaagtgcgaaatacaagtaactactctgactccttcggtagctgcaaccaggagtgagcccttctctgtgttcccagggtctgctgagggccgtgtctggtggggatggggctgggctcaccctcaggagtagggctggggagtcgtgaacgggactcaggtgtgggaagaggcgagagggctgtggaggagctcgcacggcgccaggtgatgggctgcacaggcactgtcccctgcctgcgtcctggggcctgtgcactgttgcgtccatgctcagagtggctgagacttgtgtcctgaccaggccctgcttacctctgttttggtttttgtttttgatatttttttttccattgtgtttttacgtagtgtcatgttctgtgcatatagtgttgtattctcctttgcactgtttatgttacagtgaaggctctccttattaaaaatcttcgcaaaggtcactttttaatggctatctaacactccatatgtggtgggcaagtctggttggcctccggggggtttccaggtataggggatgtagggccttgcctggcctggtctgcgggtccatcgtcagtgcctgagcggccagcagaaggggggcagcagcctccactgagcctctggttcccatttcccaggttctccagagagcgggcatccagagaggagtcctgggagagcgggcggagcgagcgagggcccccggactggaggcttgagagctccaacgggaagatggcttcacggaggtcagaagagaaggaggccggcgagatctgaacccgtctcccgggtgctgtaaatagtctgataaacgttcacacagtctaaaattaccctttatatttgctgaatacaactcatcttttgtagtttaaaatttctattgttttggagctagctgtgagtttctagaagtgtacagagttgctcctgtgttcccgggtcatgttgagtaggaataaataaatctgatgctgcctcctgaggctgcggggggtttctgc

SEQ ID NO: 4555 - DNA, 2336 bp, Homo Sapiens
  NM_018040
aaaatgctgaactgctctttggaagtcgccggtgctgttgtagttggagtctgttcacgggcctgagcttcgaggccaggctcccgggtgtcgttaatgttcggggccgccgggcgccaaccgatcggagctccagcagccgggaacagctggcatttcagtagaaccatggaggagctggttcatgaccttgtctcagcattggaagagagctcagagcaagctcgaggtggatttgctgaaacaggagaccattctcgaagtatatcttgccctctgaaacgccaggcaaggaaaaggagagggagaaaacggaggtcgtataatgtgcatcacccgtgggagactggtcactgcttaagtgaaggctctgattctagtttagaagaaccaagcaaggactatagagagaatcacaataataataaaaaagatcacagtgactctgatgaccaaatgttagtagcaaagcgcaggccgtcatcaaacttaaataataatgttcgagggaaaagacctctatggcatgagtctgattttgctgtggacaatgttgggaatagaactctgcgcaggaggagaaaggtaaaacgcatggcagtagatctcccacaggacatctctaacaaacggacaatgacccagccacctgagggttgtagagatcaggacatggacagtgatagagcctaccagtatcaagaatttaccaagaacaaagtcaaaaaaagaaagttgaaaataatcagacaaggaccaaaaatccaagatgaaggagtagttttagaaagtgaggaaacgaaccagaccaataaggacaaaatggaatgtgaagagcaaaaagtctcagatgagctcatgagtgaaagtgattccagcagtctcagcagcactgatgctggattgtttaccaatgatgagggaagacaaggtgatgatgaacagagtgactggttctacgaaaaggaatcaggtggagcatgtggtatcactggagttgtgccctggtgggaaaaggaagatcctactgagctagacaaaaatgtaccagatcctgtctttgaaagtatcttaactggttcttttccccttatgtcacacccaagcagaagaggtttccaagctagactcagtcgccttcatggaatgtcttcaaagaatattaaaaaatctggagggactccaacttcaatggtacccattcctggcccagtgggtaacaagagaatggttcatttttccccggattctcatcaccatgaccattggtttagccctggggctaggacagagcatgaccagcatcagcttctgagagataatcgagctgaaagaggacacaagaaaaattgttctgtgagaacagccagcaggcaaacaagcatgcatttaggatccttatgcacgggagatatcaaacggagaagaaaagctgcacctttgcctggacctactactgcaggatttgtaggtgaaaatgcccagccaatcctagaaaataatattggaaaccgaatgcttcagaatatgggctggacgcctgggtcaggccttggacgagatggcaaggggatctctgagccaattcaagccatgcagaggccaaagggattaggacttggatttcctctaccaaaaagtacttccgcaactactacccccaatgcaggaaaatccgcctaagaaaagcaaagaagaaatgttttacagactttattcactatgtcccattgttctaaaatgataacatgacttctgtttttgaagcaaaaatctacattgcctcaaacacatcactctagcttccttactgcatacagtcctgccatagtgagagaaatgggatttcatcacaattcatggtgctaaaatgaaaacctctgcactttaatttttttcagtaatttccagctatttctaggtataaagagcagctcgtttctcttatttattttagtctcatgtgtcaatactttccgatgctttgcttaattcatgtatgtgtgcagtgctgcaatgcccagacaaacgtgagcacacccaccagtttctaaaatggaatagacaggaaaagattgtgttttatatcatccctatctattgtaacccaaaagacctaccatcgcatcagtgaagtccgaacacatctttgtttgaaaggcttgtcaatttcatattccttgaattggcttcttggtgaggattttctgacagagtgatacccatcaattttctatccttagacaatgtagtgtgaagttcacagttgacaaacaacaattaatgtttcccttggatgttttgacaaaaataaacctcatcgttgttatcaccag

SEQ ID NO: 4556 - DNA, 2297 bp, Homo Sapiens
  NM_018050
aaccacaaaacccgccaggccggtgcgggagctgcggagcatccgctgcggtcctcgccgagacccccgcgcggattcgccggtccttcccgcgggcgcgacagagctgtcctcgcacctggatggcagcaggggcgccggggtcctctcgacgccagagagaaatctcatcatctgtgcagccttcttaaagcaaactaagaccagagggaggattatccttgacctttgaagaccaaaactaaactgaaatttaaaatgttcttcgggggagaagggagcttgacttacactttggtaataatttgcttcctgacactaaggctgtctgctagtcagaattgcctcaaaaagagtctagaagatgttgtcattgacatccagtcatctctttctaagggaatcagaggcaatgagcccgtatatacttcaactcaagaagactgcattaattcttgctgttcaacaaaaaacatatcaggggacaaagcatgtaacttgatgatcttcgacactcgaaaaacagctagacaacccaactgctacctatttttctgtcccaacgaggaagcctgtccattgaaaccagcaaaaggacttatgagttacaggataattacagattttccatctttgaccagaaatttgccaagccaagagttaccccaggaagattctctcttacatggccaattttcacaagcagtcactcccctagcccatcatcacacagattattcaaagcccaccgatatctcatggagagacacactttctcagaagtttggatcctcagatcacttggagaaactatttaagatggatgaagcaagtgcccagctccttgcttataaggaaaaaggccattctcagagttcacaattttcctctgatcaagaaatagctcatctgctgcctgaaaatgtgagtgcgctcccagctacggtggcagttgcttctccacataccacctcggctactccaaagcccgccacccttctacccaccaatgcttcagtgacaccttctgggacttcccagccacagctggccaccacagctccacctgtaaccactgtcacttctcagcctcccacgaccctcatttctacagtttttacacgggctgcggctacactccaagcaatggctacaacagcagttctgactaccacctttcaggcacctacggactcgaaaggcagcttagaaaccataccgtttacagaaatctccaacctaactttgaacacagggaatgtgtataaccctactgcactttctatgtcaaatgtggagtcttccactatgaataaaactgcttcctgggaaggtagggaggccagtccaggcagttcctcccagggcagtgttccagaaaatcagtacggccttccatttgaaaaatggcttcttatcgggtccctgctctttggtgtcctgttcctggtgataggcctcgtcctcctgggtagaatcctctcggaatcactccgcaggaaacgttactcaagactggattatttgatcaatgggatctatgtggacatctaaggatggaactcggtgtctcttaattcatttagtaaccagaagcccaaatgcaatgagtttctgctgacttgctagtcttagcaggaggttgtattttgaagacaggaaaatgcccccttctgctttccttttttttttttggagacagagtcttgctttgttgcccaggctggagtgcagtagcacgatctcggctctcaccgcaacctccgtctcctgggttcaagcgattctcctgcctcagcctcctaagtatctgggattacaggcatgtgccaccacacctgggtgatttttgtatttttagtagagacggggtttcaccatgttggtcaggctggtctcaaactcctgacctagtgatccaccctcctcggcctcccaaagtgctgggattacaggcatgagccaccacagctggcccccttctgttttatgtttggtttttgagaaggaatgaagtgggaaccaaattaggtaattttgggtaatctgtctctaaaatattagctaaaaacaaagctctatgtaaagtaataaagtataattgccatataaatttcaaaattcaactggcttttatgcaaagaaacaggttaggacatctaggttccaattcattcacattcttggttccagataaaatcaactgtttatatcaatttctaatggatttgcttttctttttatatggattcctttaaaacttattccagatgtagttccttccaattaaatatttg

SEQ ID NO: 4557 - DNA, 3789 bp, Homo Sapiens
  NM_018051
ctgggcagtgcttctgggccctctgctgctcctgcttgtcggttgctaggcgctgggacgcgcctcccgaagggtgcggggcacaggtggcctcttcggggtggaccgcgcctggccggggccgaggacaccgcggccgcccgggcctgcgggaagcgatggagcccgggaagagaagaaccaaagatgatacctggaaagcagatgacctcagaaaacatctctgggccatacagtcaggtggttccaaggaagaaagaaagcacagagagaagaagctgcgtaaggagtctgagatggaccttcctgaacataaggagccgaggtgcagggatcccgaccaggatgccaggagcagagacagggtggccgaagtccacaccgctaaggagagtcctcgtggggagagggacagagacagacagagggagaggagaagagacgcaaaagaccgggagaaagaaaagctgaaggagaaacatcgagaggcagaaaagtctcacagcagaggaaaggacagggaaaaagaaaaagacagaagggcccggaaggaagagctccggcagaccgtggcccaccacaacctgctgggccaggagacacgcgaccggcagctcctggagcgggcggagaggaaaggccgctcagtaagtaaagtaagaagtgaagagaaagatgaagactctgaaagaggagatgaagatagagaaagaagataccgagaaagaaagctgcagtacggagacagcaaggacaaccctctcaagtactggctttataaagaagaaggcgagaggagacacaggaagcccagagagccagatcgagacaacaaacaccgagaaaaaagcagcacaagggaaaaaagagagaaatattccaaagagaaaagtaattcattctctgacaaaggggaagaaagacataaagaaaagcgacacaaagaaggttttcattttgatgatgagaggcaccaaagcaacgtggatagaaaagagaaatcggcaaaagatgagcccaggaaaagggaatcccagaatggtgaacacagaaatcgaggtgcaagctcaaaaagagatgggaccagcagccagcatgctgagaatttagtaaggaatcatggaaaagataaagattcaagacggaagcatggccacgaggaaggctcttctgtgtggtggaagctggaccagaggccgggaggcgaggaaaccgtggaaattgaaaaggaagaaactgatttagaaaatgctagagctgatgcatatacagccagttgtgaagatgattttgaagactatgaagatgactttgaggtttgtgatggtgatgatgatgaaagcagtaatgaacctgagtcaagagaaaaactggaagaacttcctctagctcaaaaaaaggaaatacaagaaattcaaagagctattaatgcagaaaatgaaaggattggcgagttatctttgaaactgtttcagaagcgaggtagaacagaatttgaaaaggagcccaggacagatacaaacagttccccttccagagcctctgtttgtggaatttttgtggattttgcctcagcttcacaccgtcaaaagagtcggactcaggcccttaagcaaaagatgcgaagtacaaaactgcttcggctcattgacttagatttttcatttactttctctctcttggatctaccaccagtaaatgaatatgacatgtatatcagaaactttgggaaaaaaaataccaagcaggcatatgttcagtgtaacgaagataatgttgaaagagacattcaaacggaggaaatagagaccagggaagtgtggacccagcacccgggagaaagtactgttgtatctggaggcagtgaacaaagagatacctctgatgctgtagttatgccaaagattgatactccaaggttatgtagctttctgcgggctgcttgtcaggtgatggccgttttgctggaagaggatcgcttggcagctgaacccagctggaatcttagggctcaagacagggccctgtattttagtgacagctcatctcagctgaacaccagtctaccattccttcaaaatcgaaaagtatcctccttgcacacctcccgagttcagaggcagatggtggtctccgttcacgacttacccgagaagagctttgtgcccctgctggacagcaaatacgtcctctgtgtgtgggatatttggcagccttcagggccacagaaagttctgatatgtgagtcccaggtcacgtgttgctgcttgagccctttgaaagcatttttactgtttgccggaacagcgcacggctcagttgtcgtctgggatttgagagaagactcaaggctgcattactctgtgacgctgagcgatggcttctggacgttccggaccgccacgttttccaccgatggaatccttacctcagtaaaccaccgaagccctcttcaagcagtagaacctatctcaacgtccgtccacaaaaagcagagctttgtgctttcacccttttctactcaagaagaaatgtcaggtttgtccttccacatcgcttccttggatgagagtggggttctcaatgtatgggtggttgttgaattaccaaaggcagacatcgcaggttcaataagtgatttaggtctgatgcctggagggagggtcaagctggtacatagtgctctgatccagttgggtgacagtctttcccataaaggtaatgaattttggggcactacacaaacactgaatgttaaatttctgccttcagatcctaatcactttattattggcacagacatgggtctcataagccatggcacaagacaagatttgagagtggctcccaaactattcaaacctcagcaacatggtataagaccagtgaaagttaatgtcattgatttttcaccatttggagaaccaatatttttggccggctgttcggacggaagcatcaggctgcaccagctgagctccgcgtttccgctcctgcagtgggacagcagcacggacagccatgcggtcaccggcctgcagtggtccccaaccaggcctgccgtgttcctggtgcaggacgacacatccaacatctacatctgggacctcctccagagcgatctgggtcctgtcgccaaacagcaggtctcccccaacaggctggtggccatggctgcggtgggtgagcctgagaaggctggtggcagcttcctggccctggtgctggccagggcgtctggctccatcgacatccagcacctgaagaggcggtgggcggccccggaggtggacgagtgcaacaggctgcgtctgcttttgcaggaagccctgtggccagagggaaaactgcacaagtagcgggtgtggctgagaggaccgcgtttctgtaatgacccagatttaaaagacataaggtggataattctacatttgtgtgcaagtatatttatgtatatagactatgtatattctgtatataatttattttacatgaatatgtctttggtattcccagtaaatagatgactacttttgagtggaaacaaagaacattctagcatttacaaaacttccaggggaatgtagagccacgtccagggtgctcttttctgagagtatttcgagttatttttagaacagtttaaatattgtcacattactgctagattttaaacagcctaccatgaaaatgtatcttaatgaactattttcttatgcataaagtatgtgaacacatgtctaaattaaaaggaattactccaccgaaatgaaaaaaaaaaaaaaaaaa

SEQ ID NO: 4558 - DNA, 3107 bp, Homo Sapiens
  NM_018052
gactcgagtaacatggccgctgtctcgtgagtcccgctagtgccgggcgggagttgttaagcggccagggtcaggtgtgctggagcggggtccgggcccgggttccagggcgaggcggcggagcgtggcaggcaagcctagagcggcgtggtccatgcgccggcgccgggggcagagcggagccgcagactcccctggccccggcgcggccccggcagccgcgggctaaggagtcgcgaggttcccccagctgccaccatgaaccccgagaaggatttcgcgccgctcacgcctaacatcgtgcgcgccctcaatgacaagctgtacgaaaagcggaaggtggcagcgctggagatcgagaagctggtccgggagttcgtggcccagaacaataccgtgcaaatcaagcatgtgatccagaccctgtcccaggagtttgccctgtctcagcacccccacagccggaaagggggcctcatcggcctggccgcctgctccatcgcactgggcaaggactcagggctctacctgaaggagctgatcgagccagtgctgacctgcttcaatgatgcagacagcaggctgcgctactatgcctgcgaggccctctacaacatcgtcaaggtggcccggggcgctgtgctgccccacttcaacgtgctctttgacgggctgagcaagctggcagccgacccagaccccaatgtgaaaagcggatctgagctcctagaccgccttttaaaggacattgtgactgagagcaacaagtttgacctggtgagcttcatccccttgttgcgagagaggatttactccaacaaccagtatgcccggcagttcatcatctcctggatcctggttctggagtcggtgccagacattaacctgctggattacctgccggagatcctggatggactcttccagatcctgggtgacaatggcaaagagattcgcaaaatgtgtgaggttgttcttggagaattcttaaaagaaattaagaagaacccctccagtgtgaagtttgctgagatggccaacatcctggtgatccactgccagacaacagatgacctcatccagctgacagccatgtgctggatgcgggagttcatccagctggcgggccgcgtcatgctgccttactcctccgggatcctgactgctgtcttgccctgcttggcctacgatgaccgcaagaaaagcatcaaagaagtggccaacgtgtgcaaccagagcctgatgaagctggtcacccccgaggacgacgagctggatgagctgagacctgggcagaggcaggcagagcccacccctgacgatgccctgccaaagcaggagggcacagccagtggaggtccagatggttcctgtgactccagcttcagtagcggcatcagtgtcttcactgcagccagcactgaaagagccccagtgacccttcacctcgacgggatcgtgcaggtcctaaactgccacctcagtgacacggccattgggatgatgaccaggattgcagttctcaagtggctctaccacctctacatcaaaactcctcggaagatgttccggcacacggacagcctctttcccatcctactgcagacgttatcggatgaatcggatgaggtgatcctgaaggacctggaggtgctggcagaaatcgcttcctcccccgcaggccagacggatgacccaggccccctcgatggccctgacctccaggccagccactcagagctccaggtgcccacccctggcagagccggcctactgaacacctctggtaccaaaggcttagaatgttctccttcaactcccaccatgaattcttacttttataagttcatgatcaaccttctcaagagattcagcagcgaacggaagctcctggaggtcagaggccctttcatcatcaggcagctgtgcctcctgctgaatgcggagaacatcttccactcaatggcagacatcctgctgcgggaggaggacctcaagttcgcctcgaccatggtccacgccctcaacaccatcctgctgacctccacagagctcttccagctaaggaaccagctgaaggacctgaagaccctggagagccagaacctgttctgctgcctgtaccgctcctggtgccacaacccagtcaccacggtgtccctctgcttcctcacccagaactaccggcacgcctatgacctcatccagaagtttggggacctggaggtcaccgtggacttcctcgcagaggtggacaagctggtgcagctgattgagtgccccatcttcacatatctgcgcctgcagctgctggacgtgaagaacaacccctacctgatcaaggccctctacggcctgctcatgctcctgccgcagagcagcgccttccagctgctctcgcaccggctccagtgcgtgcccaaccctgagctgctgcagaccgaagacagtctaaaggcagcccccaagtcccagaaagctgactcccctagcatcgactacgcagagctgctgcagcactttgagaaggtccagaacaagcacctggaagtgcggcaccagcggagcgggcgtggggaccacctggaccggagggttgtcctctgacaggcctggcacggaggagggcccaccgagtggtcccatgaaacactaagggtcgtcacgccctcccgaggagctcaaggacctgcctgtcaggaccagggctgggcctgccaacccagggcagtgttggggccggaggctgctgtgtctgcccaagctcctctcagagtccagtccccaggcctccagcgctgtcagctgcaccctggcattctcacagagctggctgcccacccagtggggggctatagcctcagagaccactcatcctctggaatcaacctctttctaataccctcttggaaaaagagcttgcccctcctccagcacactagagctctggccttgtgtgtatatgtatacatacgtgaacacatgcctgtgtgtgtgtgtgtgtgtgtgtacttgtatgcacgtaggcaccagcacaaagatctgaatgatgcaccccacccccaccccaataaagaaataacagaaaaccctcaaaaaaaaaaaaa

SEQ ID NO: 4559 - DNA, 3246 bp, Homo Sapiens
  NM_018054
cgccgtttgggccgggaagcgatgtagtagctgccaggctgtcccccgccctgcccggcccgagccccgcgggccgccgccgccaccgccgccatgaagaagcagttcaaccgcatgaagcagctggctaaccagaccgtgggcagagctgagaaaacagaagtccttagtgaagatctattacagattgagagacgcctggacacggtgcggtcaatatgccaccattcccataagcgcttggtggcatgtttccagggccagcatggcaccgatgccgagaggagacacaaaaaactgcctctgacagctcttgctcaaaatatgcaagaagcatcgactcagctggaagactctctcctggggaagatgctggagacgtgtggagatgctgagaatcagctggctctcgagctctcccagcacgaagtctttgttgagaaggagatcgtggaccctctgtacggcatagctgaggtggagattcccaacatccagaagcagaggaagcagcttgcaagattggtgttagactgggattcagtcagagccaggtggaaccaagctcacaaatcctcaggaaccaactttcaggggcttccatcaaaaatagatactctaaaggaagagatggatgaagctggaaataaagtagaacagtgcaaggatcaacttgcagcagacatgtacaactttatggccaaagaaggggagtatggcaaattctttgttacgttattagaagcccaagcagattaccatagaaaagcattagcagtcttagaaaagaccctccccgaaatgcgagcccatcaagataagtgggcggaaaaaccagcctttgggactcccctagaagaacacctgaagaggagcgggcgcgagattgcgctgcccattgaagcctgtgtcatgctgcttctggagacaggcatgaaggaggagggccttttccgaattggggctggggcctccaagttaaagaagctgaaagctgctttggactgttctacttctcacctggatgagttctattcagacccccatgctgtagcaggtgctttaaaatcctatttacgggaattgcctgaacctttgatgacttttaatctgtatgaagaatggacacaagttgcaagtgtgcaggatcaagacaaaaaacttcaagacttgtggagaacatgtcagaagttgccaccacaaaattttgttaactttagatatttgatcaagttccttgcaaagcttgctcagaccagcgatgtgaataaaatgactcccagcaacattgcgattgtgttaggccctaacttgttatgggccagaaatgaaggaacacttgctgaaatggcagcagccacatccgtccatgtggttgcagtgattgaacccatcattcagcatgccgactggttcttccctgaagaggtggaatttaatgtatcagaagcatttgtacctctcaccaccccgagttctaatcactcattccacactggaaacgactctgactcggggaccctggagaggaagcggcctgctagcatggcggtgatggaaggagacttggtgaagaaggaaagtcctcccaaaccgaaggaccctgtatctgcagctgtgccagcaccagggagaaacaacagtcagatagcatctggccaaaatcagccccaggcagctgctggctcccaccagctctccatgggccaacctcacaatgctgcagggcccagcccgcatacactgcgccgagctgttaaaaaacccgctccagcacccccgaaaccgggcaacccacctcctggccaccccgggggccagagttcttcaggaacatctcagcatccacccagtctgtcaccaaagccacccacccgaagcccctctcctcccacccagcacacgggccagcctccaggccagccctccgccccctcccagctctcagcaccccggaggtactccagcagcttgtctccaatccaagctcccaatcacccaccgccgcagccccctacgcaggccacgccactgatgcacaccaaacccaatagccagggccctcccaaccccatggcattgcccagtgagcatggacttgagcagccatctcacacccctccccagactccaacgccccccagtactccgcccctaggaaaacagaaccccagtctgccagctcctcagaccctggcagggggtaaccctgaaactgcacagccacatgctggaaccttaccgagaccgagaccagtaccaaagccaaggaaccggcccagcgtgcccccacccccccaacctcctggtgtccactcagctggggacagcagcctcaccaacacagcaccaacagcttccaagatagtaacagactccaattccagggtttcagaaccgcatcgcagcatctttcctgaaatgcactcagactcagccagcaaagacgtgcctggccgcatcctgctggatatagacaatgataccgagagcactgccctgtgaagaaagccctttcccagccctccaccacttccaccctggcgagtggagcaggggcaggcgaacctctttctttgcagaccgaacagtgaaaagctttcagtggaggacaaaggagggcctcactgtgcgggacctggccttctgcacggcccaaggagaacctggaggccaccactaaagctgaatgacctgtgtcttgaagaagttggctttctttacatgggaaggaaatcatgccaaaaaaatccaaaacaaagaagtacctggagtggagagagtattcctgctgaaacgcgcataggaagcttttgtccctgctgttaatgcgggcagcacctacagcaacttggaatgagtaagaagcagtgcgttaactatctatttaataaaatgcgctcattatgcaagtcgcctactctctgctacctggacgttcattcttatgtattaggagggaggctgcgctccttcagacttgctgcagaatcattttgtatcatgtatggtctgtgtctccccagtcccctcagaaccatgcccatggatggtgactgctggctctgtcacctcatcaaactggatgtgacccatgccgcctcgttggattgtcggaatgtagacagaaatgtactgttcttttttttttttttaaacaatgtaattgctacttgataaggaccgaacattattctagtttcatgtttaatttgaattaaatatattctgtggtttatatgaaaa

SEQ ID NO: 4560 - DNA, 2086 bp, Homo Sapiens
  NM_018055
ataagggctggaggtgctgctttcaggcctggccagcccaccatgcacgcccactgcctgcccttccttctgcacgcctggtgggccctactccaggcgggtgctgcgacggtggccactgcgctcctgcgtacgcgggggcagccctcgtcgccatcccctctggcgtacatgctgagcctctaccgcgacccgctgccgagggcagacatcatccgcagcctacaggcagaagatgtggcagtggatgggcagaactggacgtttgcttttgacttctccttcctgagccaacaagaggatctggcatgggctgagctccggctgcagctgtccagccctgtggacctccccactgagggctcacttgccattgagattttccaccagccaaagcccgacacagagcaggcttcagacagctgcttagagcggtttcagatggacctattcactgtcactttgtcccaggtcaccttttccttgggcagcatggttttggaggtgaccaggcctctctccaagtggctgaagcaccctggggccctggagaagcagatgtccagggtagctggagagtgctggccgcggccccccacaccgcctgccaccaatgtgctccttatgctctactccaacctctcgcaggagcagaggcagctgggtgggtccaccttgctgtgggaagccgagagctcctggcgggcccaggagggacagctgtcctgggagtggggcaagaggcaccgtcgacatcacttgccagacagaagtcaactgtgtcggaaggtcaagttccaggtggacttcaacctgatcggatggggctcctggatcatctaccccaagcagtacaacgcctatcgctgtgagggcgagtgtcctaatcctgttggggaggagtttcatccgaccaaccatgcatacatccagagtctgctgaaacgttaccagccccaccgagtcccttccacttgttgtgccccagtgaagaccaagccgctgagcatgctgtatgtggataatggcagagtgctcctagatcaccataaagacatgatcgtggaagaatgtgggtgcctctgatgacatcctggagggagactggatttgcctgcactctggaaggctgggaaactcctggaagacatgataaccatctaatccagtaaggagaaacagagaggggcaaagttgctctgcccaccagaactgaagaggaggggctgcccactctgtaaatgaagggctcagtggagtctggccaagcacagaggctgctgtcaggaagagggaggaagaagcctgtgcagggggctggctggatgttctctttactgaaaagacagtggcaaggaaaagcacaagtgcatgagttctttactggattttttaaaaacctgtgaaccccccgaaactgtatgtgaaagttgagacatatgtgcatgtattttggaggtgggatgaagtcacctatagctttcatgtattctccaaagtagtctgtgtgtgacctgtccccctccccaaagattaaggatcactgtatagattaaaaagagtccgtcaatctcattgcctcaggctgggttgggggagccccacagctttctggctggccagtggcaatctactggccttgtccagaggctcactggagtggttctctgctaatgagctgtacaacaataaagccattgtctagttctcctgggccagctggtgcctgtgaaggcagaggcaggaactcatccaagaggaccggccatgttgggttacagaagacatccctgcgtcagtctgcttcggcagacacagcctgagtttgttaaagttggtgacaatccacctcagtctctcaatgtgtgctattaatgaggcctctgagcttcctatccagcagtggtgaaggccttgccctgggtggcaagatacttgctctatggtcacagctcagccactggaagctgtgcgacctcaggtgagcaattcactgtccagtctccacttgtaaaaggaacgctggtgaatcctaatgcattcatattaaatgtctgttgtcaggctcagaagagccatgagcttt

SEQ ID NO: 4561 - DNA, 1834 bp, Homo Sapiens
  NM_018056
gtatgcaaatgtagcggcgcggcgggagcgcgcggctgatacccgggactgggctgcggcggttagtcctctcccggccgccgtcgcctccgacatattgcccgcaggagctgcggcggcgaagcggagagcaccggggggaggagatgggaggacgaagaggtcccaacaggacatcttactgtcgaaatccgctctgtgagccgggatcctcggggggctctagtggaagccacacttccagtgcatcggtgaccagtgttcgttcccgcaccaggagcagttctggaacaggcctctccagccctcctctggccacccaaactgttgtgcctctacagcactgcaagatccccgagctgccagtccaggccagcattctgtttgagttgcagctcttcttctgccagctcatagcactcttcgtccactacatcaacatctacaagacagtgtggtggtatccaccttcccacccaccctcccacacctccctgaacttccatctgatcgacttcaacttgctgatggtgaccaccatcgttctgggccgccgcttcattgggtccatcgtgaaggaggcctctcagagggggaaggtctccctctttcgctccatcctgctgttcctcactcgcttcaccgttctcacggcaacaggctggagtctgtgccgatccctcatccacctcttcaggacctactccttcctgaacctcctgttcctctgctatccgtttgggatgtacattccgttcctgcagctgaattgcgacctccgcaagacaagcctcttcaaccacatggcctccatggggccccgggaggcggtcagtggcctggcaaagagccgggactacctcctgacactgcgggagacgtggaagcagcacacaagacagctgtatggcccggacgccatgcccacccatgcctgctgcctgtcacccagcctcatccgcagtgaggtggagttcctcaagatggacttcaactggcgcatgaaggaagtgctcgtcagctccatgctgagcgcctactatgtggcctttgtgcctgtctggttcgtgaagaacacacattactatgacaagcgctggtcctgtgaactcttcctgctggtgtccatcagcacctccgtgatcctcatgcagcacctgctgcctgccagctactgtgacctgctgcacaaggccgccgcccatctgggctgttggcagaaggtggacccagcgctgtgctccaacgtgctgcagcacccgtggactgaagaatgcatgtggccgcagggcgtgctggtgaagcacagcaagaacgtctacaaagccgtaggccactacaacgtggctatcccctctgacgtctcccacttccgcttccatttctttttcagcaaacccctgcggatcctcaacatcctcctgctgctggagggcgctgtcattgtctatcagctgtactccctaatgtcctctgaaaagtggcaccagaccatctcgctggccctcatcctcttcagcaactactatgccttcttcaagctgctccgggaccgcttggtattgggcaaggcctactcatactctgctagcccccagagagacctggaccaccgtttctcctgagccctggggtcacctcagggacagcgtccaggcttcagccaagggctccctggcaaggggctgttgggtagaagtggtggtgggggggacaaaagacaaaaaaatccaccagagctttgtatttttgttacgtactgtttctttgataattgatgtgataaggaaaaaagtcctatttttatactcccaacaaaaaaaaaaaaaaaaaa

SEQ ID NO: 4562 - DNA, 1738 bp, Homo Sapiens
  NM_018062
agcggactgcgcatgtgcaggacccagcaggtctagagcttttctgtgtttctccggacttcgagccatggcggtgacggaagcgagcctgttgcgccagtgccccctgcttctgccccagaaccggtcgaaaaccgtgtatgagggattcatctcggctcagggaagagacttccaccttaggatagtgttgcctgaagatttacaactgaagaatgcaagattattatgtagttggcagctgagaacaatacttagtggataccatcgaatagtacaacagagaatgcagcactctcctgatctaatgagctttatgatggagttgaagatgcttttggaagttgccttaaagaatagacaagagctgtatgcactacctcctcctccccagttctactcaagccttattgaagagataggaactcttggttgggataaacttgtgtatgcggatacctgcttcagtaccatcaagttaaaagcagaagatgcttctggtagagagcatttaatcactctcaagttgaaggcaaagtatcctgcagaatcaccagattattttgtggattttcctgttccattttgtgcctcctggacacctcagagctccttaataagcatttatagtcagtttttggcagcaatagaatcactaaaggcattctgggatgttatggatgaaatcgatgagaagacctgggtacttgagccagaaaaacctccacggagtgcaacagcacgcagaattgcattaggtaataatgtttccataaatatagaggtagaccccaggcatcctactatgcttcctgagtgcttctttcttggagctgaccatgtggtaaaacccctgggaattaagctgagcaggaacatacatttgtgggatccagaaaatagtgtgttacaaaatttgaaagatgttttagaaattgattttccagctcgtgctatcctggaaaaatctgattttactatggattgtggaatttgttatgcttatcaacttgacggtaccattcctgatcaagtgtgtgataattctcagtgtggacaacctttccatcaaatatgcttatatgagtggctgagaggactactaactagtagacagagttttaacatcatatttggtgaatgtccatattgtagtaagccaattaccttaaaaatgtctggaaggaaacactgaaataagaatacaacatttcggtgaagagctggaaacttaaaaaattatcaaaaggaattttggtatcatcttcagagaaaaaataaagcaagaaatactaacatcaaaaggacaggtatgatgatgcgataataataaacatctgcgtttgtctcttcactaagagtaaactgggaaattgtaggccaaagtccagttgaactttctaagtctgtgatccccgtgctgactgtggaagtgtatttataccaagatggagatcttgacttcttgaatatatctggactggtaaaatcttgatgaggctcataaaatgagtttgggaattgtgtatagctgattttttgtgggaaactgtttacttcattcaaaggttcttgagactcttgatatttctgtcttctccttgtgctttcctatggaaaaaatacatatatagtttagtttgttagacgtgagttatccaagtatttattttgtgtagtgtgtaagaatgctaaataaaatgttatacaagatcaaaaaaaaaaaaaaaaaaaaaaa

SEQ ID NO: 4563 - DNA, 1948 bp, Homo Sapiens
  NM_018064
tattgacgccatattggggccggcggcgggtgggagagttctacgagggaggggaagcggttggacgtgttcgcttgggttcctgctgcggcagctacctcgcaatctctctgcatcgatcgccgctcgcaagctactgaccgtactcgggcgtattaggagccgcgttccagcctcacaccccacggtgctgttttcgacttcagaaaggatctagtctcagcacagaagcgcctcaggcgcggcgcaaagctcgagcggacggcgggggcggccggagcctctctcgggggagccgcgcctgaggaggcggaagaacccccctgacgcgactggcgtgtgcttctgcccgccaccgcccctcccgctctcacccgggccgtccctggccactgcccctgccgcggaggcagcggcggcagcggctctcctttccacagccggcgctccgcgacccgcttggctcctgagcccgtcgggtaggctctcctcgagttcccgctcttcaccccttccctcaccctcttctttcgtcacccgtccccgaccccacccgagcccggcgcctcagctgcccccggccatggcgtgcggagccactctgaaaaggactctggatttcgacccgctgttgagcccggcgtccccgaagcgcaggcgatgtgcgccattgtcggcgcccacctcggccgctgcctccccgttgtcggcggccgcggccaccgccgcctccttctccgctgcggccgcctcgccgcagaagtatctccgaatggagccatcccccttcggcgacgtctcctcccgcctcaccacagaacaaattctgtacaacataaaacaagagtataaacgaatgcagaagagaagacatttagaaacgagtttccaacagacagatccgtgttgtacttctgatgcacagccacatgcatttctcctcagtggaccagcttcaccagggacttcatctgcagcatcctcaccattaaaaaaagaacagcccttatttactctacggcaggttgggatgatctgtgaacgtttgttgaaagaacgtgaagagaaagttcgagaagaatatgaagaaatattgaacacaaaacttgcagaacaatatgatgcgtttgtgaagtttacgcatgatcaaataatgcgacgatatggagaacagcctgctagctatgtttcatgaatcacgtatcctgcatttgtgggctgccttgttccttgttgagttgttgcaagaggtcccaattatgacatgcagcaatgccaataccccttctgtgaatacaggttatttcaagctttcgtcagtggcaaccactcttaggcagcagcaactggttttggaaatttccctgatgtcagtaccacctggatgtggacctttgctacctgtattaataccagtggcctcattttgctgtatcattacaatttggcttcttatattaatgtttgaaaaggattaaagctggtattctagaacatgcccttcactggttgtgtaaataaaactgtagaatgacacttcagatgaagttagtgtgattttaattgtgcactacaaccgagctgtaaccagttactaattttagaatgtaatcccaggacaatattaagcaaatagcctgcagtgcttcctgtgaaatagtgaaggaggagggcatttctgtattccaggacttcttggggtttcagaatgggtttgtatgattttttttttttttgtagttttatttattctatcagtctttttaacaaatgtttattgctgcatttttttttttccagtgtatcattgttttactgcccttgtagtactggaatttagttggaagaataaaacatttacttctattttgcttgtttcttaatgtacagatggggttagtatttgaataaagttggtgttttaaaacgtaaaaaaaaaaaaaaaaaa

SEQ ID NO: 4564 - DNA, 1510 bp, Homo Sapiens
  NM_018066
ccgcccgcccctcggcgtctagcttcgtccccgccgtgagggcgggacttcctctcgttggctcgccgtttccgacgctgtccggaagtcgagttagtctagttagtatcggcctgttatctccttttgcgcgacacggtctcagctgttccgcctgaggcgagtgacgctggccgccaacgaggtatacgtactgggaccctcgccctcagtctcgtctccggcgcggctacctgccccgttttccctgtgagttgacctgctccgggccgcgggccgccaatggcaggggccgctccgaccacggccttcgggcaggcggtgatcggcccgccgggctcagggaagaccacgtactgcctgggcatgagtgagttcctgcgcgcgctgggccggcgcgtggcggtggtgaacctggacccggccaacgaggggctgccgtacgagtgtgccgtggacgtgggcgagctggtggggctgggcgacgtgatggacgcgctgcgcctggggcccaacggcggcctgctctactgcatggagtacctggaagccaacctggactggctgcgtgccaagctcgaccccctccgcggccactacttcctcttcgactgcccaggccaggtggagctctgcacgcatcacggcgccttgcgcagcatcttctcccaaatggcgcagtgggacctcaggctgactgccgtccacctcgtggattctcactactgcacagaccctgccaagttcatttcagtactgtgtacctccctggccaccatgctgcacgtggaactgccccacatcaacctcctttccaagatggacctcattgagcattatgggaagctggccttcaacctggactactacacagaggttctggacctctcctacctgcttgaccacctggcttctgaccctttcttccgccactaccgccagctcaatgagaagctagtgcagctcatcgaagactatagccttgtctcctttatccctctcaacatccaggacaaggagagcatccagcgagtcctgcaggctgtggataaagccaatggatactgtttcagagcccaagagcagcgaagcttggaagccatgatgtctgccgcaatgggagccgacttccatttctcttccacactgggcatccaggagaagtacctggcaccctcgaaccagtcagtggagcaggaagccatgcagctgtagcaacaaggtggaccctggagagcaggatgcataatccagcactggggaaagtggaggctcctgatgcaggctgcagacccaagagcaagtcctcccagccagagctggcgggctggcaaggggatattcagctctgcaaaggacttctggccaaaaagccagacatggtgccaagcagaacaccccccatactgtcagtggtgtccgtgagctctgggccctgccaccagaaagtcgagcactggtcctagtcaggctgtgatgaaatgtgctacaatacaagagtttattttct

SEQ ID NO: 4565 - DNA, 2014 bp, Homo Sapiens
  NM_018070
agcggagagcgggcggccgtgcgggcggcggcggcggcacccccaggccgagccggcgcggaaggagttccagggcgatggggccgcggccggggctgacgctttgacagctggaaagagcgcggagccagcgcctgggggggagggaggggagcgcggcgaggagagcgccagcgagcgagagagcgagcgagcgccggggagggggccgggagcgaggggcagctcgggagagccggagcggtagcggcggcggcggcggcggcggcgaggctcggcgccctcttccctgcaaaccatgtttgccaaaggcaaaggctcggcggtgccctcggatgggcaggctcgggaaaagttagctttatacgtctacgaatatttactgcacgtaggagcacagaaatctgcacagaccttcttatcggagattcgatgggaaaaaaacatcacgttgggagaaccgcctgggtttttgcactcgtggtggtgtgtattttgggacctttactgtgcagctcctgaaaggagagacacttgtgaacattcaagtgaagcaaaagcctttcatgattatagtgcagcagctgccccgagccccgtgcttggcaacattccccccaacgatgggatgccgggaggccccatcccgccaggtttctttcagggtcctccggggtcacagccctcgccgcacgcacagcctccacctcacaatcctagcagcatgatgggaccccacagtcagcctccgggaggagttcctgggacacagccattgctgcccaattctatggatcccacacgacaacaaggccaccccaacatgggaggatcaatgcagagaatgaaccctccccgaggcatggggcccatgggtcccggcccacagaattacggcagcggcatgagaccaccacccaactccctcggccccgccatgcccgggattaacatgggcccgggagctggcagaccctggcccaatcctaacagtgctaactcaattccatactcctcctcatcacctggtacctatgtgggaccccctggtggtggcggtcctccaggaacacccattatgcccagtcccgcagattcaacaaattccagtgacaacatctacacaatgattaatccagtgccgcctggaggcagccggtccaacttcccgatgggtcccggctcggacggtccgatgggcggcatgggtggcatggagccacaccacatgaatggatcattagggtcaggcgacatagacggacttccaaaaaattctcctaacaacataagtggcattagcaatcctccaggcacccctcgagatgacggcgagctaggagggaacttcctccactcctttcagaacgacaattattctccaagcatgacgatgagtgtgtgatccccccttctccgagacgctgagagagcaggcattgcaggcgggaagatgccagaaattatgcaagaagtgaggtgtcattatccaggagctggtggggagggcatctccctgctcccctcaaccccctcccaccccatccacgccccctacctttcccaattttagtttcatgcaataaaaaggccaaactttttattccataaaacaagaaggacaaaactctcaaaaatgtatttcaagtcagtgaccagaaaaatcccaccccttgccctttccccaaaggaccttttctgtacatgacacttttttgttgttttttgtttggggttttaccattgttgggatttttttatttgttttcaggggggttttttgggggaaaatttttttaaatggaagcttctagcaagccccccaccccaatcaacctctatgctttcttcttaaaaaaaaaaaaaaaggaaaaaggaaaaaaaaaaaaggaaaaccagaagccctgctgtctgtctgtgcccaagcccttccaccagaaaagctagtctaggtgtgagagcccacattgtctgtagccatcaaaaataataataataaactggacagtttaca

SEQ ID NO: 4566 - DNA, 8497 bp, Homo Sapiens
  NM_018072
aggaagttgctctacagcatgccttaggtttccgggtgagggttgggctccttggtaccatgtgggaagcgctgtgaagagttgttgccttccaagatatacccaaattcccagttccagcccgtgtcattaaaactccgctggcgtgaaagatgacgtccttagcccagcagctgcaacgactcgccctccctcaaagtgatgccagcctcttatctagagatgaagttgcttctttgttatttgaccctaaggaagcggccacaatcgacagggacaccgccttcgccattggatgtactggcctggaagagttgcttggaattgatccttcctttgagcagtttgaagcaccgttgttcagtcagctagcaaaaaccttggagcgaagtgttcagaccaaagcagtaaacaaacagttggatgaaaacatttcattattccttattcacttgtcgccttacttcctgcttaagccagcacagaagtgtctggagtggttgattcacaggttccatatacatctctataatcaagatagcctcattgcttgtgttctgccataccacgagacaagaatatttgtgcgagtcatacagcttctaaaaattaataattcaaagcacagatggttctggttgttgccagttaagcaatctggagtgccgttagctaaaggaactttgattacccactgctacaaagatcttggattcatggatttcatttgcagtttggtgacaaaatctgtgaaggtttttgctgagtacccgggcagctcagctcagttgagggtgctcttggctttctatgcttctaccatagtgtcggcgctggtagctgcagaggacgtatcagacaatatcatcgccaaactatttccctatatccaaaagggattgaaatcatctttaccagattacagagctgcaacatacatgataatatgtcagatttctgtgaaagtgaccatggaaaatacctttgtgaattcattggcatcacagatcatcaaaacattgaccaagattccctctttgatcaaggatgggttaagttgcttgatagtgctcctgcagagacagaagccagagagccttgggaaaaagccattccctcacttatgtaatgttcctgatcttattacaatacttcatgggatttctgaaacttacgatgtcagtcctcttctgcattacatgcttccccatctggtcgtctccatcattcatcatgttacaggagaagaaactgaaggaatggatggtcaaatctacaagagacacttagaagctatacttacaaaaatatcactgaagaacaacttagaccatttgttggctagccttctatttgaagagtatatttcatatagttcacaggaagaaatggattctaataaagtgtctttgcttaatgaacaatttcttccactcattaggcttttagaaagcaaataccccagaacattagatgttgtattagaggaacacttaaaggaaattgcagatctgaaaaaacaagagcttttccatcagtttgtttctctttctacaagtggaggaaagtatcagtttttagcagattctgatacttctttgatgctcagcctgaatcatccacttgctcctgtgagaattctggccatgaatcatttgaaaaagatcatgaaaacatcaaaggagggtgttgatgaatctttcataaaagaagctgttttagcccgattaggtgatgataatatagatgttgttttgtcggctataagtgcttttgagattttcaaagaacacttcagttcagaagtgacgatttcaaatcttctgaatctctttcaaagagcagaactttcaaagaatggagaatggtacgaggtacttaagatagccgctgacatattaattaaagaagagatactgagtgaaaatgatcagttgtcaaatcaggtggttgtatgtttgctgccatttatggttatcaataatgatgatacggaatctgctgagatgaaaattgctatatatttatcaaaatcaggaatctgctccctgcaccctctattaagaggctgggaagaagctcttgaaaatgtaattaaaagcacaaagccaggaaaactaatcggtgtagcaaatcagaagatgattgagttgttggctgataatataaatttaggagatccttcttcaatgttaaagatggtggaggatttaataagcgtgggtgaggaggagtcctttaacctgaagcagaaagtaacgtttcatgtgatcctgtctgtgctcgtctcttgttgttcatctttaaaagaaacccactttccatttgcgataagagtcttcagtttgttgcagaaaaaaataaagaagcttgaaagtgtcattactgcagtggaaatcccctcagaatggcacattgaactgatgttagacagagggatcccagtggagctgtgggcacattatgtagaagagctcaacagcactcagagggtggccgtggaggactcggtttttcttgtattttccttgaaaaaatttatttatgcactgaaagctcctaaatcttttcctaaaggtgatatatggtggaatcctgaacaactgaaagaagacagcagggactatctgcacttgctcattgggctgtttgagatgatgctcaatggtgccgatgctgttcatttcagagttctgatgaaacttttcataaaggtgcatctagaagatgtttttcagttattcaagttctgttctgttttatggacctatggttctagcctttcaaatccactaaactgcagtgtgaaaacagtgctgcagactcaagctctttatgtgggctgtgcaatgctttcttctcagaagacacagtgtaaacaccaactggcatccatatcttctccagtggtgacatctttactcattaacctgggaagccccgtaaaagaagttcgtagggctgccattcagtgtctccaggccctcagtggagtggcatccccgttttatctgataatagatcatttgatttctaaagcagaggagatcacttcagatgctgcctatgttattcaggatttggctactttatttgaggaactacagagagaaaagaaactgaaatctcatcagaagttgtctgaaactttgaaaaacttacttagttgtgtgtatagttgcccatcttatatagcaaaagatttgatgaaagtacttcagggagtcaacggtgagatggtgctttctcagctattgcctatggctgaacaactgctagaaaagatccagaaggagcccacagctgtgctgaaagatgaggccatggttctgcatctcactctgggaaagtataatgaattttcagtttcccttttaaatgaggatccgaagagtctagatatatttataaaagctgtgcacacaacaaaggaactttacgcgggaatgccaaccattcagatcacagcccttgaaaagattacaaaaccattttttgcagccatatcagatgaaaaagttcagcagaagcttttaagaatgttgtttgatttattggtgaactgtaaaaactcacattgtgctcagactgtcagcagtgtttttaaagggatttccgttaatgctgaacaagtccgaatagaactggagccaccagataaagctaaacccttgggcacagttcagcaaaaaagaaggcaaaaaatgcagcagaaaaaatcacaagatctagaatctgttcaggaagttggaggttcttactggcaaagagtaactctcatcctggaattactgcagcacaaaaagaagctcagaagtcctcagatattggtgccaactctttttaacttgctatcaagatgtttagaacccttgccacaagagcagggaaatatggaatacaccaaacaattaattcttagttgtctgctcaacatctgccaaaaactatctccagatggtggcaaaatacccaaagatattttagatgaggagaagttcaacgtggagttgatagttcagtgcatccgcctttcggagatgccgcagacccatcaccatgcccttttacttttgggcactgttgctggaatatttccggataaagttttacacaatatcatgtctatttttacatttatgggagccaatgtcatgcgcctagatgatacttacagttttcaagttattaacaagacagtgaaaatggttattcccgcacttattcagtctgatagtggagattctatagaagtttcaagaaacgttgaagagattgtggtaaaaatcattagtgtatttgtggatgcgctgccacacgtcccggagcacaggcgcctgcccatccttgttcaacttgttgatacactgggtgcagagaaattcctctggattctcctcatcttgctttttgaacagtatgtcacaaaaacagtgctggcggctgcctatggcgaaaaggatgctattttagaagcagacactgaattttggttttcagtctgttgtgagtttagtgtccagcatcagatacaaagcttgatgaatatcctccagtacttactaaagctgccagaggaaaaagaagaaaccattcccaaagcagtgtcatttaataagagtgaatcacaagaagaaatgctacaggtttttaatgtagagactcacactagcaagcaactgcggcattttaaatttttgtcagtgtccttcatgtctcagctcctgtcttccaataattttctgaaaaaggtagttgagagtggtggtcctgagattttaaaaggccttgaagagaggttgctggagaccgttctcggctatatcagtgcagttgcacagtccatggaaaggaacgcagacaaactcaccgtgaagttctggcgcgcgctccttagtaaagcttacgacctgttagataaggtcaatgccttgctgcccacagagacattcattcctgtgatcagagggctggtgggcaatcccctgccatctgttcgccgcaaagcgctggaccttttgaataacaagctgcagcaaaatatatcctggaagaagacaatagttacccgtttcctaaaactggttccagaccttttggccattgtgcagcgtaagaaaaaggaaggggaagaagaacaagcaatcaacagacagacagcgttgtataccttaaagcttttatgcaagaattttggtgcagaaaatccagatccttttgtcccagtgctgaacactgctgtgaaactgattgctccagagagaaaggaggagaagaatgtcctgggaagcgcgctgctgtgcatagcagaggtgacctccaccctggaggcgctggccatcccccagcttcccagcctgatgccatcgttgctgacaacaatgaagaacaccagcgagctggtctccagcgaggtctacctgctcagtgccttggctgctctgcagaaggttgtggagactctcccgcacttcatcagcccctatctggaaggcattctctcccaggtgattcatctggagaaaatcactagtgaaatgggttctgcgtcacaggctaatatccgtctcacatctcttaaaaagacactggctaccacacttgcaccccgagtcctgttgcccgccatcaaaaaaacttacaagcagattgagaagaactggaagaatcacatgggtccgtttatgagcatcttgcaagagcatattggggtgatgaagaaggaagagctcacctcccatcagtctcagctaaccgcctttttcctggaagccctggacttccgagcccagcactctgagaacgatctggaggaagttggaaaaacggaaaattgtatcattgactgtctagtagccatggttgtcaaactttccgaggtcacattcaggcccctgttcttcaagctgtttgattgggctaaaacagaagatgccccaaaggacaggttgttgacattttacaacttggcagattgcattgctgaaaagctgaaagggctttttactctgtttgccggccacttagtgaagccttttgctgacaccttgaaccaggtgaacatctccaaaacagatgaagcattttttgactctgaaaatgaccctgaaaagtgctgcttgctgttgcagtttattttgaactgtttatacaaaatcttcctttttgatacccagcattttataagtaaagagagagcagaagccttgatgatgcctctggtggatcagctggaaaacaggcttgggggagaagagaaattccaggaacgggtgacaaagcacctgataccatgcatcgcacagttttcggtggccatggcggatgactctctttggaaaccactgaactaccagattctgctaaagacgagagactcctcgcctaaggttcgatttgctgctttgattactgtgttagcactggctgaaaaactaaaggagaattatattgtcttgctaccagaatccattcctttcttagcagagttgatggaagatgaatgtgaagaagtagaacatcagtgccaaaagactattcagcaactggaaactgtcctgggagagccactccagagctatttctaagactttctgtggtgtttcatactctactcagagttcacactcatatttcatatttttatttttgggtgttgggtgccatgttacttttggtgccttaatacacctacttggattacttacaaatgttttatcacttctttacaaaatccccacctggcttgtgctgccacataagcctctcctgcctatcgtatagagctgcagaaagagtaaatgatacacggtatttttatacagactgctgtgtttgtttaaacatttattattctcttcctgattgatggtaataatattagacttgttaattttagcacccaaagctgacgcctcatttgcactgtaagccttaactcttctgtacagcagtatcttacatacatggtatccatgttgcagatttcactcaaagttgctctatttcaagaaaatgaagttatttagcaatcaacagaagtacttttgactgtaaagcctacttttcattttgggtaggcgaacttcagccttcgtttctttgttgtgcccataaagagaagtggttctggaatgctttttttaacccaggagtgtgactgtcacctttatcctttgttcttttgggaaacgggagagatgaaggcaacacgctgcttctaaaacagctcacacctggctgctcacacagagggcccagaaacactgggtggcacgaggaagctcctccaggattcagaatgaacccagttccattggtggttaactaagaactacttgtctaagaaagtaagtatcagtagatttttttcaatgctttgaagtgccctaatctctagtactgggtcatggtgaagttggaaagtgagggttcaaataaaattagatctgccccctttttaaaggcatctaagaacatcccgtagaatgttcgcattgagtttaaaagcctttgaagctaatatagaagtttaatgcagaaatgtggcaagcaaaaggccaacttgcattttagagacagagcttgctagtatagaagtgcatatttctaagaaatgtctcagtaaaattcattaataaatactaatagctttttaaatttttttcctccacgtaaaatgaaaatgaacttaagacttacaaggaatgatgtgagtgggctatttttttcctaaatgcctcacagtctccaacagctcagttaagcactctgatggtctttatggagaaaaataactctgggggattctcgagtcttcttgccttctacagctttccctgtggcaccctccacccccaaccagtgtctttgagcttggtgagactctgcatacattaatatgaaaagctggaaaagaattaagggctagcgatttctacactgagtacttttaaaaaaataagattgacaatggtattcttttcaatatatggatagaaataatatctaaaatctgttctgaaaatattcctaaatcctggcagagttctgccccagtctaatgtgataaaatgatcctcactgactgagcttttttccctccccactcccaaacctttgaaatttcctgtaacaagatctgacctgtaaagatcccatatacatggaacttctgccaactcccctcaaataatagaaaaatcacagaaatggaaccatttaacttgctgatacaggtttgattttaatcacgtaaagtggaagagtgctttgatctcagttgctaatgatgatggactaatctttagaagaacggaggccttgattggtgatttcatgggaacaaaacagatttctgcattacctctgcctgctttgtgggtcccttagttggcgtacactttctgatagtgcctgccttatgaatgcctgaagtctaatcctgaccttactttgttgcccataaatatctttcaaattgaaaaaaaaaaaaaaa

SEQ ID NO: 4567 - DNA, 3321 bp, Homo Sapiens
  NM_018073
gctgcgggctactgggcctgcgctgccgggctttgggttctgggcctctgccgctctctggccctaagtgctgagctgccgggaacggcagcttctgacgctgggccattggacgctgcggaaccaggcttcttcactttgagtttccgccgcgaagcgccagtccgggccgaggagggagcctttactacttctccctggtttcattcatgttctgaggagggtgtgagaaggaaccatggatcccacagccttggtggaagccattgtggaagaagtggcctgtcccatctgtatgaccttcctgagggagcccatgagcattgactgtggccacagcttctgccacagctgtctctctggactctgggagatcccaggagaatcccagaactggggttacacctgtcccctctgtcgagctcctgtccagccaaggaacctgcggcctaattggcagctggccaatgttgtagaaaaagtccgtctgctaaggctacatccaggaatggggctgaagggtgacctgtgtgagcgccatggggaaaagctgaagatgttctgcaaagaggatgtcttgataatgtgtgaggcctgcagccagtccccagagcatgaggcccacagtgttgtgccaatggaggatgttgcctgggagtacaagtgggaacttcatgaggccctcgaacatctgaagaaagagcaagaagaggcctggaagcttgaagttggtgaaaggaaacgaactgccacctggaagatacaggtggaaacccgaaaacagagtattgtatgggagtttgaaaaataccagcgattactagagaaaaagcagccaccacatcggcagctgggggcagaggtagcagcagctctggccagcctacagcgggaggcagcggagaccatgcagaaactggagttgaaccatagcgagctcatccagcagagccaggtcctgtggaggatgattgcagagttgaaagagaggtcgcagaggcctgtccgctggatgttgcaggatattcaggaagtgttaaacaggagcaaatcttggagcttgcagcagccagaaccaatctccctggagttgaagacagattgccgtgtgctggggctaagagagatcctgaagacttatgcagctgatgtgcgcttggatccagatactgcttactcccgtctcatcgtgtctgaggacagaaaacgtgtgcactatggagacaccaaccagaaactgccagacaatcctgagagattttaccgctataatatcgtcctgggaagccagtgcatctcctcaggccggcactactgggaggtggaggtgggagacaggtctgagtggggcctgggagtatgtaagcaaaatgtagaccggaaggaggtggtctacttatccccccactatggattctgggtgataaggctgaggaagggaaatgagtaccgagcaggcaccgatgagtacccaatcctgtccttgccggtccctcctcgccgggtgggaatcttcgtggattatgaggcccatgacatttctttctacaatgtgactgactgtggctcccacatcttcactttcccccgctatcccttccctgggcgcctcctgccctattttagtccttgctacagcattggaaccaacaacactgctcctctggccatctgctccctggatggggaggactaagaaagctaccaccctaaccacagaggcttggaattgggcctggcccccatggggcttggaggaccgagccactgacaggtatcccctgaaactgagctgagcccagtatccaaggattcctctgtctgatcctttggtctttgctaccaggctgaagtctgtcatgaaaccacttattttaaaaagcagaggcccagtcaaatgagcattgcatcccatgagggaagcacgacagggctgatggtgaggatcagagcagttctaaggtgactcgttggggtaaggatcaggactttgtccatgtagtagccaaccaccctcttccctgattcccgtccggtgtcacagttcagtcagtgaggatgatgaagtagatacagtcttcaggacaccattagatgggctttcccaataggccaaaaaaatgctgcgcatacccagagctggttgttgtgctgaggccagtcagaggatgcttcccctgaggtttgctataactaagcaacctttatgtgactctcaccttctgacctcctggcaagagaaattcagtgcagcagggggacacagacctgcccaagccaccccactgccgttccctctctgagcacaagctgggcaaatcactgtcccttggactccaggagaccagtgtcctagtcttgccttttttctctaagtggcaggatcagaaaacctgcgagctttagtttgtattttcactttatgaatgaggaaactgaaatggccttaagggagcaagttatttctttttttttgacacggagtctcactctgttgcccaggctggagtgcagtggcacgatctcggctcactgcaggctctgcctcctgggttcacgccattctcctgcctcagcttcccgagtagctgggactacaggcgcccaccacgacgcctggctcatttttttgtatttttagtagagacggagtttcaccatgttagctaggatggtctcgatctcctgacctcatgatccgccctcctcagcctcccacagtgctgggattagaggcatgagccactgcgcccggcccctggagcaagttatttcttacaaagctgctgaaggtaagattatcaaaattataaagcatttttcacactcaagtgaaacaaggttgacaaactcacttcgcaggtcacatgcctatacatcacttattatatttgggtctgaaacttctcacatgtttgggaggttttatgtgtcctcattgggaaaatgggtgtaattcagcataaaacctcatatgattgtcctgcctcatggagctgttgtatagatcccagatccatcccatgatttgttcctgtctgaggcatagaggcaggcaagccgtggattttgcacatggtgactttcccactgtgccatgatacagtctgcatcttatagcagtgcctttgtctcagggcctctgctggcagtctagaccttttgggcagaaaggagcttcaaatggctgtgataaggaatattaaaaattgtgtttctactttaattgtattggctgttcatgtatgtaggagttaaaataggccaaactggagaaataaacgcattctgtccaccatgaaaaaaaaaaaaaaaaaaaaa

SEQ ID NO: 4568 - DNA, 2743 bp, Homo Sapiens
  NM_018075
gaccgcatctaggccccgccgcgtccgccacgcccagcgctcggcggcgcccgccccactggcctggcccgccccccgcaccgagcactctttcgcccggcctccggttctcgccggctctcggacccgcctccgaagacgtggagcgctgcggcggctgatttgtcaaagatgaaagtgaccttatcagctttggatacttctgagagttctttcacacctttggtggtcatagaacttgctcaggatgtcaaagaagaaaccaaagaatggctgaaaaacagaattatagctaaaaaaaaagatggaggtgcccagttgttgtttagaccattgttaaataaatatgaacaagaaacactagaaaatcagaacttatatcttgttggtgcctccaagattagaatgttactaggggcagaagcagtgggattggtaaaagagtgcaatgataacaccatgagagccttcacatacagaaccagacagaacttcaaaggttttgatgataacaatgatgatttcctgacaatggcagaatgtcaattcattatcaaacatgaacttgaaaatcttagagctaaagatgaaaaaatgatccctggttaccctcaggcaaagttgtatccaggaaaatcattgttgagaagattgctcacgtctggcatcgtgattcaggtgtttccactgcatgacagtgaagccctgaagaagcttgaggacacctggtacactcggtttgctttgaagtatcagcccatagacagtattcgtggctactttggggaaacaattgctctgtactttggatttttggagtatttcacttttgcattaatccccatggctgtcattgggttaccttactacttgtttgtgtgggaagactatgacaagtacgtgatctttgcctcgttcaacctcatctggtccacggtgattctggaactgtggaagcgtggctgtgccaacatgacctacaggtgggggacactgctcatgaagagaaagtttgaggagccccggccaggatttcatggtgtcttgggtatcaattccatcactgggaaggaggagcctctgtaccccagctacaagagacagttgcgcatttacctggtctccctgccattcgtgtgcctctgcctctatttctcactgtatgtcatgatgatttacttcgacatggaggtttgggccttgggtctacatgagaacagcgggtctgagtggaccagtgtcctgttgtatgtgcccagcatcatctatgccattgtgattgagatcatgaatcgtctctatcgatatgctgccgagtttttaacttcatgggagaatcacagattggaatctgcctatcagaaccatctaattctgaaagttttagtgttcaacttcctcaattgctttgcctcactcttctatattgcctttgtcttgaaagatatgaagcttttgcgccagagcttggccactctcctaattacctcccagatcctcaaccaaattatggaatcttttcttccttattggctccaaaggaagcatggtgtgcgggtgaagaggaaggtgcaggctttaaaggcagacattgatgctacattatatgaacaagtcatcctggaaaaagaaatgggaacttatttgggcacctttgatgattacttggagttattcctgcagtttggttatgtgagccttttctcctgtgtttacccattagcagctgcctttgctgtgttaaataacttcactgaagtaaattcagatgccttaaaaatgtgcagggtcttcaaacgtccattctcagaaccttcagccaatattggtgtgtggcagttggcttttgaaacgatgagtgttatatctgtggtcactaactgtgcgctgattggaatgtcaccacaagtgaatgcagtctttccagaatcaaaagcagacctcattttgattgtagtagcagtggagcacgcactcctggctttaaagtttatacttgcatttgccatacctgataagccacggcatatccagatgaaactagccagactggaatttgagtctttggaggcactcaagcagcagcaaatgaagctcgtgaccgagaacctgaaggaggaaccaatggaaagcgggaaggagaaggcaacctgagtgcccagcgtgcccagctgccctgttggcagaggcctgtgtctgtgccacacctgccacggtggcagggggggtacccggggcagcatcgtggctcctgaacccagacccaatgcttagccaaacgaagtggctcccatgtggcaagcacccttctcagtttcgcagtggcttggctcgggatccttggcagttcccccagccccaccctgtctgctccttcccagttccttcccgggccccacacgctgctccagctgccaactttgctgcagagccactgccgcccttgagcctctcaccatgagtgagccaccagctctccacgttcccctcatagcagtgtcactcccaaccccaccatggcccagggacccgtggacaggttggggatggggtgtgtgcccactgtgctcatcacaggagcctcagttgagagtgagcggggtacagtaaggcagtgcttcccacactggacctctttcctggttctcttttgcaatacattaacagaccctttatcaacataaacaatagtaactgagctattaaaggcaacctctctgactccttctgcctaaaaaaaaaa

SEQ ID NO: 4569 - DNA, 2823 bp, Homo Sapiens
  NM_018077
acttccggaatctctcggcgtgtgagcttggttgtcctaccaaagccagcgtttcggctcgcgtgcgccggcctagtttgctcgcgtcctcacgcgctttgggtttcccggtctcatggccggcctgaccttatttgtgggccgcctcccgccctcggcccgcagtgagcagctggaggaactgttcagtcaggtggggccggtgaagcagtgcttcgtggtgactgaaaaagggagtaaggcatgtcgaggctttggctatgtcactttttcaatgctggaagatgttcagagggccctcaaggagattaccacctttgaaggttgcaagatcaacgtgactgttgccaagaaaaaactgaggaacaagacaaaggaaaaggggaaaaatgaaaactcagagtgcccaaagaaggagccgaaggctaaaaaagccaaagtggcagataagaaagccagattaattattcggaacctgagctttaagtgttcagaagatgacttgaagacagtatttgctcaatttggagctgtcctggaagtaaatatccctaggaaaccagatgggaagatgcgcggttttggttttgttcagttcaaaaacctcctagaagcaggtaaagctctcaaaggcatgaacatgaaagagataaaaggccggacagtggctgtggattgggccgtggcaaaggataaatataaagatacacagtctgtttctgctataggtgaggaaaagagccatgaatctaaacatcaggaatcagttaaaaagaagggcagagaggaagaggatatggaagaggaagaaaacgatgatgatgacgatgatgatgatgaagaagatggggtttttgatgatgaagatgaagaggaagagaatatagaatcaaaggtgaccaagcctgtgcaaattcagaagagagcagtcaagagaccagcccctgcaaaaagcagtgatcattctgaggaggacagtgacctagaggaaagcgatagtattgatgatggagaggaactggctcagagtgataccagcactgaggagcaagaggataaagctgtgcaagtctcaaacaaaaagaagaggaaattaccctctgatgtgaatgaagggaaaactgtttttatcagaaatctgtcctttgactcagaagaagaagaacttggggagcttctccaacagtttggagaactcaaatatgtccgcattgtcttgcatccagacacagagcattctaaaggttgtgcatttgcccagttcatgactcaagaagcagctcagaaatgccttctagctgcttctccagagaatgaggctggtgggcttaaactggatggccggcagctcaaggttgacttggcggtgacccgtgatgaggctgcaaagcttcagacgacgaaggtgaagaagccgactggcacccggaatctctatctggcccgagaaggcttgattcgtgctgggacgaaggctgcagagggtgtgagtgctgctgatatggccaaaagagaacggtttgagctgctgaagcatcagaaactcaaggaccagaatatctttgtctcccgaaccaggctctgcctgcacaatctcccaaaggctgtagatgacaaacagctcagaaagctgctgctgagtgctactagtggagagaaaggggtgcgcatcaaggagtgtagagtgatgcgagacctcaaaggagttcatgggaacatgaagggtcagtccctgggctacgcctttgcggagttccaagagcacgagcatgccctgaaagccctccgcctcatcaacaacaatccagaaatctttgggcctctgaagagaccaatagtggagttctctttagaagatcgaagaaaacttaaaatgaaggaattaaggatccagcgcagcttgcaaaaaatgagatccaagcctgcaactggtgagcctcagaaggggcaaccagagcctgcaaaagaccagcaacagaaggcagctcaacaccacacagaggaacaaagcaaggtgcccccagagcagaagagaaaggcgggctctacctcatggaccgggttccagaccaaggctgaagtggagcaggtggagctgcctgatggaaagaagagaagaaaggtcctggcgctcccctcacaccgaggccccaaaatcaggttgcgggacaaaggcaaagtgaagcccgtccatcccaaaaagccaaagccacagataaaccagtggaagcaggagaagcagcaattatcgtccgagcaggtatctaggaaaaaagctaagggaaataagacggaaacccgcttcaaccagctggtcgaacaatataagcagaaattattgggaccttctaaaggagcacctcttgcaaagaggagcaaatggtttgatagttgatgatggcagcaggctgggtaagaagctgggttgtgtactttctggtgacactcctgggctcctccccatcccccgtgtctctcactgagggaaagaaaatccccaagggcactgccactgtgctcggaggtgccctggactgtgtacatctgaactttggtccatcctttgatgtgtggttcgttagccacaaagagaaatatctgaaagtcaacatgatgcttcttgcatattatccagattattgtatgaagttgtgtctataattattaccaatttttattctttatttctcaaatggaaacacctgaaaaagcattctggagtgctgaatttttaagatgtatattttgttaagcatattctctaaatgagatattgtgtggctttttagtaacaacgtcatttctaataaaaaaaaaaaaaaa

SEQ ID NO: 4570 - DNA, 14478 bp, Homo Sapiens
  NM_018080
ccggaggggctgtcatttgcagcgctggtcgcagccctcagctgcgccgggcggttccggctcctccctctccttgtgcctcagcgccaccatggtgctggagtcggtggtcgcggacttgctgaaccgcttcctgggggactatgtggagaacctgaacaagtcccagctgaagctgggcatctggggcggaaatgtggctttagataatctacagataaaagaaaatgccctgagtgaattggatgttccttttaaagtcaaggctggccaaattgataaattaactttgaagattccttggaagaacctttatggagaagcagttgttgcgaccctggaaggattatacctgcttgttgtccctggagcaagtattaagtatgatgctgtaaaagaagaaaaatccttgcaggatgttaaacagaaagagctatcccgaattgaagaagcccttcaaaaagcagcagaaaaagataagccaaaagaagccaaaaaggatacatttgtggaaaaattggcaactcaagtaataaaaaatgtacaagtaaaaatcacagatattcacattaaatatgaagatgatgtcactgatccaaagcggcctctttcatttggtgtcacactgggagagcttagtctactgactgcaaatgaacactggactccatgcatattaaatgaagcagacaaaattatatacaagcttatacgacttgatagtcttagcgcctactggaatgtaaattgcagcatgtcttaccagagatcaagggaacagattttggatcagctgaaaaatgaaattcttacaagtggaaatatacccccaaattatcaatacattttccagccaatatcagcctctgcaaaactctacatgaatccttatgcagaatcagagctcaaaacgcccaaactggattgcaacatagaaatacaaaatattgccattgaactgaccaaacctcagtacttaagtatgattgaccttttggagtcagtggattatatggttaggaatgcgccttataggaaatacaagccttatttaccacttcataccaatggtcgacgatggtggaaatatgcaattgattctgttcttgaagttcatataagaaggtatacacagatgtggtcatggagtaacataaaaaagcacaggcagttactcaagagttataaaattgcctacaaaaacaagttaacacagtctaaagtctcagaagaaatacagaaagaaattcaggacttggagaagactctagatgtttttaacataattttagcaaggcaacaagcacaagttgaggtgattcggtctgggcaaaaattaaggaaaaagtctgctgacacaggcgagaaacgtggaggctggtttagtgggttgtggggtaagaaagagtctaagaaaaaggacgaagaatcattgattcctgaaactattgatgaccttatgactccagaggaaaaagataaactcttcactgccattggttatagtgagagtacccacaacctaactttacctaagcagtatgttgcccatattatgaccctgaagttagtaagcacctctgttacgataagagaaaacaagaatattccagaaatactaaaaattcagataattggcctgggcactcaagtatctcagcgaccaggagcacaagcacttaaggtagaagcgaaattagaacactggtatataacaggtttgagacagcaggatattgtgccatcacttgtggcttcaattggtgacactacatcatccttgcttaaaattaaatttgaaaccaatccggaggatagtcctgctgaccagactctgattgttcagtcccagcctgtggaggtcatctatgatgctaaaactgtcaatgcagtggttgaattctttcaatcaaataagggattggatcttgagcaaataacatcagcaacattgatgaagctggaagaaattaaggagagaacagctacaggacttacacatattattgaaactcgaaaagtccttgatttaaggataaatctgaagccttcttatctagtagttccacagacgggtttccaccatgaaaagtcagatcttctgattttagattttggtacatttcagctcaacagtaaagatcaaggtttacagaagactactaattcatctctggaagaaataatggataaggcatatgacaagtttgatgttgaaataaaaaatgtacaactactttttgcaagagcagaggaaacctggaaaaagtgtcgatttcagcatccatcaactatgcatatattgcaacccatggatattcatgttgagttggctaaggccatggtagaaaaagacattagaatggccagatttaaagtgtcaggaggacttcctttgatgcatgtgagaatttctgaccagaagatgaaagatgtgctatatttgatgaacagtatacctttgccacagaaatcatcagcccagtctccagagagacaggtatcctcaattcctattatttcaggtggtacaaaaggtctacttggtacttcactattgctagacactgtggaatcagagtctgatgatgagtattttgatgctgaagatggagaaccacagacttgtaaaagtatgaaaggatcagaacttaaaaaagctgcagaggtcccaaatgaggagctcatcaatcttctactcaagtttgaaattaaagaagtgattttggaatttactaaacagcagaaagaagaagatacaattctagtatttaatgttactcagttaggaacagaggccacaatgagaacatttgacttaactgtggtatcttatttaaagaaaatcagcttggattatcatgaaattgaaggatccaaaaggaagccccttcacttgattagctcttctgacaaacctggattagatcttttgaaagtggagtatattaaggctgataagaatggacctagttttcaaactgcttttggaaaaactgaacaaacagttaaggtggccttttcatctttaaatctgttgctgcaaacacaagctcttgtcgcttctattaattacctcacaaccattattccatctgatgatcaaagcataagtgttgctaaggaggtacaaatttcaactgaaaaacaacaaaaaaattcaactctgccaaaagcgattgtatcctccagagatagtgacattattgatttcaggctatttgccaagttgaatgctttctgtgtcattgtttgcaacgaaaagaacaatatcgccgaaatcaagattcaaggactggattcctccctttctctccagtcaagaaagcagtcactttttgcccgactagaaaatattattgtcacagatgttgatccaaagacagttcataagaaagctgtgtcaataatgggaaatgaagttttccgttttaatttggatttgtatccagatgctactgagggggatttgtatactgacatgtccaaagtggatggtgtgctgtctctgaatgttggctgtattcagattgtctatcttcataaattccttatgtcacttctgaacttcctgaataatttccagacagccaaagagtctctgagtgctgccactgcccaggctgcagaaagggctgccacaagtgtgaaagatcttgcccagaggagttttcgtgtttccatcaatattgatttgaaagcaccggttatagtcatcccacagtcttctatttccaccaatgcagtagtggtagatcttgggttaatcagagttcataatcagttcagtctggtgtctgatgaagactacttaaatcctccagtaattgatagaatggatgtgcagctaacaaagcttacactttataggacagtgatccagccaggcatctaccatcctgatattcagctgttgcacccaattaacttggaatttcttgtaaatcggaatctagctgcatcttggtaccacaaggtgcctgttgtggaaattaaaggacatcttgattcaatgaatgttagtctaaatcaagaagatcttaatcttttatttaggatactaacagaaaatctctgtgagggtactgaagacttggataaagtgaaaccaagagtacaagagacaggtgaaattaaagagccccttgaaatctctatatcacaagatgtacatgattcaaaaaatactttaacaactggagtggaagaaattaggtctgtagacatcattaatatgctgctgaattttgaaattaaagaggttgtggttactttgatgaaaaaatcagaaaagaaaggaaggcctttacatgagctaaatgtcctgcaacttggaatggaagctaaagttaaaacctatgacatgactgctaaagcttatctaaaaaaaattagtatgcagtgctttgatttcactgactctaaaggggaacctcttcacattattaactcttctaatgtgactgacgaaccccttctgaaaatgttactgacaaaggcagacagtgatggaccagaatttaaaactattcatgacagtaccaaacagagactgaaggtttcatttgcatccttagacttagtacttcatttggaagctttactttccttcatggattttttatcatctgctgctccattctctgagccttcctcttctgagaaggaatccgagctgaaaccacttgtgggggagtccagaagtatcgctgtcaaagctgtatccagcaacatttcccaaaaggatgtgtttgatttaaagatcacagctgaattaaatgcatttaatgtctttgtctgtgatcagaagtgtaacattgcagatattaaaatacatggaatggatgcctctatttctgtgaagcctaagcagactgatgtgtttgccagacttaaagatattatagttatgaatgtagatttgcagtccattcacaaaaaggctgtctctattttgggagatgaagtctttaggttccaactgactctttatccagatgccacagaaggagaggcctatgctgatatgtccaaagtagacggcaaacttagttttaaagtgggttgtattcagattgtttatgttcataaattcttcatgtctcttttgaacttcctcaacaatttccaaactgctaaagaagctttgagtacagccacagtccaggctgcagaaagagctgcttccagcatgaaagacttggctcaaaagagtttccgccttttgatggatattaatttgaaagcaccagttattattattcctcagtcttcagtatcacctaatgctgttatagcagatctgggtttaatcagagttgaaaacaagtttagcttggttcctatggaacattattctcttcctccagtcattgataaaatgaacatcgaactcactcagttgaagctgtcaagaactattttgcaggctagcttgccacaaaatgacattgaaattttaaaaccagtcaacatgcttttgtccatacagcgaaacttagcagcagcatggtatgtgcaaattccagggatggagataaaaggaaaactaaaacctatgcaggttgctctcagtgaagatgacttgacagttttaatgaaaattttgctagaaaatcttggagaagcttcctcacaaccaagccctacacagtctgtgcaggagactgtaagagtgagaaaagttgatgtttcaagtgtacctgaccatctcaaagaacaagaagattggacagactcaaagctctctatgaaccagattgtcagtctccaatttgactttcactttgaatctctttccattatcctttataacaatgatatcaaccaggaatctggagttgcatttcataatgacagtttccaacttggtgaactcagactacatcttatggcctcctcagggaagatgtttaaggatggctcaatgaatgtcagcgttaaacttaagacatgcacccttgatgatctcagagaaggaattgagagagcaacatcgagaatgattgacagaaagaatgaccaagataacaacagttctatgattgatataagttacaaacaagacaaaaatggaagtcaaattgatgctgttcttgacaagctgtatgtatgtgccagtgtggaatttctgatgactgtggcagatttctttatcaaagctgtgcctcagagtccagaaaatgtggcaaaagaaacacagattttaccaagacagactgccacagggaaggtcaagatagagaaagatgactctgttagaccaaatatgactttaaaggccatgatcacagatccagaagtggtatttgttgccagcctgacaaaggctgatgctcctgctctgacagcctcgtttcagtgcaacctttctctgtcaacatccaaactcgaacagatgatggaagcttctgtgagagatctgaaagtgctcgcttgcccttttctcagagaaaagagagggaaaaacattaccacagtcttgcagccctgttctttatttatggaaaaatgtacgtgggcttcaggaaagcaaaatataaatattatggttaaagaatttataattaagatttcacccataattcttaatactgtgttgacaatcatggctgcattgtctccaaaaacaaaagaagatggatccaaagatacgtctaaggaaatggaaaatctttggggtatcaaatcgattaatgattataacacttggtttcttggtgttgacacggcaacagaaataacggaaagcttcaaaggcattgaacattcactgatagaggaaaattgtggtgttgttgtagaatccattcaagttaccttagaatgtggccttggacatcgaactgtacctttattattggcagagtctaagttttcaggaaatattaaaaattggacttctctaatggctgctgttgctgacgtgacactacaggtgcactattacaatgagatccatgctgtctgggagccactgattgagagagtggaggggaagagacaatggaatttaaggcttgatgtaaagaagaacccagttcaggataaaagtttgctgccaggagatgattttattcctgagccacaaatggcaattcatatttcttcaggaaatacaatgaatataacaatatccaaaagttgtcttaatgttttcaacaatttagcaaaaggtttttcagagggcactgcttctacttttgactactctttaaaggacagagctccttttacggtaaaaaatgctgtaggtgttcccattaaggtgaagcccaattgtaatctcagagtaatgggcttccctgagaaaagtgatatttttgatgttgatgctggccagaatttggaactggagtatgccagcatggtaccttcaagtcaagggaacctatctatattgagccgtcaagaaagctccttcttcactctgaccattgtacctcatggatatacagaagttgcaaatatccctgtggccagacctggacggcgattgtataatgtacggaatcccaatgccagtcattctgactctgtcttggtacaaattgatgcaactgaagggaataaagtaattacccttcgctctcctctacagatcaaaaaccatttctccattgcatttatcatctataaatttgttaagaatgttaagctattggagcgcattgggatagccagacctgaagaggagttccatgttcctttagattcatatagatgtcaattgtttatccagccagctggaatcttagagcatcagtacaaagaatctaccacttatatttcctggaaggaagaacttcataggagcagggaagtcagatgcatgttgcagtgtccatcagtagaagtcagcttcttacctctcatagtgaatacagttgctctgcctgatgaattgagctacatatgtacacatggggaagactgggatgtagcttacattattcatctttatccttctctcactttgcggaatcttctcccatattccctaagatatttacttgagggaacagcagaaactcatgagctggcagaaggcagtactgctgatgttctgcattcgagaatcagtggtgaaataatggaattagtcctggtgaaataccagggcaaaaactggaatggacatttccgcatacgtgatacactaccagaattctttcctgtgtgtttttcttctgactccacagaagtgacgacagtcgacctgtcagtccacgtcaggagaattggcagccggatggtgctgtctgtctttagtccctattggttaatcaacaagactacccgggttctccagtatcgttcagaagatattcatgtgaaacatccagctgatttcagggatattattttattttctttcaagaagaagaacatttttactaaaaataaggtacaattaaaaatttcaaccagtgcctggtccagtagtttctcattggatacagtgggaagttatgggtgtgtgaagtgtcctgccaacaatatggagtacctggttggtgttagcatcaaaatgagcagtttcaacctttcacgaatagttaccctgactcccttttgtaccattgcaaacaagtcatcattagaactagaagttggcgagattgcatctgatggctcaatgccaactaataaatggaactatattgcttcttcagagtgccttccattttggccagaaagtttgtcaggcaaactttgtgtgagagtggtgggctgtgaaggatcttccaaaccattcttttataaccgacaggataatggcactttattgagcttagaagatctgaatgggggtatcttggtggatgtaaacactgccgaacattcaactgtcataactttttctgattaccatgagggatctgcacctgccttgataatgaaccatacaccatgggacatcctcacatacaaacagagtgggtcaccagaagaaatggtcttgctgccaagacaggctcgactttttgcctgggcagatcctactggtaccagaaaacttacatggacatatgcagcaaatgttggggaacatgatctgttaaaggatggatgtggacagtttccatatgatgcaaacatccagatacactgggtatcatttctggatgggcgccagagagttttgcttttcaccgatgatgttgccttggtttccaaagcactgcaggcagaagaaatggaacaggctgattatgaaataaccttgtctctccacagtcttgggctttcactggttaacaatgaaagcaagcaggaagtttcctatattgggataaccagttctggtgttgtttgggaggtgaaaccaaagcagaaatggaagccatttagtcaaaagcagataatcttattggaacaatcctatcagaaacatcaaatatcaagagaccatggctggattaagctagataataattttgaggtcaattttgataaagatccaatggaaatgcgcctccctattcgtagccctattaaacgagactttttatcaggaattcagattgaatttaagcagtcttctcaccagagaagtttaagggccaggttgtactggcttcaggttgataatcagttaccaggtgcaatgttccctgttgtatttcatcctgttgcccctccaaaatctattgctttagattcagagcccaagcctttcattgatgtgagtgtcatcacaagatttaatgagtacagtaaagtcttacagttcaagtattttatggtcctcattcaggaaatggccttaaaaattgatcaagggtttctaggagctattattgcactgtttaccccaacaacagaccctgaagctgaaagaagacggacaaagttaatccaacaagatattgatgctctaaatgcagaattaatggagacttcaatgactgatatgtcaattcttagtttctttgaacatttccatatttctcctgtgaagttgcatttgagtttgtctttgggttccggaggtgaagaatcagacaaagaaaaacaggaaatgtttgcagttcattctgtcaacttgctgttgaaaagcataggtgctactctgactgatgtggatgaccttatattcaaacttgcttattatgaaattcgatatcagttctacaagagagatcagcttatatggagtgttgttaggcattacagtgaacagttcttgaaacagatgtatgtccttgtattggggttagatgtacttggaaacccatttggattaattagaggtctgtctgaaggagttgaagctttattctatgaacccttccagggtgctgttcaaggccctgaagaatttgcagaggggttagtgattggagtgagaagcctctttggacacacagtaggtggtgcagcaggagttgtatctcgaatcaccggttctgttgggaaaggtttggcagcaattacaatggacaaggaatatcagcaaaaaagaagagaagagttgagtcgacagcccagagattttggagacagcctggccagaggaggaaagggctttctgcgaggagttgttggtggagtgactggaataataacaaaacctgtggaaggtgccaaaaaggaaggagctgctggattctttaaaggaattggaaaagggcttgtgggtgctgtggcccgtccaactggtggaatcgtagatatggccagtagtaccttccaaggcattcagagggcagcagaatcaactgaggaagtatctagcctccgtccccctcgcctgatccatgaagatggcatcattcgtccttatgacagacaggaatctgagggctctgacttacttgagcaagaactggaaatacaggaataaatgtttcctaaactactacttgatttcatccttaaaaatcaaaacaaactgtggtgttaattgactgtgtgtgaattccattgtcaattttaatgaaattttctttaaaactctcacctccatctgaacttttcatagtagtgggattgactacaaataaaaacttgtggtattcctggtaatactgtccagaaataagagattagtataaaatattaaaggatgcagagaatcagctctcttctgcgtttaatagatgaaagcctttattgagctcagaagcagatactgttactatcatttcgaaaattttatcttatggtgttcatgtgcatttcaggtaaaattgaaaaacaggacaattattatgtccaattaatatgtttatgtttgtgagtcttgatgatggaattacatagctttctgtttcacaaatggctctaaatttgcttaagttacgggactattacctggagcatctgctttaataattgaattgtcagttgctctgagcctgcccttagacctcaagtaataaatagttggcacatgaattttgaggatatgtttcctcttccctctttttcctatttaaccccttggtactgttgctaaataaatgatagccattttataattatgttatatacattttcagcctttagcatttctgcttttcaaaaattgaatctccttgttggttatgcttatttcataattattagttttaattaatgtagatagaagttgaacatgtaattaggcaaattgctgtgtggcacttgaatacatagatttctttattttcaaaaaccaaccttttgcttttaaatccttagagagggtttattatcttagagaaaaaataattataatcattatttttgaaattagtatcctcttaattctcaacataagttatgtttcaatttcttttttttgtaataaatgatggaaatgtttaacaatgtcttatctagcaactttcatgcttctcctcagaaatgaagccaaagtataaacttagatttaatgtgttgtatatttgaagagaatgaaactattaacatataattgttcagttggattatgtattttaaggattgcagttatcaaaataataaattgaatgttttatgtttaaccactttaaagaagaaagactgacatccaaaaaccagcgtgtgctagatatacaaaggaaattacttctgtccttaagggaccaagtataacaaaacatgtaactgttaaaagtagctgacaaacctttcttgtgcctagataatttagcattggcaaaaatgtcaccacatgcagttttctaggagagtcaagcacaaataactaattcaagatgctgacttaaatcatctccaatagttacccttcctgagattctaaagtaacaatttttaattttactggttatattgctgttttactgagacttacttttaagaacccctgtaacttaagattttttcttaattgttttgtttagctctgttattaattttttccttgtgatatctttttataactctctgtcaaaaagcacaaaacttcaagaaacttttaattattttgtctgaacatataatcttgtctgatttcttagtttttattaagatatcagacaacttttaaaactttagtgcattattataattactggaagaaaaagaatgattatacactaatgagaggacttggtagtttttgtcgtggatgtcaagtgtgggcatggataattgaaatatttaggctatttcattctttgcccatcttgctgtgatcagttagttgggtaaaaatatttattgattatttagactgtactggatatacaaaagaagccttctgtccttaagggaccgagtaaaacaaaacatggaaatattaaagagtattagagtataaaagtatatctttttagccctttgtaatatggccaaattctaaataatttatttggggatcttttgatcctcatgttcctttttctcctaagtactactttgtattctttaatatgcagctttgagagttactgaatcatatattatatttccatgagatgtactattctacttatcctctaatcttcatatatatatacacacacacatatatatacacatacatatatacacacgtacatatatgtacacatacagatatacatacacacaaacacatatatacacacatacatatacacacatatatatacacatacaaatatacacatatatacacatacatatatatacacacatacaaatatacccatatgtacacatacatatatacacatacatatatacacacacatatacacacatatatacgcaaacatacacatatttacacatacatatatacatacattatatgtatgtatatatagtcatttaatactcattttggttcacatacttatgatcatgcaacgtttaaaacagcatttcttgctttttagttttagttatatttttccatgttcttagaaatgcctcattaacatttttaattcttgtattgccatctattgaggtgacattacattgtgtttttatctcgtcttaattcatgacattaaattattctactaacagtaataatgctgtaataaacatcattatagattttgcttttttatatcttgtttgctttttcatatttccttagaatttacttgaaaaaattgaattactgggtaaagggcttttgcaaagtattgttaaattcctcgagttgcatttttggaaaggggacgtgaatattttatcaactaatttggtctccctgctgccattagtgactgaatatcttaatctgaatctcagagtgtagtgggtttttagtagtgctgaagacaagttttctaaagtgtattatggtgataaattatattttaaaaactgtcaatggcttgaagcacaatagcctaataactaacgaaaatacatacaagatagaaagtgggtagtatttcttgtacttgcatttcagatctaaatattttaacatatttaaatttcaagctgcagataaatgcattacattattaaattcatttcccattttctctttgaagaaattaaggcaaaagtgttaaaagattttaactaattcgcacaagtgaattgtgaaacaagtagctattgctgtgaaatctgcactcctctctgagactcattctgaagatgagatcccagttctttgtggattcctcttccttattcatggctttttgcaattgtcaaggaatgactaggtaccaagcaactttaaaaaatgtatatttaagcattgaaataatatcaaatgtgatttctctgcttgtggttatattgattatattatccttttaataatattggcattatattcttggtcgtaaaatgtcaaggtcttatttattcagtatatttatgttctgtattttcatatatattatctattttcagccatgcattatatataatgtcagtaatagtatttcattagcattcattataaaaaaactcgtttttaatatttgactaattcaagtcacagtacttttgagatagctgaaaaggaaaataaatgtgttttaatgtgctactaaaaaaaaaaaa

SEQ ID NO: 4571 - DNA, 1982 bp, Homo Sapiens
  NM_018081
gtcccggctccgcgggttccgtgggtcgcccgcgaaatctgatccgggatgcggcggcccaatcggaaggtggaccgaaatcccgcgacagcaagaggcccgtagcgacccgcggtgctaaggaacacagtgctttcaaaagaattggcgtccgctgttcgcctctcctcccgggagtcttctgcctactcccagaagaggagggaagcacaggtgggtttctttagctctgcgtcggatccctgagaacttcgaagccatcctggctgaggctaatctccgctgtgcttcctctgcagtatgaagactttggagactcaaccgttagctccggactgctgtccttcagaccaggacccagctccagcccatccttctccccacgcttccccgatgaataaaaatgcggactctgaactgatgccaccgcctcccgaaaggggggatccgccccggttgtccccagatcctgtggctggctcagctgtgtcccaggagctacgggagggggacccagtttctctctccactcccctggaaacagagtttggttcccctagtgagttgagtcctcgaatcgaggagcaagaactttctgaaaatacaagccttcctgcagaagaagcaaacgggagcctttctgaagaagaagcgaacgggccagagttggggtctggaaaagccatggaagatacctctggggaacccgctgcagaggacgagggagacaccgcttggaactacagcttctcccagctgcctcgatttctcagtggttcctggtcagagttcagcacccaacctgagaacttcttgaaaggctgtaagtgggctcctgacggttcctgcatcttgaccaatagtgctgataacatcttgcgaatttataacctgcccccagagctgtaccatgagggggagcaggtggaatatgcagaaatggtccctgtccttcgaatggtggaaggtgataccatctatgattactgctggtattctctgatgtcctcagcccagccagacacctcctacgtggccagcagcagccgggagaacccgattcatatctgggacgcattcactggagagctccgggcttcctttcgcgcctacaaccacctggatgagctgacggcagcccattcgctctgcttctccccggatggctcccagctcttctgtggcttcaaccggactgtgcgtgttttttccacggcccggcctggccgagactgcgaggtccgagccacatttgcaaaaaagcagggccagagcggcatcatctcctgcatagccttcagcccagcccagcccctctatgcctgtggctcctacggccgctccctgggtctgtatgcctgggatgatggctcccctctcgccttgctgggagggcaccaagggggcatcacccacctctgctttcatcccgatggcaaccgcttcttctcaggagcccgcaaggatgctgagctcctgtgctgggatctccggcagtctggttacccactgtggtccctgggtcgagaggtgaccaccaatcagcgcatctacttcgatctggacccgaccgggcagttcctagtgagtggcagcacgagcggggctgtctctgtgtgggacacggacgggcctggcaatgatgggaagccggagcccgtgttgagttttctgccccagaaggactgcaccaatggcgtgagcctgcaccctagcctgcctctcctggccactgcctccggtcagcgtgtgtttcctgagcccacagagagtggggacgaaggagaggagctgggccttcccttgctctccacgcgccacgtccaccttgaatgtcggcttcagctctggtggtgtgggggggcgccagactccagcatccctgatgatcaccagggcgagaaagggcagggaggaacggagggaggtgtgggtgagctgatataaaaaggtttttatgataaaaaaaaaaaaaaaaaaaa

SEQ ID NO: 4572 - DNA, 4286 bp, Homo Sapiens
  NM_018082
accagagggcgtactttccttactcggcctcggccacatccgggttccaccgcagattcgggcagggagcgggcggaacctttctaccgcgtctctagctaacacgcacggcggggacagtttaggcctccgcgcaccgttcgccgggagtcttgcagtttgcttggtgcagggaaggcgggcgcggaggttctatctgtttcttcctccttcgtgagcagcatggacgtgctagcggaggagtttgggaacctgactccggagcagctggcggcgccgatcccgactgtagaggaaaaatggaggctgcttccagcatttttaaaggtgaaaggccttgtgaaacagcatatagattcatttaactatttcattaatgtagagataaagaagataatgaaagccaatgaaaaggttacaagtgacgctgaccctatgtggtacttaaaatatcttaatatctatgttgggcttcctgatgttgaagaaagcttcaatgtaactagaccagtgtcccctcatgagtgccgtttgagagacatgacatactctgcccctattacagtggatattgaatatacccgaggcagccagaggatcatccgcaatgccttacctatcggcagaatgcccataatgctacgtagttcaaactgtgttcttacaggaaaaacgccagcagaatttgccaaactgaacgaatgtcccttagatccaggtggctacttcattgttaaaggagtagaaaaagttattcttatccaagagcagctgtctaagaacaggatcatcgtggaggctgatagaaaaggggctgttggagcttcagttaccagctctacccatgagaaaaaaagcagaaccaatatggctgtgaaacaaggacgattttatttgaggcataatactttgtcagaagatatacccattgtcatcatatttaaggccatgggtgttgagagtgaccaggaaattgtgcagatgattggaacagaggagcacgtgatggctgcatttgggcccagtctggaagagtgccagaaagctcagattttcacacagatgcaggcattaaaatatatagggaacaaagtaagaaggcaaaggatgtggggaggtggaccaaagaaaaccaaaatagaagaagcaagagagctcctggcttccaccattctgacccatgtcccagttaaggaattcaatttccgagccaaatgtatctatactgcagtgatggtgcgaagagttattctggcccaaggagataataaagttgacgacagagattattatggtaacaagcgactggaattggcaggacagcttttatctcttctttttgaagacttgttcaaaaaatttaattctgaaatgaaaaagattgccgaccaggtgattcctaagcaaagagcagcccagtttgatgttgtcaaacacatgcgccaagaccagatcaccaatggcatggtgaatgctatttctaccggaaattggtctttaaagagatttaaaatggaccgccagggtgtaacccaagtgctgtctcgcttgtcatatatatccgcactgggcatgatgacaagaatctcttcccagtttgaaaaaacgagaaaagtgagtggtcctcgctccctccagccatctcagtggggaatgctgtgtccttcggacactcctgaaggagaggcatgtggtttggttaaaaacttggcccttatgacacacatcacaactgatatggaagatggacccattgttaaattagccagtaacttgggagtagaagatgtgaatttattatgtggggaagagctctcttacccaaatgtgtttcttgtctttcttaatggtaacatcttaggtgtcattcgagaccacaaaaagctagtgaatacatttcgactcatgagaagagcaggatatatcaatgaatttgtttccatctcaacaaatcttacagatcgatgtgtctatatttcttctgatgggggaaggctatgcagaccctacataattgtcaagaaacagaagccagcagtcacaaataaacatatggaagagctggcccaagggtacaggaattttgaagatttcttacatgagagtctggttgaatatttagatgtgaatgaagaaaatgattgtaacattgcactgtacgaacacacaattaataaagacaccacccacttggagattgaacccttcactcttctcggcgtgtgtgctggacttatcccataccctcaccataaccagtcaccgagaaacacttatcagtgtgccatggggaaacaagccatgggtactataggatacaaccagcgaaacagaattgatactctcatgtatctactagcatatccacaaaaacccatggttaagacaaaaaccattgaattgatagaatttgagaaactgccagctggacagaatgcaacagttgctgtgatgagctatagtggctatgatattgaagatgctcttgttttaaacaaggcctctttagacagaggctttgggcgttgccttgtatataaaaatgctaaatgtacgttgaaacgatacaccaatcagacttttgataaagtgatggggcccatgttggatgctgctacaaggaaacctatctggcgacatgaaatcttagatgcagatggtatttgttctccaggtgagaaagtagaaaacaaacaagtgcttgtaaataagtccatgcccacagtgactcagattcctttggaaggaagtaatgtaccacagcaaccacagtacaaagatgtacccataacctacaaaggagcaacagactcatatattgaaaaagtgatgatatcttcaaatgctgaagatgcttttctgatcaaaatgctgctgagacagacaaggcgtccagaaattggagacaaattcagcagtcgtcatgggcaaaaaggtgtttgtggcttgatcgtcccccaggaagacatgccattttgtgattctggcatctgtccggacatcatcatgaacccacacggcttcccatcacgaatgacggtggggaagctcattgagctgctggctggcaaggccggtgtgctggacggcagattccactacggcactgcgtttggaggcagtaaagtgaaggatgtgtgtgaggacctcgttcgccatggttataactacttggggaaagactatgttacatccggcatcacaggtgagcccttagaagcatacatctattttggccccgtgtactatcagaagctgaaacacatggtgctagataaaatgcatgcccgggcccggggcccacgagccgtccttaccaggcaacccactgaaggacggtctcgtgatggtggcttgcgtctcggggaaatggaacgtgactgtttaatcggttatggagccagtatgcttttgctagagagactaatgatttcaagtgatgcctttgaggttgatgtctgtgggcagtgtggacttctggggtattctggctggtgccattactgcaagtcatcctgccacgtgtcttccctccgtattccgtatgcctgcaagctgctcttccaggaactacagtctatgaacatcatccccaggttaaaactgtccaagtacaatgaatgaggatggaaaaaatgattattaaagagaacaagtgatacatccaatgcaacggaaagcagaagggatttaggactacgtctcctcctgtgaagaattcccttgcgtattctctctctaaaacaaccaaaaaaaaatggagaggctttttatatactctaagactggctaaacaaccttgatcattgagcctcgagccatgggagagatgctgaccatgtggactgcaaggctgcttgattcacagatggatgtgacctaaaggataaataagctattacttatgtgctgatctcttgacattcactcattagaagaccttactccttcaagcaaatgtttggggtcaaatttaccatatcttctggctaaccatattcaagattcttctgaaacttggaggatgtaaagaatccatttgatttggtcagcctggcttttgtcgtggtggctggctcggataaattttcccaacaattaaatcttgcctttacacacccaaactttgtaattttagtcttggtgaaatataatgaatttgttcctaccttgtcaagcaagaatgtcgtcttctcctatggactcaattgctattattttaaacctgcatgattgtaccatgcaatactattcgttaaatatctgaatctaaaaaaaaaaaaaaa

SEQ ID NO: 4573 - DNA, 2003 bp, Homo Sapiens
  NM_018083
ggagcgcctggcggggccgctgggccgagggggccgccggcggggctggcgggcggggggcttcctgcgggcccggggggagccggcggccggcgcgggcgcggcgggccgggcaggggcgaggggcgccgggtcttgccccagaagctgcgggcacatccacgcctgaaatgcggcgctcagtcctggtcaggaacccaggccacaaaggcctgagacccgtttatgaagagctcgactctgactccgaggacctagaccccaatcctgaagatctggacccggtttctgaagacccagagcctgatcctgaagacctcaacactgtcccggaagacgtggaccccagctatgaagatctggagcccgtctcggaggatctggaccccgacgccgaagctccgggctcggaaccccaagatcccgaccccatgtcttcgagtttcgacctcgatccagatgtgattggccccgtacccctgattctcgatcctaacagcgacaccctcagccccggcgatccaaaagtggaccccatctcctctggcctcactgccaccccccaggtcttggccaccagccccgcggtgctccccgcccccgccagcccgccccggcccttctcctgcccggattgcgggcgagccttccgccgcagctccgggctgagccagcatcgccgcacgcacagcggcgagaagccgtaccgctgccccgactgcgggaagtccttcagccacggtgccaccctggctcagcaccgtggcatccacactggggcgcggccgtaccagtgcgcggcctgcggcaaggccttcggctggcgctccacgctgctgaaacatcgcagcagccacagcggggagaagccgcaccactgcccggtgtgtggcaaggccttcgggcacggctcgctcctggcacagcacctgcgcacgcacggcggcccgcggccccacaagtgcccggtgtgcgccaagggcttcggccagggctctgcgctgctcaaacacctgcgcacgcacacgggcgagcggccctacccgtgtccgcagtgcggcaaggccttcgggcagagctcggcgctgctgcagcaccagcgcacacacacggccgagcgcccctaccgctgcccccactgcggcaaagccttcgggcagagctccaacttgcaacaccacctgcgcatccacacgggcgagcggccctacgcctgcccgcactgctccaaggccttcggccagagctcagcgctgctccagcacctgcacgtgcattcgggcgagcgtccctatcgctgtcagctctgcgggaaggccttcggccaggcctccagcctcaccaagcacaaacgggtgcatgagggtgcagccgctgctgcagctgccgcggccgctgcagctgcagcagcggccgccggcctgggcctcgggcctggcctaagccctgcatccatgatgaggccggggcaggtctccctcctgggtcctgatgctgtttctgtgctcggctctggcttgggcctcagccctggcaccagctctggccgcaaccctgaccctggctctgggccgggcactctgccggatcccagctccaaacccctccccggctccagatccacccccagccctactcctgtggaatcttctgacccaaaggctgggcacgacgctggtcccgaccttgtgcccagcccagaccttgatcctgtgcccagcccagaccctgatcctgtgcccagccctgatcccaaccctgtgtcctgccctgacccctgttctcccactcgtggcactgtcagcccagccctccctaccggcgagagtccagagtgggtacaggagcaaggggcactgctggggcctgatggctgaaggagacgccggcatcctcgggggcctggggaagttgtgtgttgtgcagtcagtaaaatcctcccactgcctccggaaaaaaaaaaaaaaaaaaaaaaaaaaaaaaaaaaaaaaaaaaaaaaaaaa

SEQ ID NO: 4574 - DNA, 11416 bp, Homo Sapiens
  NM_018085
attcggtggcgggtcccggccgcggggctggcgggctgaggggagaaaagatggcggcggcggcggcagctggtgcggcctccgggctgccgggtccagtggcacaaggattaaaggaagcgttagtggatacgctcaccgggatcctatccccagtacaggaggtgcgggcggctgctgaagaacagattaaggtgctggaggtgacggaggaatttggtgttcacttggcagaactgactgtagatccccagggggcactggcaatccgtcagctggcatcagtcatcttgaaacaatatgtggagactcactggtgtgcccaatcagagaaatttaggcctcctgaaactacagaaagggcaaaaattgttatccgggagctattgcctaatgggttgagagaatcgataagcaaagtgcgctccagtgtggcctatgcagtgtcagccattgcccactgggactggcctgaagcttggccccaactcttcaacctgctcatggagatgttggtgagcggagacttaaatgccgtccatggagccatgcgtgtgctgacagaattcactcgtgaagtaacagacacacagatgccacttgttgctcctgtcattctcccagagatgtataagatcttcaccatggctgaggtgtatggtattcgaacccgttcccgagccgtggagatttttaccacttgtgcccatatgatctgtaacatggaggagctggaaaagggtgcagccaaagtcctgatctttcccgtggtacagcagttcacagaggcctttgttcaggccctccagataccagatggccccacatctgacagtgggtttaagatggaggtcctaaaggcagtgacagccctagtgaaaaacttcccaaagcacatggtgtcctccatgcagcagattctgcctattgtttggaacaccctaaccgagagtgcagctttttatgtgaggacagaagtaaattacacagaagaagtagaagatcctgtggattctgatggtgaagtcctgggctttgaaaatctcgtctttagcatttttgaatttgtccatgctctactagaaaatagcaaattcaaaagcactgttaagaaagccttgcctgaattgatttattatattatcctgtacatgcaaatcactgaggagcagattaaagtatggacagccaacccccaacaatttgtagaagatgaagatgatgatacattctcctatactgttagaatagcagctcaagacttgttgctggctgtggccacagatttccagaatgaaagtgcagcagccctggctgctgcagccactcgacatttacaagaagctgagcaaaccaaaaacagtggcactgagcactggtggaagatccatgaggcatgcatgcttgccctaggctcagtgaaggccatcatcactgacagtgtgaaaaatggcaggattcattttgacatgcatgggttcctgaccaatgtcatccttgcagacctcaacctctcagtgtctcctttcctcttgggccgggcactttgggctgccagtcggttcactgttgctatgtcccctgaactgatccagcagttcctacaggcaacagttagtggtcttcacgagacacagcccccatcagttcgaatttctgcagtgagagccatctggggttattgtgaccaactgaaagtctcagagagtacccacgtgctccagcccttcctccccagcatccttgatggcttaattcacctagcagcccagttcagctcagaggtcctcaacctggtgatggagaccctgtgcatcgtttgtacagtagaccccgaattcacagcaagcatggaaagcaaaatctgccccttcaccatcgccattttcctaaagtacagtaatgatcccgtcgtcgcctcactggctcaggacatcttcaaggagctgtcccagattgaagcctgtcagggcccaatgcaaatgaggctgattcccactctggtcagcataatgcaggccccagcagacaagattcctgcagggctttgtgcgacagccattgatatcctgacaacagtagtacgaaatacaaagcctcccctttcccagcttctcatctgccaagctttccctgctgtggcacagtgtacccttcacacagatgacaatgccaccatgcagaatggcggagagtgcttgcgggcctatgtgtcagtgaccctggaacaagtagcccagtggcatgatgagcagggccacaatggactgtggtatgtgatgcaagtggtgagccagctcctggacccccgcacctcagagttcactgcggcctttgtgggccgccttgtttccaccctcatctccaaggcagggcgggaactcggggagaatctagaccagattcttcgtgccatcctcagtaagatgcagcaggcagagacgctcagtgtcatgcagtccctgatcatggtgttcgctcatctggtgcacactcagctagaacctctcttggagttcctgtgtagcctcccaggacctactggcaaacctgctctagagtttgtgatggctgagtggacaagccgacagcacctgttctatggacagtatgaaggcaaagtcagctctgtggcactctgtaagctgctccagcatggcatcaatgcagatgacaaacggctacaggatatccgtgtgaagggagaggagatctacagcatggatgagggcatccgcacccgctctaagtcagccaaaaacccagaacgctggacaaacattcctttgctggtcaagatcctaaagctgatcatcaacgagctctccaacgtcatggaggctaatgccgctcgccaggccactcctgcagagtggagtcaagatgactccaatgatatgtgggaggaccaggaggaggaagaggaggaggaggaggatggtttagctggccaacttttatctgacattcttgctacaagtaaatatgaggaggattactacgaggatgatgaggaagatgaccctgatgccctgaaggatcctctctatcagattgatctgcaggcatatctcacagatttcctctgccagtttgctcagcagccctgctacataatgttttcaggccaccttaatgacaatgagaggcgagttctacagaccatcggcatctaaaaaggggagcctttctacatttgctccttctgggccagccgcaaaccattttgcagccctcactggccttgagatgcactttcttctcaacctaaagtggcatcttgacccttggcccttggcctcggcagtgacactgatgacaattcagaccaggctcaccggtgccgtcacttaggaatgctggaacaaaggacatttctcaaagttcccctgaagacatgccatctctagaaccttttttctccccgactctacccccacctctgttcctagagccctctgctggcgagtccagaaacattattgcccagaaggattatgtgtttatggattattttgccccgcctcaggagcgcaggaagtcactaccatttatattctaaaacagacctatctatgttcataggacttctgatgtgttcagataggaatcctcatgagagatcattatgctttgtgccctggaccactgctgctctgggttctcaggaggaacaggcaagagcagcttcattctaagcctttccagtgacctcagccttgcttctcttctacaacactaaggctcctctgtcagaggaggtcgtcttgtttttgcttcattgcatgacataacccttcccctcaagctgttcctatatatacatgcacacacaaaataagccagacagatggcaatttgatcttccttttttagaaaaaaaaaaaaaaatggggaaaagggattttttttaaatccacctgacccaactatatttaatatgcctctcccacacattaccacagagtctgatattcaaaggttatcccctttccctcaggaagcctctaaagtgcttaagttgtagccctcaaatttgcaacatgtatttttctaggacagtaaagtaatctttacaaatgaatttagttgcatggtataaggtgtctcagcacctgtttgccttctattccctttagaaggtaagtaaaagtaatgggggaaaggattaggtggagcctgtctaaacattctagtgtgtcttggcaaacatagcctgaaatgattcttaaagaactggcattgtttaatcaaatatttttaagggagattccttaattgggaagtttagtctgtttggggttcaaagagtaaatgaggattagaaaatcatggagagaggctgggcgcggtggctaacgcctgtaatcctagcactttgggaggctgagatgggcggatcacttgagatcaggagtttgaggctagcctggccaacacagtgaaacctgcatttctactaaaaatacaaaaattagctgggcatggtggtgcatgcctgtaatcccagttaacttgagatgctgaggcaggagaatcgcttgaacttgggaagcagaggttgcagtgaaccgatatcacaccgttgcattccaaggcaagactcaatcacacacacacacacacacacacacaaatcatggggagaaagatgaaacctgtgttcccctttttttggtagtgcccacatctggtgccccatttttaataaccacaggatatttctttagattgatattctcacaaagaagaaatagaatataggctgggcgtggtgtgtcacacctgtaatcccagcacttacggaggccgaagccagcggatcaccagaggtcaggagttcgagaccagcctgaccaacatgatgaaaccctgtctctactaaaaatacaaaaattagccaggcatggtggcatgcacttgtaatcccagctactcgggaggctgagacaggagaatcgcttgaacctgggaggcagaggttgcagtaagccaagatcgcaccattgcactacagcctgggcaacaagaggagcgaaactctgtctcaaaaaaaaaaaagagaaagaatataaagtgaatctgaatctccactcaaggggatggccccaaggatattgtagctggtaatttcttcatgccactaggtgtccccagtgttcaacctccatgactgagattggaagaagtagagttaaaagtttttactacctttgagaagcctgcgggcatgttcacagtcgtcccatgccagccaggttctgaggctaactgcttgtgcccctgctgcttcacatggcattgtgggagttgctgatactggggaaatgatggcagatctgaccaagtggtgctgagaaaaccaccctcggccttgcagactccatagtttatctcaaggcagtgccagtcggatttggtgctaaaggcataaggccaagtcagcctctgatattggcacaaaagaatggtctcatgccagtagcattgaactgctgagcttgggaaggcttaaggctcccacacacagactgagaatgatgggggtccctctgcgtctgctaattagacaaacattctatatctagtgccaaaagtggtcctaaatcctttggcaagggtcctttctgctctcatgctgatttgggggaggactgggcatcctgcctcaggagaacttgagtcctgaggaaagggccctagtaacacttaagggctacccctggctaacagatactcggctgtgggtgagagcagaaggtcttggacccctcgatgtgcaggtacttaattgtgtttccagtgcattttcatatacattatcccatttaacctttataacaggttcacagagtggatattcccattctgttgatgagaaaaagagtggagagactgtgtccagtgtcagcaggaagaaaaaagatctgttggaggccagtacatgttgacagaaactctagaccatattttgtctcctgtctttggccaaagagaactagcttcagtctgaaaagggcagggctaagtggttacaaggaactaaaaagttcaaggtaagacaaatgaggtaaaaataaaaaagagcacttagctgctctgagacattttagtctcctgactggtaaacagcagctggggcaccaaggggctcccaggagtttgtcgagcttttattggagtgaactgaaaggaaaatggaaggaatgctataagactgaaaagaagttaaagccctaggaaggaagctgataacacaagttacagacgtatatgtgacattgatttgggagaatgaacctacaacaaatgacccaaaagcacctaaataagagtgacgagagtttaacagacattcattatggacttcagagaaaatgatgctaaactggtcttagaatcttctttaattttgttaactaggtaaataatctggacattttagtcaaagcattagacagacagagaagttggtaactgaccactaactaacaaactataaattcacccattgtgggttgacctggtaagttcccccagggctgtgtccttggcccctcctttgatattagtgacagatgactttttttatgccttacccattccacaaaagaatttgaagccatttacacaagagatagtactagtaaattaggagtgctgatcaaatttttagataataagaaacccttaggaaggatgacaatttagaatccaaatttaggatccaaacaaataccattacaaactataaaaatgagcagaatctaaatgtaacatttcaataaatgcagattgataataacatctgtgcagagttgaggactatagagtactgtgctgtcactaacagtattgtgtgctactaagagtttaatggctgggtgtggtggctcacacctgtaatcccaacactttgggaggcctaggtgggtaaatcagctgagatcaggagttcgagaccagcctggccaatgtggtgaaaccccgcctctactaaaaataaaaaaattagctgggcatggtggcacgtgcctgtaatcccagctactcgggaggctgaggcgggagaatcacttgaacctgggagacagaggttgcagtgagtcgagatcacaccattgcactccagcctgggcaacagagcaagattctgtctcaaaaaataaagtttattatgccaggagggccaggtgtggtgccacacccatgtaatcccagcactttaggaggctgaggagggcagatcacttaagcccaagagtttgagaccagtctgggcaatgtggcaataccttgtctcttaaaatttaaaataaaaaaaaagtttattatgccaggaactgttaatgtgtccaaaaaaactccagtgtggttctaggatgagataataaaaacaggttgtctagggtagtgtggaaggtcctttcagtcttcctgtgcctatcagtgatcctcattgccatgttcccttctggtgctcaaccggaggctccctgacagatgagtcctctgccagaggaaggctaagatgtagaggacaaatcgtgtcaaggaaaagaagcttgaaggagctaagaatgcttagcttagagaagacaagaggaaacaggacatggctttgggaagttcaaggatggtccagtgaaatacatactatacttttgcaccccagctaagctgacccatgatcagtaagtaggaaataaaaggccaatttctggctactcttgcccccaaccccatttcagtgaactatgaacctctattagatatgcaaggccggtgctaaatgctggagggctttggccctttccctcaaggagctagtctagtagggggtcagaaatacagatgggcctgaacataatgatggtttgacttccagtttttcaactttaggattgtgcaaaagctatacacattcggtagaaacagtacttcaagtatccatacaatcagtacagtattcaataaattacatgagacattcaacactttattataaaataggctttgtgttagatgagtttgcccaactgtaagctaatgtaagtgatctgagtaggtttaaggtagcctaggtgtattaaatgcatttttcacttaacggtattttcaacttttgttgggtttattgggatgtagccccattataagctgaaaagcatctgtagtataataaatgtggggagtgctgtgagagaaataagtgtactgggtttagttcccactgcccaaaaaaggaactggctaatggtaacctgggggaggaagtcgggtaagttgcatggagaaggcaacccttgaacacttgcaaggagctaacaatacctgcttctggagtatttaaacgccagtgggtatgctaaatacttttacctcagaccacctactaaccttacaaagtagtccactttgctcacccagttttacagattgatgaaactgaagcagacagatattgttaacctatcaaaggtcaccctgcaagtgtgtgattatagtccaagcagcttgtacttgttgcctatttgttttgcctttcctgtgcatttgccaggcagatgagagtggggtaagacattgcagagaaaaagtaagaaaaggccgtcatgaaacaatttcattttcagaccttataagcacgttacaagtactgatatttatgcttaagttcacgggagtcctggccagaaataaagctggaaggacaagtggggggcagattgtgaaggatccttcaagacctgcttcctctagagaatgggagactacccaagataactaaacagggaagtgatcaggttttgtgtcttagaaaagtgttgcagtgttgatgcaaatgtgactagaagggtgacttggaacctggattgaaggggtgggagatgggagaaaggaatgcagtctggcagcagctacagcagtccaggtgggaaaacccagagcctgaactaaggttgtaactagaggggatagggtggaagagctggattagagatgttgacaagataaagtcagtaggacttaaagactgacaagtaaggattttccaaaagtgagagctgtggaatgaattgtcttaaaatgttgcagtgagttcctcctcatcaatccaagtgctcgatcagaggctagacctttagttagcagtcacgggaaaattccccattctcacggggatttagactaggtcttaaccatactttaccaagattccagtagcaaagcacccaaaagtaatcgcaataaaattccaatttttgtaggccgggcatagtggctcacacctgtaatcccagcactttgggaggccgaggcaggcggaccacgacatcaagagttcaagagcagcctggccagcatggtgaaaccccgtctctactaaaaatacaaaaaaattagctgggcatggtggcgcatgcctataatcctagctactcaggcagctgaagcaggagaattgcttgaacccgggaggcagaggttgcagtgagccaagatcatgccactacactccagcctgggcgacagagcgacactctgcctcaaaaaaaaaaaaaaacaaaaaaaaaaacaagttttgtgaatttaagtttccctaatggatggtacaggtcaacatttgccatctaatgacacttacattccagttttttccttttttgagtaactgggaaaagggtggcattactgctggcttcctaaaattgaaaagtatactagggtttttaaacctgtgtagaatacatgatatggtagcaaatgtgctgtaggaagaaaagcaatgaggaactactggcctgactaggaggcctagaagtccctcccaggcttgagttgttctgacttggcatgattacatagctgcggcaagtgacgtttccttcaagccttggttccctcatctgtaaaatagggaactaatacctacctcacaggattgtagttagaattaaggatgacttcattaaagcacctctagtggtggaagatgtcccatcctatcccccacccatagctgggagctatgtttggctcattcttcctgactcactggattacactgtgactcagttcaatttcacacatgctgctgctaaattagggtcttggtgagcctttgggaggacagctctgaggaatgaattgtagcactgcagccctgcctgaggaacatgatagaaacaggtggtaggcccagctcttgccttccacctactaagcagtttttctgtggttagctgtgtgacataaactatcggtgtattaatttgctttcactagattcccccccccccaacaacttagtccaagaacatacctgaattctttgcatttccttgccttagttgcttttgtagggtggacagcaggactgcatgagaatagctgtgcttctggaccctatggtgaaagctctagtgaactgcaattaggcccagggtcccggaggaagaaggggagagaaaaaggggggtagttttccaaaagataagtaggggacaaaaaagtccacggggcctatgagcggtgagactcctgccctgattgtggcaaagcacctggagatgatagaacttcctagggaaaaggctgcatggagtccccagggatgctgggccctggtcaccaaggctccctgggaaggtctcttgtacctggggcacacagaccaacacttctgaatttgcaagcttaagagcatgtatgagcagaacctgtgcagaccaaggcttagagggctcacctcaatgttttgcactgtgtgagaccccaggaccttttcgtgattctggagaggggaacaaaccataataacaacaaaccaggtagcaggatagagactcattctcatctattttggttaaaagaaaataaatgtatttcttccacacctgattttgtgattgcaaattcataactaatatccctcgtcagctccgctgactcatccctgccacagggaggttcacagcaagagcacagaaactagggccagtgcccggttgtgtgaccttgagtaagttctttttcccttgaacagggagagagacacaatggatcagagtgtctctgccagttctaacttggggattctagtgggttgaaccgaacggtagtccgtttccaaaagaggaagccaagaccagagggggagtggttccttcaagtttgcagaaccagtaagtggcagagcaggactcatatctagttagtggttcagagcatgggctccggagctagactgcctggatttgaaccctggctttgccacttgcctgttgggtgactttggacaagctgcttaaattatgtctccatttcctaatccacagaacaagtgtaatactagttatctgtttcatggagtgattgtgaggattaaataaagttaatataacacaaagca

SEQ ID NO: 4575 - DNA, 2092 bp, Homo Sapiens
  NM_018090
gaaacctggtcagagagtcgcaccgcttccgtccgtcggacagaggaacggtggaagtcgccggaagttcggtgggctccaggcgtcgcgatggaggagagcgggtacgagtcggtgctctgtgtcaagcctgacgtccacgtctaccgcatccctccgcgggctaccaaccgtggctacagggctgcggagtggcagctggaccagccatcatggagtggccggctgaggatcactgcaaagggacagatggcctacatcaagctggaggacaggacgtcaggggagctctttgctcaggccccggtggatcagtttcctggcacagctgtggagagtgtgacggattccagcaggtacttcgtgatccgcatcgaagatggaaatgggcgacgggcgtttattggaattggcttcggggaccgaggtgatgcctttgacttcaatgttgcattgcaggaccatttcaagtgggtgaaacagcagtgtgaatttgcaaaacaagcccagaacccagaccaaggccctaaactggacctgggcttcaaggagggccagaccatcaagctcaacatcgcaaacatgaagaagaaggaaggagcagctgggaatccccgagtccggcctgccagcacaggagggctgagcctgcttccccctcccccaggggggaaaacctccaccctgatccctccccctggggagcagttggctgtggggggatccctcgtccagccagcagttgctcccagttcaggaggtgctcctgtaccctggccacagcccaatcctgccactgctgacatctggggagactttaccaaatctacaggatcaacttccagccagacccagccaggcacaggctgggtccagttctgacctgagcacggtttttcctcatgtgacttctgggaaggcgctccctcatctgggccaaaggaaggaggacgaagccctcctcagctggcctgtgtttggggcatgaatctctcctctcctccttgtctggctctgttgacaaaccgggcatgtttggcagtaaattggcaccgtgtcacactgtttcctgggattcaagtatgcaaccagaacacaggagaagaaaagctccaggatccctgtccccatctgtcctcttgatgtgagagagactctgagacttcttccatcgcaatgacctgtattaaacacaagccccccaagcaaaagaagaggttgagtttgctgccaggattcagatcagcccttcccagggtctgcaggtgtcacatgatcacagttcagcgggaggctttccgtacccacactggctgtagccacttcagtccatctgccctccagaggaggggtttcttcctgatttttagcaggtttagaggctgcagcttgagctacaatcaggagggaaattggaaggattagcagcttttaaaaatgtttaaatattttgctttgctaatgtgctgatccgcactaactcatctttgcaaaaggaactgctccctcggcgtgccccagctggggcctctgaagggattcctcactgtgggcagctgccctgagcttcaggcagcagtgtttatctctggccagttgtctggtttccatgtattctaggccaggtaggcaacacagagccaaggcgggtgctggaagccagacggaacagtgttggggcaggaaggtggatgctgttgtcatggagctgtgggagttggcactctgtctgctggtggccctctcggctcacatgttcacagtgcagctcctggcagacttgggttttctctttggtggtttctaaagtgccttatctgcaaacaacttcttttctccttcaggaactgtgaatggctagaagaaggagctcagtaaactagaagtccagggttgcttggtttactggtttataagaaatctgaaagcacctctgacattccttttattaactcacctctcagttgaaagatttcttctttgaaaggtcaagaccgtgaactgaaaaaagtgttggcctttttgcgggaccagatttttaagataaaataaatatttttacttctgtcattgtatgtgaaaaaaaaaaaaa

SEQ ID NO: 4576 - DNA, 3232 bp, Homo Sapiens
  NM_018091
gtgcacgtcggcttccgggaagagctttacgatacattgaccgacattttacgacaggcgggattgttttgtggctgtcagctttccccgtggtctgagtttgtggctgcatttttatctctggtggctctgctacggcggcgcagaaatgaggcagaagcggaaaggagatctcagccctgctgagctgatgatgctgactataggagatgttattaaacaactgattgaagcccacgagcaggggaaagacatcgatctaaataaggtgaaaaccaagacagctgccaaatatggcctttctgcccagccccgcctggtggatatcattgctgccgtccctcctcagtatcgcaaggtcttgatgcccaagttaaaggcgaaacccatcagaactgctagtgggattgctgtcgtggctgtgatgtgcaaaccccacagatgtccacacatcagttttacaggaaatatatgtgtatactgccctggtggacctgattctgattttgagtattccacccagtcttacactggctatgagccaacctccatgagagctatccgtgccagatatgaccctttcctacagacaagacaccgaatagaacagttaaaacaacttggtcatagtgtggataaagtggagtttattgtgatgggtggaacgtttatggcccttccagaagaatacagagattattttattcgaaatttacatgatgccttatcaggacatacttccaacaatatttacgaggcagtcaagtattctgagagaagcctcacaaagtgtattggaattactattgaaaccagaccagattactgcatgaagcgacatttaagtgacatgttgacctatggctgcacaaggctggagattggggtgcagagtgtttatgaagatgtggctagagacaccaacaggggccacactgtgaaggcagtgtgtgagtcatttcacctggccaaagattccggttttaaagtggtggcccatatgatgcctgacctgccaaacgtgggactagaaagagacattgaacagttcacagagttttttgagaaccctgcttttcgtcccgatgggctgaaactctatcctaccctggtgattcgtgggaccgggctttatgagctttggaaatcaggaagatataagagttactctcctagtgacctggttgaattggtggctcggatcctagccctcgtgcctccatggactcgagtgtaccgagtacagagggatattccaatgcctttagttagctcaggagtagagcatggtaacctgagagagctggcacttgcaagaatgaaagacctcggaatacagtgtcgagatgtgagaaccagagaagttggaatccaagaaattcatcacaaagtacggccataccaggttgaattggtaaggagagattatgttgcaaatggtggctgggaaacattcttgtcatacgaagacccagatcaagacattttgattggcctcctacgattacgcaagtgttcagaagaaactttccgtttcgaattgggtggaggtgtctccatagtacgagagctgcatgtgtatgggagtgtggtccctgtgagcagccgggatcctactaaatttcagcatcagggatttggcatgctgctgatggaggaagcagaaagaatagctagagaagaacatgggtctgggaaaatcgctgtgatatcaggggtcggcaccaggaattattatagaaagatcggctacagattacaaggcccgtacatggtgaagatgctgaaataatggccacaccagtccactcttctgcagtatcctccctggcagaacacggagaatcaggatttcttaaatactcaacagagaggctgagcagagcaaatggggggcttcaccctcatcccgcagctgcagagactggaaactgccttcaaggccacggctggtcatctgctgaccacaccccagatccgccctctcctgcgtgcaccccaaaaaatcacttgcgtttttgaggcttaaatcatctatccagtttctacattttgcatgaggcctgcaggtggcctattttgactcagacggtgaaaaaagcaaattaactcatttggacaccataactcatgcaataaaactgattgtcattcgaggagcaaacttaagagtagtttatttatataccctggggacagaaagtcaggttgaaacaggaaaaccaccagactctaatctcagccctttaacgacatacgcattggagcgcaagttaggaaaatgagcttttgttttcatggaaatcattctgattacagtgctgatgtttagaaataaatagcagtgtgactgggaaagaggaattgcagttgtgggggtgtgagcctggcagcagccagccagcagcctctcccaggcgggagtctaccatccgagacggcgatgacaaagagcttcattccacattctttgttatctctacttcccaccctcttggcaactacagagcagtgtgggcagccccaagtgtggtccccagagagcgtttggctttcctgtctgtctatcctgagcgggtggagtctcaggttgtgtgcccctaaatcaagatttgcttccacagaagccattacttgcaattttttttttttttctgagaaagtctcgctgtgtcacccaggctggagtgcagtggcgcaatctcactgcatcctccgcctcccgggttcaagcgattctcccgcctcagcctcctgagtagctgggattacaggcacccgccgctgctaatttttgtatttttagtagagatgggggtttcaccatattggtcaggctggtctcgaactcctgacctcaggtgatcaacccaccttggcctccctaaatgccgggattacaggcatgagccaccgctcccagcctttgattttttaaggtggattttggttgttataaatggagaaaggtaagagttcaagttcaacccgtgtgtgaaagcaaaacaatggaaaacaggattggcttcttcaaaggctcctcttgtagaactgcctctttgaaatttcgaggtaatctactttggagactctgcctggagagggtcagttcctaagttaaaagcatcgcttaaccttggctcctgtggcattttacaaaggtttaaaggaattgattcctctgaaagggcctgaaaataaaaagtctttaacatacaaaaaaaaaaaaaaa

SEQ ID NO: 4577 - DNA, 2861 bp, Homo Sapiens
  NM_018094
ggttggggtttgggggaggagatccgctcacacacaagaggagagtgttgagccgccatatctgctgctgccgccgcagttgcgaatgcagcatcggcgcttagctgcctccgcggtgcagctaaggttcgtgtcgctaccccttggcccttcgctcttgctgccttaaccccgccggcggagcccgctcttctggcctgttgagcccgctccctcactgccacacagcaagttccgagaccatggattcgggcagcagcagcagcgactcggcgcccgattgctgggaccaggtggacatggaatccccggggtcggccccgagcggggatggagtctcctctgcggtggccgaggcccagcgcgagcccctcagctcggctttcagccgtaagctcaacgtcaacgccaagcccttcgtgcctaacgtacacgccgcggagttcgtgccgtccttcctgcggggcccgactcagccgcccaccctcccggccggctccggcagcaacgatgaaacctgcaccggcgcgggataccctcaaggtaaaaggatgggacggggggcacctgtggaaccttcccgagaggaaccgttagtgtcgcttgaaggttccaattcagccgttaccatggaactttcagaacctgttgtagaaaatggagaggtggaaatggccctagaagaatcatgggagcacagtaaagaagtaagtgaagccgagcctgggggtggttcctcgggagattcagggcccccagaagaaagtggccaggaaatgatggaggaaaaagaggaaataagaaaatccaaatctgtgatcgtaccctcaggtgcacctaagaaagaacacgtaaatgtagtattcattggccatgtagacgctggcaagtcaaccatcggaggacagataatgtttttgactggaatggttgacaaaagaacactggagaaatatgaaagagaagctaaggaaaaaaacagagaaacctggtatttgtcctgggccttagatacaaatcaggaggaacgagacaagggtaaaacagtcgaagtgggtcgtgcctattttgaaacagaaaggaaacatttcacaattttagatgcccctggccacaagagttttgtcccaaatatgattggtggtgcttctcaagctgatttggctgtgctggtcatctctgccaggaaaggagagtttgaaactggatttgaaaaaggtggacagacaagagaacatgcgatgttggcaaaaacggcaggggtaaaacatttaatagtgcttattaataagatggatgatcccacagtaaattggagcatcgagagatatgaagaatgtaaagaaaaactggtgccctttttgaaaaaagtaggcttcagtccaaaaaaggacattcactttatgccctgctcaggactgaccggagcaaatattaaagagcagtcagatttctgcccttggtacactggattaccatttattccgtatttggataacttgccaaacttcaacagatcaattgatggaccaataagactgccaattgtggataagtacaaagatatgggcactgtggtcctgggaaagctggaatccgggtccatttttaaaggccagcagctcgtgatgatgccaaacaagcacaatgtagaagttcttggaatactttctgatgatactgaaactgattttgtagccccaggtgaaaacctcaaaatcagactgaagggaattgaagaagaagagattcttccaggattcatactttgtgatcctagtaacctctgccattctggacgcacgtttgatgttcagatagtgattattgagcacaaatccatcatctgcccaggttataatgcggtgctgcacattcatacttgtattgaggaagttgagataacagcgttaatctccttggtagacaaaaaatcaggagaaaaaagtaagacacgaccccgcttcgtgaaacaagatcaagtatgcattgctcgtttaaggacagcaggaaccatctgcctcgagacgttcaaagattttcctcagatgggtcgttttactttaagagatgagggtaagaccattgcaattggaaaagttctgaaattggtcccagagaaggactaagcaattttcttgatgcctctgcaagatactgtgaggagaattgacagcaaaagttcaccacctactcttatttactgcccattgattgacttttcttcatattttgcaaagagaaatttcacagcaaaaattcatgttttgtcagctttctcatgttgagatctgttatgtcactgatgaatttaccctcaagtttccttcctctgtaccactctgcttccttggacaatatcagtaatagctttgtaagtgatgtggacgtaattgcctacagtaatgaaaaattaatgtactttaatttttcattttcttttaggatatttagaccacccttgttccacgcaaaccagagtgtgtcagtgtttgtgtgtgtgttaaaatgataactaacatgtgaataaaatactccatttgaaactcttcggttatttgaaatgcttttgaataatgtttaaatgtcattatgtaatgctattcaattagctttattactttctcaaatagttgaatatgttctatcacttaaaaacttaaaaactcttcaccacttactgttttaagtgaggaatttacaaacaatgcataagtgtgtattaaaggaataattttaattttgagaaaaaaacgtatgttaaggctcttcccagtgggctttgttttctctgtccaagtccagtcaataaaggagctcttctgcttccccacttgtgatttgaaaaaaaaaaaaaaaaa

SEQ ID NO: 4578 - DNA, 2409 bp, Homo Sapiens
  NM_018095
aagtgtgcagcagatcttcttccgggcggacgtggagccggaagcggaggttccgggctccgggatgaaaggagggaacgcagacagctggcagagagagaagttggctagcatggaatcaccagaggagcctggagcatccatggatgagaactactttgtgaactacactttcaaagatcggtcacattcaggccgtgtggctcaaggcatcatgaaactgtgtctagaggaggagctctttgctgatgtcaccatttcggtggaaggccgggagtttcagctccatcggctggtcctctcagctcagagctgcttcttccgatccatgttcacttccaacctgaaggaggcccacaaccgggtgattgtgctgcaggatgtcagcgagtctgttttccagctcctggttgattatatctaccatgggactgtgaaacttcgagctgaggagttgcaggaaatttatgaggtgtcagacatgtatcagctgacatctctctttgaggaatgctctcggtttttggcccgcacagtgcaagtgggaaactgccttcaggtgatgtggctggcagatcggcacagtgatcctgagctctatacggctgccaagcactgtgccaagacccacctggcccagctgcagaatacagaggaatttctccacttgccccaccgcttactcacagatatcatctcggatggagttccgtgttctcagaacccaacagaggcaatagaagcctggatcaactttaataaagaggaaagagaggcttttgcagagtcactcaggacaagcttgaaggaaattggggagaatgtgcacatttacctgattgggaaagagtcatctcgtacccactcgttggctgtgtccttgcactgtgcagaagatgactccatcagtgtaagtggccaaaacagtttgtgccaccagatcactgcggcctgcaagcatggtggagacttgtatgtggtgggagggtccatcccacggcgcatgtggaagtgcaacaatgccaccgttgactgggagtggtgtgctcctttgcctcgggaccggctccagcacaccctggtgtctgtgcccgggaaagatgccatatattcactgggtggcaagacactgcaagataccctctccaacgcagtcatttattatcgcgtaggtgataatgtgtggacagagacaactcagctagaggtggctgtgtcaggggctgctggtgccaacctcaacgggatcatctacttactagggggggaggagaatgatctggacttctttaccaaaccttcccgactcatccagtgctttgacacagagacagacaaatgccatgtgaagccctatgtgctgccctttgcaggccgcatgcacgcagctgtgcataaagatctggtgttcatcgtggctgaaggggactccctggtgtgctacaatcccttgctagacagcttcacccggctttgccttcctgaggcctggagctctgccccatccctctggaagattgccagctgtaacgggagcatctatgtcttccgggaccgatataaaaagggggatgccaacacctacaagcttgaccctgccacttcagccgtaactgtcacaagaggtattaaggtgctgcttaccaatttgcagtttgtgttggcctaaggctgtggggaggggaggagaactgctcactccttttccctccccatacaaactcaaagtcccctgggccccaattcagagttatgttttttttggcacatactagaaaggcagtgcctcagcccttccctgaatccatggaggtgttctgtttggggctttttagactgctgctgctcagctggttgcttgaactgacagtaggccagcctgttctctgccattccctagtcatcctgtgcctcaccacagcttgcttagagcaagccttttctcagaccttaggcacagcctctcctctttacctgatcaatgttaaatgtaagcacccctgatcccaggacataaggaaagatgcccaattgtacttttgttctatagcctgtgaaatggctagttgatcatttttccacaaagaattaggtgttaagagttttccttcaggctttacttaggagaatggactaagctgaaggtgtacttcaccagcaagagtcaactctagaattcaggatgttccttctattgttttcttatccatctgtcaggaaatgtaactttggttttatttttggcttattccaaggggtaagccagaaaatagaaatgattatttctgattaatagcagaaactttttcaatctcaaatatataaggtgtctgctcttttaaaagctctaagctaagtcaagagctaggaactgttgatacaaataaaagtttttgaagggaaaaaaaa

SEQ ID NO: 4579 - DNA, 3916 bp, Homo Sapiens
  NM_018098
agagtgctgatttagaagaatacaaatcatggctgaaaatagtgtattaacatccactactgggaggactagcttggcagactcttccatttttgattctaaagttactgagatttccaaggaaaacttacttattggatctacttcatatgtagaagaagagatgcctcagattgaaacaagagtgatattggttcaagaagctggaaaacaagaagaacttataaaagccttaaaggacattaaagtgggctttgtaaagatggagtcagtggaagaatttgaaggtttggattctccggaatttgaaaatgtatttgtagtcacggactttcaggattctgtctttaatgacctctacaaggctgattgtagagttattggaccaccagttgtattaaattgttcacaaaaaggagagcctttgccattttcatgtcgcccgttgtattgtacaagtatgatgaatctagtactatgctttactggatttaggaaaaaagaagaactagtcaggttggtgacattggtccatcacatgggtggagttattcgaaaagactttaattcaaaagttacacatttggtggcaaattgtacacaaggagaaaaattcagggttgctgtgagtctaggtactccaattatgaagccagaatggatttataaagcttgggaaaggcggaatgaacaggatttctatgcagcagttgatgactttagaaatgaatttaaagttcctccatttcaagattgtattttaagtttcctgggattttcagatgaagagaaaaccaatatggaagaaatgactgaaatgcaaggaggtaaatatttaccgcttggagatgaaagatgcactcaccttgtagttgaagagaatatagtaaaagatcttccctttgaaccttcaaagaaactttatgttgtcaagcaagagtggttctggggaagcattcaaatggatgcccgagctggagaaactatgtatttatatgaaaaggcaaatactcctgagctcaagaaatcagtgtcaatgctttctctaaatacccctaacagcaatcgcaaacgacgtcgtttaaaagaaacacttgctcagctttcaagagagacagacgtgtcaccatttccaccccgtaagcgcccatcagctgagcattccctttccatagggtcactcctagatatctccaacacaccagagtctagcattaactatggagacaccccaaagtcttgtactaagtcttctaaaagctccactccagttccttcaaagcagtcagcaaggtggcaagttgcaaaagagctttatcaaactgaaagtaattatgttaatatattggcaacaattattcagttatttcaagtaccattggaagaggaaggacaacgtggtggacctatccttgcaccagaggagattaagactatttttggtagcatcccagatatctttgatgtacacactaagataaaggatgatcttgaagaccttatagttaattgggatgagagcaaaagcattggtgacatttttctgaaatattcaaaagatttggtaaaaacctaccctccctttgtaaacttctttgaaatgagcaaggaaacaattattaaatgtgaaaaacagaaaccaagatttcatgcttttctcaagataaaccaagcaaaaccagaatgtggacggcagagccttgttgaacttcttatccgaccagtacagaggttacccagtgttgcattacttttaaatgatcttaagaagcatacagctgatgaaaatccagacaaaagcactttagaaaaagctattggatcactgaaggaagtaatgacgcatattaatgaggataagagaaaaacagaagctcaaaagcaaatttttgatgttgtttatgaagtagatggatgcccagctaatcttttatcttctcaccgaagcttagtacagcgggttgaaacaatttctctaggtgagcacccctgtgacagaggagaacaagtaactctcttcctcttcaatgattgcctagagatagcaagaaaacggcacaaggttattggcacttttaggagtcctcatggccaaacccgacccccagcttctcttaagcatattcacctaatgcctctttctcagattaagaaggtattggacataagagagacagaagattgccataatgcttttgccttgcttgtgaggccaccaacagagcaggcaaatgtgctactcagtttccagatgacatcagatgaacttccaaaagaaaactggctaaagatgctgtgtcgacatgtagctaacaccatttgtaaagcagatgctgagaatcttatttatactgctgatccagaatcctttgaagtaaatacaaaagatatggacagtacattgagtagagcatcaagagcaataaaaaagacttcaaaaaaggttacaagagcattctctttctccaaaactccaaaaagagctcttcgaagggctcttatgacatcccacggctcagtggagggaagaagtccttccagcaatgataagcatgtaatgagtcgtctttctagcacatcatcattagcaggtatcccttctccctcccttgtcagccttccttccttctttgaaaggagaagtcatacgttaagtagatctacaactcatttgatatgaagcgttaccaaaatcttaaattatagaaatgtatagacacctcatactcaaataagaaactgacttaaatggtacttgtaattagcacttggtgaaagctggaaggaagataaataacactaaactatgctatttgatttttcttcttgaaagagtaaggtttacctgttacattttcaagttaattcatgtaaaaaatgatagtgattttgatgtaatttatctcttgtttgaatctgtcattcaaaggccaataatttaagttgctatcagctgatattagtagctttgcaaccctgatagagtaaataaattttatgggcgggtgccaaatactgctgtgaatctatttgtatagtatccatgaatgaatttatggaaatagatatttgtgcagctcaatttatgcagagattaaatgacatcataatactggatgaaaacttgcatagaattctgattaaatagtgggtctgtttcacatgtgcagtttgaagtatttaaataaccactcctttcacagtttattttcttctcaagcgttttcaagatctagcatgtggattttaaaagatttgccctcattaacaagaataacatttaaaggagattgtttcaaaatatttttgcaaattgagataaggacagaaagattgagaaacattgtatattttgcaaaaacaagatgtttgtagctgtttcagagagagtacggtatatttatggtaattttatccactagcaaatcttgatttagtttgatagtgtgtggaattttattttgaaggataagaccatgggaaaattgtggtaaagactgtttgtacccttcatgaaataattctgaagttgccatcagttttactaatcttctgtgaaatgcatagatatgcgcatgttcaactttttattgtggtcttataattaaatgtaaaattgaaaattcatttgctgtttcaaagtgtgatatctttcacaatagcctttttatagtcagtaattcagaataatcaagttcatatggataaatgcatttttatttcctatttctttagggagtgctacaaatgtttgtcacttaaatttcaagtttctgttttaatagttaactgactatagattgttttctatgccatgtatgtgccacttctgagagtagtaaatgactctttgctacattttaaaagcaattgtattagtaagaactttgtaaataaatacctaaaacccaagtgt

SEQ ID NO: 4580 - DNA, 2235 bp, Homo Sapiens
  NM_018099
cacagagcctttcaattcagcttggggtgagctgcacttcaggcatggggatataatagtgtgatgaaccattcttctgaaggttcttctgaaaagctgctggtcttgggatactgtgagagcccctctcattgctctttagaagtaatttaaatttttctgctacattgtctgctcagctcgtattctggtcatagaggaacctgaagccagagaaactagacaaaaaggaacctctttcaggagctataaaagaaagggaggaatcatgtccacaattgcagctttctatggcggcaagtccattctcatcacgggggccacaggctttctgggcaaagtgctaatggagaagctgtttcgcaccagcccagacctgaaagtcatttacatccttgtgaggcccaaggctggccagacactgcagcagagggttttccagatcctagacagtaagctatttgagaaagtcaaagaagtttgtccaaatgtgcatgagaagatcagagctatttatgcagatctcaatcagaatgactttgccatcagcaaagaggacatgcaggagcttctctcctgtacaaacataatatttcactgtgcagccactgtacgctttgacgacactctcagacatgctgtgcaacttaacgtcactgccacccggcagctcttgcttatggctagtcagatgccaaagctggaagcctttatacatatctctactgcctattcaaattgtaacctgaagcacatcgatgaagttatctatccgtgccctgtggagccaaaaaaaatcattgattcccttgagtggttagacgatgctattattgacgagattacacccaagctgatcagagattggcccaatatttatacctacaccaaggccttgggagaaatggtggtgcagcaagagagcaggaacctgaacattgccatcataaggccctccattgtgggagcaacttggcaggagcctttcccaggttgggttgataatataaatggacctaatggaatcattattgcgactgggaaagggtttcttcgggccataaaagctactccaatggctgtggcagacgtaattccagttgatacagtcgtcaatctcatgctagctgtaggatggtatactgcagttcacagacctaagtcaacattagtctaccacattacatctggtaacatgaatccctgcaattggcacaaaatgggagtccaagtcttggcaacctttgaaaaaatcccatttgagagacctttcaggaggccaaatgctaattttaccagcaacagcttcacatcacagtactggaatgcggtcagccaccgggcccctgccattatctatgactgctatctgcggctcactggaaggaagcccaggatgacaaagctcatgaatcggcttttaagaactgtttccatgttggagtatttcatcaaccggagttgggaatggagcacgtacaatacagaaatgctgatgtctgagctgagtcctgaagaccagagagtattcaactttgacgtgcgccagttgaactggttggaatacattgaaaattatgttttgggagttaaaaaatacttattgaaagaggatatggctgggatcccaaaagcaaagcaacgcttaaaaaggctccgaaatattcactacctctttaatactgccctcttccttatcgcctggcgccttctcattgcaagatctcagatggctcggaatgtctggttcttcattgtaagcttctgttataaattcctctcctactttagagcatccagcacgctcaaagtttaagagcatttagccatcgccttttatctggaacctctcagatacctctaaaacagcaaactgtgattctcaagattagaaagtaacaaggaatatgcccaaactgtcaaatgtcacctgttatgtattcgtccctattccttaactatgtatttttatttcagtgagagaaggaaagttgtaaactagcccatagtcacctatattttagggaaaaaaatccaaattgtttcctaacattctattttatgcccttgcgtattaaacgtgaaagtactcccaaaaaaaaaaaaaaaaaaaaaaaaaaaaaaaaaaaaaaaaaaaaaaaaaaaaaaaaaaaaaaaaaaaaaaaaaaaaaaaaaaaaaaaaaaaaaaaaaaaaaaaaaaaaaaaaaaaaaaaaaaaaaaaaaaaaaaaaaaaaa

SEQ ID NO: 4581 - DNA, 5596 bp, Homo Sapiens
  NM_018100
gcggcccacttaccgcgagaacgcggagtcctgcggatggcgcacgcgcaaacctcctgtgatgcctgcgcctcctggccccgccttccgctcgtgggagttccggatgtttagcgttaccatggatcctggaggtgcccgcgaacactgcttgtcgcctgggcaaccggagaggacgaagcaggacctaggtggcggcggtggtaccggctgcaatggtgtccaatcccgtgcatggcttgccctttcttccgggcacgtcctttaaggactctacgaaaacagccttccacagaagtcagacgctgagctacaggaacggctatgcaattgttcgacgtccaacagttgggataggcggagaccggctccagttcaaccagctgtcccaggctgagctggatgagttggccagtaaggcaccagtcttaacttatggccaacctaaacaagccccacctgcggattttattcctgcgcatgtggcctttgacaaaaaggtactgaaatttgatgcctatttccaagaagatgttcctatgtcaactgaggaacagtataggatccgtcaggtgaacatttactattatctagaagatgacagcatgtctgtcatagagcctgttgtagaaaattctggaatccttcaaggcaagttaataaaacgccagcggctagccaagaatgaccggggtgaccattaccattggaaagacctaaatcgaggaataaacatcacaatttatggcaaaactttccgcgttgttgactgtgaccaattcacacaggtatttttagaaagccaaggaattgagttaaatccaccagagaagatggctcttgatccttacactgaactccgaaaacagcctcttcgtaagtatgtcaccccatcagactttgatcaactcaagcaatttctcacctttgacaaacaggtccttcgattctatgcaatctgggatgatacagacagcatgtatggtgaatgtcggacctacatcattcattactatcttatggatgatacggtggaaattcgagaggtccacgaacggaatgatgggagagatcctttcccactcctaatgaaccgccagcgtgtgcccaaagttttggtggaaaatgcaaagaacttccctcagtgtgtgctagaaatctctgaccaagaagtgttggaatggtatactgctaaagacttcattgttgggaagtcactcactatccttgggagaactttcttcatttatgattgtgatccatttactcgacggtattacaaagagaagtttggaatcactgatttaccacgtattgatgtgagcaagcgggaaccacctccagtaaaacaggagttgcctccttataacggttttggactagtggaagattctgctcagaattgttttgctctcattccaaaagctccaaaaaaagacgttattaaaatgctggtgaatgataacaaggtgcttcgttatttggctgtactggaatcccccatcccagaagacaaagaccgcagatttgtcttctcttactttctagctaccgacatgatcagtatctttgagcctcctgttcgcaattctggtatcattgggggcaagtaccttggcaggactaaagttgttaaaccatactctacagtggacaaccctgtctactatggccccagtgacttcttcattggtgctgtgattgaagtgtttggtcaccggttcatcatccttgatacagacgagtatgttttgaaatacatggagagcaacgctgcccagtattcaccagaagcactcgcgtcaattcagaaccatgtccgaaagcgagaagcgcctgctccagaagcagaaagcaagcaaactgaaaaggatccaggcgtgcaggaattggaagcattaatagacacaattcagaagcaactgaaagatcactcatgcaaagacaacattcgtgaggcatttcaaatttatgacaaggaagcttcaggatatgtggacagagacatgttctttaaaatctgtgaatcgcttaacgtcccagtggatgactccttggttaaggagttaatcaggatgtgctctcatggagaaggcaaaattaactactataactttgttcgtgctttctcaaactgacctgctgatgagaaaatgcaagacaatttttgatactggaactatgctttgaaatacaccttacactcttcatagaggcatttacagggttcctgaagttttatttctgttttggttcttctttcactcctactgaagtcgaaactaaattggatctaataggatctaagattggtgccttatttagggtgataggggtatagcaatgtctaattttgtgtgtcaaattgacttggccacagggggcccaaatatttcctttctttctttttaaaaaaataaatttttttagagatgggatctcactctgtcatacaggctggagtgtggtggcactatcctagttctatgaagcctcagactcctgggctcaagtgatcctcccacttcaacctccccagtagctgggacaacaggctcaagccaccatgcccagctaatttttaaaattattttgtagagacaaggtcttgctaggttgcctgaacttgtctcaaactcatgagctccagaaattctcccacctcagcctccaaaagtgctgggattataggcatgagccactgtgcccagcctcagatatttcattattctgggggtttctctgaaggtatttttcgatgagataaacatttgaatcagaagactaagtaaaacagatagtcctccctaatgtgggtgggcctcctccaatcatttgaagacatgagtagaataaaaaggctgacctttccccaggtaagagaattcctcctgcctgactggcttcaaattggaacatcagccttttcttgccttcagacacaaatggaaacatcagctgttggtctggagcctgctgaccttcagactggacctaaaccatcagctctcctaagtcataggcctttggattcagactggaattatacctttagctctcctgggtctccagcttgccaatttaccctgcagatcttgggacttgtaagccttcataattgtgtgagcaatttcttataactctctctttctctctctctacatatatatatatatatatattttatatgtacacattcatacacacacacgcttatatgtatacatatagtatgtatatgtgtatatatattatgtatatacatatatgtgcacacatctctactaaaaatagaaaaattagccaggtgtggtggcgtgtgcctgtagtcccagccactcgggaggcttaaatgggagaatcacttgaaccctggaggcagaggttgcagtgagccaagaccacgccactgcactccatccagcctgggtgacagagcaagactccatctcaaaaaaaaaaaggttagaaaaatgctgcttttagagagcctggccttgagagaggaaggaaagactagttgcagttactattctctggtgagctctgactggctttttacaaacagggcttctctttggttgaagtcagccactaagttcatctttaaacatgctatctcaaattccccgaagccacccaaaatgtggtatgaatgaggatagagttacacagaattcagactgctttgccctctcagaacttctagggaacttcccttggtgtttccttccctaacgagctcagccacttgtaaccagcttattgaaagggctgtgaatgtattatgttgattccttttctgttccaggttattatcttgggaataacccatgttttgttttgttttaccctcagtcgctcataactatttaaaacagtatctctttcaagtacagatgctcctctacttatggggctatgtctcaataaactcacgtaagtaaaaaatatcacaagttgaaaacacatttaataaccctgataagcccattgtaaagtaggcaaataagttggaccattgaaagttggggactatctgtattttagaagttttttcagcttaaaaattaccaagctctatcctacttggcccagctcagtccttcccccaggcttagaagcctgtggtaaagagtgtgtgtatactggggtgatgatagtggtttcttcttactcccttctttctgtcttctgctccctttgttcctattcagccatgctgctgtttctagcccatgtaggctctgggaaaggttaagcgggtagaaaccagagaaaaagggcaaagtcttatttctgtggctagtaatgtcgtaatgtggggccaggtctgagtgacatgtgccgaaaggctgactctttctcccagagcaccttttctctctttttggattcagggggtacatgtgcaggtttgttacatgagtatattgcacccaggtagtgagcatagtgcccagtaagtagtttttccacacataccccctccttcccttcccactctggtagtccccagtgtctattgttcccatcattatgtctatgtgtattcaatgtttagctcccacttagaagtaagaacatgcaatatttggtttcctattcctgcatcaattcactttaggataatggcctccagctgcatccatgttgctgcagaatacatgatttcattttttatggctgcgtagtattccatggtgtagatatacttcatttaaaaaatctaatccaccattgattggcacctaggttgattccatgtcctttgctcagagccccgttttggtgagttcttagaactctttccaaccggaaactgcccagtgcaccactctcagatggacgggacccagtctgtacctgatcaccccggctctaatggtatggtctccaaggctccttctgatcttcccaggaggccctttcaggctgacacaccttccagggtgtgcactctcgccatgttctcacccagatggctctcttggctgtgtaattaggcagctcaatccctttcctttagactgtttcaggggagaaccaggtaccccaaatcttatgctctccaaactccaggggacagacacatgtcaaaccctgagtcttttaaagtataccctcacttagcttgcagacccaaggcactccagcccctttcaagaagcttgcactttctgatattttctccatcactcttgcctcctgtggtagaggagctttgggctactccttaacaaatcattcatggatcggcagcaaatctgcaacatatggatatatttgccaatttttgtcctcagctttgggtctcagccaaaatggagatttaggaaagtctcatttagcatcctctagcctgcttttggctgttttgttttgtttttgtgtttgttttttagagacagggtcttactctgttgccagactggaatgcggtggtgtgaccatagctcactgcagcctcaaactcctgggctcatgcaatcctcctgcctcagccttctgagtagctaggcctgtagtctcagagggaactgtcttcaataaagttggcactgtccacatacactccttaaaaaaaaaaaaaaaa

SEQ ID NO: 4582 - DNA, 3782 bp, Homo Sapiens
  NM_018103
ataatccgcttctagcttgtttggaggcgtgggctcttgggagcgggacttctgctcaaatcctgtccaggggcttgaaaaggaggagaattgggggtggttgccgggaggaccagcacctccagttactggagggttgataggggccttctcctttccgtcaccctttactagggggtatcccttgcagataaatgagattttttgatttcttaaaaagccagctgcagtgaagaagaactgctgcaggtcgaggggaagagaggaagtgcacggctgtctataacgtgctgccgggtctcaggatggaggagtgaagtctcctgtcgccgtggttccagcctccggagctcgcccaagccgcgtccccagagagcgccctgagagaacagggtggccgcttggtccaggaatgtttacccttgcggaagttgcatcacttaatgacattcagccaacttaccgaatcctgaaaccatggtgggatgtgtttatggattacctagctgttgttatgttaatggtagccatctttgcaggaaccatgcaacttaccaaagatcaggtggtctgtttgccagtattgccatctcctgtaaattcaaaggcacatacaccaccaggaaatgccgaggtcaccaccaacatcccaaagatggaagcagccaccaaccaagaccaagatgggcggacaacaaacgacatttcctttgggacatctgctgtgacacctgacatacctctcagagccacatatcctcgcacagatttcgcacttccaaatcaggaggcaaagaaagagaagaaagatccaacaggtcgaaaaacaaacttggattttcagcaatatgtatttattaatcaaatgtgttaccatctggcccttccgtggtattctaagtactttccatacctagctcttatacatactattattctcatggtcagtagcaacttttggttcaaatatcccaaaacatgctcaaaagtagaacattttgtttcaatattaggaaagtgctttgaatccccttggacgacaaaagcgttgtctgagacagcatgcgaagactcagaggaaaacaagcagagaataacaggtgcccagactctaccaaagcatgtttctaccagcagtgatgaagggagccccagtgccagtacaccaatgatcaataaaactggctttaaattttcagctgagaagcctgtgattgaagttcccagcatgacaatcctggataaaaaggatggagagcaggccaaagccctgtttgagaaagtgaggaagttccgtgcccatgtggaagatagtgacttgatctataaactctatgtggtccaaacagttatcaaaacagccaagttcatttttattctctgctatacagcgaactttgtcaacgcaatcagctttgaacacgtctgcaagcccaaagttgagcatctgattggttatgaggtatttgagtgcacccacaatatggcttacatgttgaaaaagcttctcatcagttacatatccattatttgtgtttatggctttatctgcctctacactctcttctggttattcaggatacctttgaaggaatattctttcgaaaaagtcagagaagagagcagttttagtgacattccagatgtcaaaaacgattttgcgttccttcttcacatggtagaccagtatgaccagctatattccaagcgttttggtgtgttcttgtcagaagttagtgaaaataaacttagggaaattagtttgaaccatgagtggacatttgaaaaactcaggcagcacatttcacgcaacgcccaggacaagcaggagttgcatctgttcatgctgtcgggggtgcccgatgctgtctttgacctcacagacctggatgtgctaaagcttgaactaattccagaagctaaaattcctgctaagatttctcaaatgactaacctccaagagctccacctctgccactgccctgcaaaagttgaacagactgcttttagctttcttcgcgatcacttgagatgccttcacgtgaagttcactgatgtggctgaaattcctgcctgggtgtatttgctcaaaaaccttcgagagttgtacttaataggcaatttgaactctgaaaacaataagatgataggacttgaatctctccgagagttgcggcaccttaagattctccacgtgaagagcaatttgaccaaagttccctccaacattacagatgtggctccacatcttacaaagttagtcattcataatgacggcactaaactcttggtactgaacagccttaagaaaatgatgaatgtcgctgagctggaactccagaactgtgagctagagagaatcccacatgctattttcagcctctctaatttacaggaactggatttaaagtccaataacattcgcacaattgaggaaatcatcagtttccagcatttaaaacgactgacttgtttaaaattatggcataacaaaattgttactattcctccctctattacccatgtcaaaaacttggagtcactttatttctctaacaacaagctcgaatccttaccagtggcagtatttagtttacagaaactcagatgcttagatgtgagctacaacaacatttcaatgattccaatagaaataggattgcttcagaacctgcagcatttgcatatcactgggaacaaagtggacattctgccaaaacaattgtttaaatgcataaagttgaggactttgaatctgggacagaactgcatcacctcactcccagagaaagttggtcagctctcccagctcactcagctggagctgaaggggaactgcttggaccgcctgccagcccagctgggccagtgtcggatgctcaagaaaagcgggcttgttgtggaagatcacctttttgataccctgccactcgaagtcaaagaggcattgaatcaagacataaatattccctttgcaaatgggatttaaactaagataatatatgcacagtgatgtgcaggaacaacttcctagattgcaagtgctcacgtacaagttattacaagataatgcattttaggagtagatacatcttttaaaataaaacagagaggatgcatagaaggctgatagaagacataactgaatgttcaatgtttgtagggttttaagtcattcatttccaaatcatttttttttttcttttggggaaagggaaggaaaaattataatcactaatcttggttctttttaaattgtttgtaacttggatgctgccgctactgaatgtttacaaattgcttgcctgctaaagtaaatgattaaattgacattttcttactatatcaccttttttgaggggtcttaatttactttgcttaattggtgcaatattgctttaactccgttcactaaagacaaacacatcaagtccaaacttgtaaatttagatttgctgaaatactgatttatttcctgttttaatttaaagtgcctcaagtaagcacctctcacaacagttgactggtactgctgctcctgagcacctcgtgtcatagattttatactcttacagacttggaatgcagtagaggtatgtggatttttaggggttttgtttttttaagaataagtaacaagaaataacacatttcttaataatagcttttttgacatagtttggagttctgattatatggtacatttttctaccagtaatatagggttgccaataaatagaaaatgttttctaaaaataaattttattacaacaaaaaaaaaa

SEQ ID NO: 4583 - DNA, 5620 bp, Homo Sapiens
  NM_018109
gaaaacgcgctgacctttcagcttcgcgctagtgctgttttttttttttttttttttttagcaatggcggttcccggcgtggggctcttgacccgtttgaacctgtgtgcccggagaagaactcgagtccagcggcctatcgtcaggcttttgagttgcccaggaactgtggccaaagaccttaggagagacgagcagccttcagggagcgtggagacaggctttgaagacaagattcccaaaaggagattctctgagatgcaaaatgaaagacgagaacaggcacagcggactgttttaatacattgcccagagaaaatcagtgaaaacaagtttcttaaatatttatcccaatttggacctattaataatcatttcttctatgaaagctttggtctctatgctgtcgtagaattttgccaaaaggaaagcataggttcactgcagaatgggactcatactccaagcacggccatggagactgcaattccattcagatcacgtttcttcaatctgaagttgaaaaaccagacttctgaacggtcacgcgtacggtcaagtaatcagttgccacgttcaaacaagcagctttttgaattactttgttatgcagaaagtatagacgatcagctgaacactctcttgaaggagttccagctaacagaggagaacactaagctccgatatctcacctgttctcttattgaagacatggccgccgcgtattttccagactgcatagtcagaccctttggctcctcagtcaacacttttgggaagttaggatgtgatttggacatgtttttggatctagatgaaaccagaaacctcagcgctcacaagatctcaggaaattttctgatggaatttcaagtgaaaaatgttccttcagaaagaattgcaactcagaagatcctgtctgtgttaggagagtgccttgaccactttggccctggctgtgtgggtgtgcaaaaaatattaaatgcccggtgtccgctcgtgaggttctcacaccaggcctccggatttcagtgtgatttgactacgaacaataggattgccttgacaagttccgaactcctttatatatatggtgccctagactcaagagtgagagccttggtgttcagtgtacggtgctgggctcgagcacattcactaacaagtagtattcctggtgcatggattacaaatttctcccttacaatgatggtcatcttttttctccagagaagatcaccccctattcttccaacactagattccttaaaaaccctagcagatgcagaagataaatgtgtaatagaaggcaacaactgcacatttgttcgtgacttgagtagaattaaaccttcacagaacacagaaacattagaattactactgaaggaattttttgagtattttggcaattttgctttcgataaaaattccataaatattcgacagggaagggagcaaaacaaacctgattcttctcctctgtacattcagaatccatttgaaacttctctcaacataagcaaaaatgtaagtcaaagccagctgcaaaaatttgtagatttggcccgagaaagtgcctggattttacaacaggaagatacagatcgaccttccatatcaagtaatcggccctgggggctggtatccctattgctaccatctgctccaaacagaaagtcctttaccaagaagaaaagcaataagtttgcaattgaaacagtcaaaaacttgctagaatctttaaaaggtaacagaacagaaaatttcacaaaaaccagtgggaagagaacaattagtactcagacatgatggctgctacattgtgtaaagaactgggcttagcctatcaaatggtctgtggacttacttggaaaaactgatttgaaactttcacagatctcagctttcatctgatgtcacttttcatgatcttctcattggcccccttaacctggtctgaagttctgggatgttttcagtttgatcagtctgatactcagtggcactttattaaaacatcagctgtggagtgtggcggtgcacacctgtagtcccagctgctcaggaggctgaggcaggaggatctcttgagcccaggattttgaatccatcgtggacaacatagcaagattccatctctaaaaaaaatgaaaataaacataagccacaaggaatgggtgaaagattattgtaatgtgctttaactaaataggtaaatatactaaacaaatgctaaaactcagttttaggatgaaaccattgttgatatccacatcagtccctgtttagaaaacatttaaaatgacttttagttatgtacagtacgttggcaatgaatacattaagcttcaaaatttggtagtgctctcgaatatgtatatttgtatttttcaagcgaagttctcttattcacatataaattaaagtgggttggtactgatatcaaaaaatgtttatgtttttagaacagacatttcagtcactgcattcttaggtattccaaaccaaatatgatgacatcaatagattgcattttaaaaatattgtttgatttttctattttcaaaaataaaattctgtttctaactaaaatgtgatattcccagtattccttcacatctcttttgagaactcccctcttcctgcaggaaagagacatatttgtctctcagtatatgcagaaaattggttccaggaccatccacgtacacccagatctgcacacactgaactccttcagtcctgtggagcccgtgcatgggagaattccaccttgcacataagcagattttgcatcctgtgaaagtactgtattttctttctttcttttttttttttttttttttttgagacagagtctcgctctgtcgcccaggctagagtgcagtggcgcaatctcggctcactgcaagctctgcctcccaggttcacgccattctcctgcctcagcctctctgagtagctgggactataggtgcccgccaccacgcccggacaatttttttgtatttttagtagagacagggtttcaccatggtctcgatctcccgacctcgtgatcagcccacctcaacctcccaaagtgctgggattacaagcgtgagccaccatgcctggccgagaatactgtattttcaatccaagtttggttggaaaaaatctgtgtgtaaatggacttcgcagttgaaacccatgttgttcaatgggcaactgtatattgaaatttaatttccattacattctctgtggagcaacttttttgctttgtttcgttttgtttctgagacggagttttgctcttgttgcccaggctggggtgcaatggcacaatctcagctcactgcaacctccgcctcccggattcaagtgattctcctgcctcagctgggattacaggcgcccaccaccaagcccagctaatttttgtagttttagtagggacagggtttcaccatgttggccaggctgatctcgaactcctgacctcaggtgatcgcccaccttggccttccaaagtgttggaattacaggcgtgagccactgcacctggcttctgtggagtaactttctatttaagaagcaagtaaggcctgggcatagcggcacatgcctgtagtcccaggtacttgggaggccgaggcacaaggactgcttgaacctgggaggcagaggctgcagtgagctgagatcacagcactgtactccatcctgggcgacagtgagactctctcaaaggaaaagaagcaagtagtatagtgtttaaaaacagacttgagcgagactggctcaatgacaagttactcagtctcttggggcccctgtttgatctgtaaaatggggatcatgatcagatcaatgtgaggattaagcgagggatgtaggaaaatgctaggtcagtgcattttcctggcgcgaagtaaatgttacttctctttaactgttgcctttcggtgtttgtggtatgtaattaccttttttgctactcaaaattcagatttagagtttgtagtactttaaaaatttttcccatttaaattttatgtcagaaattataatgggttctgcatgggatattttaagaaactcagcattgttatgaagcaaatgaattctgtgtccttgtgtctgtgctattggattgcacatttgacaccaacaaatatcagtgttctgtacaggcgatgtctttaaaagccatttttcatttgttctttattttgttgggctagaaatccatattgatttaaaaagcttaaaaagcataaaccacttaagggtttctaaatgaaatttttttttctgttcacagatatttagtcagatattttcttttttaggttggtgctaggtgtaatatggttatttaagcacataaagtatgtgtatgggttagcattttcttttctttttggtaatttgtaggacagccttgacactaggctgttttacttttcagaatcagatttaattatgtgattaattttaaatctacaaagacttgttttttgtttttttttttgagagcaaatcttgctctgtcacccaggctagactgcagtggtgcgatctcggctcactgcaacctctgcctcctgggttcaagcgatactcctgccccagcctcccaagtaactgggattacaggcgcctgccaccatgcctagctaatttttgtatgttagtagagacggggtttcaccatgttggccaggctggtcttgaattcctgacctcaagtgatctacctgtctcagcctctcaaagtgctgggattacaggttacaggtgtgagccaccgcacctggcctacaaagacccttttttttttttttttttgagatgggtctccctctgtcacccaggctggagagtgcagtgatcttggctcactgaaacctccacttcccgggttcaggtgattcttctgcctcagcctcctgagtagctgggattacaggtgcatgccaccacacctggctaagttttctatttttagtagagatggggttttactctgttggccaggctggtctcgaactcctgacctcaggtgacctgcccacctcgccctcccaaaatgctgggattacaggcatgagccaccacgcctggctgcaaagaccttttaatacacagttttaaagtctgttcaactgaatatagactacagacaaatatattttctcataactttagtgtatcacaacccagatttttaaaatatttttattacgtgatagtgataactagcaattatttgtcattgctgtttcttaattaaaaataattgcaatgttaagtaaaacttttttcaagtttttttcttctataactattactaggctttcattcagtagctttcacctgtaatgagttttactaagtatgtgaaagtaattttgataggagactacccagatcaaaacgatttcagctatagcccactagtataattcctggagctattatccatctttagaaaatttgagaattagccagagactttctaggaaataacgattagcctgaaacgttataggaaaactgtgtgtaattatctcattcaccttcagttaccataaaggagaagggaaaataaagttgagttgaaataaga

SEQ ID NO: 4584 - DNA, 2750 bp, Homo Sapiens
  NM_018110
agccggagcccgatccctagccctgcggccgcgcctccctcgccgtccccgcctggagcccggcgccgccgccgccctgccgcccccgccagccgcgccgtgacgcgggcatgagcctgctccgcggcgccgctgagcaggcgctcctggcccgggcctcggcgcccagcaggcgcggggcgaaggagctgctagaacaatgctgaggcgggtgaggtgaggagcagcccctcgcggcagccccgacagagtgtctggaacaggtgattggaggagccggagacccaggcacctgggcatccttcccctcgcctctgccaggccccgcgcccctaaaaggtgggaaaaccatggcgaccaatttcagtgacatcgtcaagcaaggctacgtgaagatgaagagcaggaagctcgggatctaccggaggtgctggctggtgttccggaaatcctccagcaaggggccccagcggctggagaagtatccagatgagaagtcggtgtgcctccggggctgccccaaggtgactgagatcagcaacgtcaagtgtgttacgcggctccccaaggagaccaagcggcaggcggtggccatcatattcactgatgactcggcacgtaccttcacctgcgactcagagctagaggcagaggagtggtacaagacactatctgtggagtgtctggggtcccgcctcaacgacatcagtctgggagaacctgacctcctggccccaggggtgcagtgtgaacagacagatcgcttcaatgtcttcctgctgccctgccccaacctggacgtgtatggcgagtgcaagctgcagatcacccacgagaacatctacctctgggacatccacaacccccgtgtgaagctcgtctcgtggcccctctgctcactgcgccgctatggccgggatgccacacgctttaccttcgaggctggccggatgtgtgatgctggggaaggactctataccttccagacacaagagggggagcagatttaccagcgcgtccacagtgccaccctggccatcgcagagcagcacaagcgggtcctgctggaaatggagaagaacgtgaggctgctgaacaagggcacggaacattactcgtatccctgcacacccacgaccatgctgccgcgcagtgcctactggcaccacatcactggttcccagaacatcgccgaagcctccagctatgctggtgaggggtatggggcagcccaggccagctcggaaacagacctcctcaacagattcatcctgctaaagccaaagcccagccagggggacagcagtgaggccaagaccccatcccagtgaccacagtgctggcgagcaccgatgactgctgggggctgcctgctgcggggctggctgcagtgtaccgtggacagcctcagggggctgtcggccaagagcctggagaaagggagcaagctgccccctccttgcccccaaggatgaggctggactgaggcaaagggctggccacaccacctgagcatgtgtgaggggttggagctaccgtgggactatatactgttaatgattttaatatatatggcttatgacatactctgtatcaatgagatcccctcaccctcaccccatccttccccaccaatacacacaaattttttaatcccatgaccaggccacggtcaaggctgtttttgagtatgagtgcagtcgtgtccatcctccatggcacagccctcctgctgccaggacctgcttgaactaccagggccacaggagggggataatcagagcttgaggctggcactctgactgctggcttttcccagacagcccaagggccggaacagcaggtggcttctcagttcctctgggcctggagtgacacaggaaggatctgcacttcctctgtgctgcttgccagccttgcagttggagttttaagcagaggtgacatctggttgacgcctcaggtgaaaatctggttttaaaatgtaacttctgcacaggctccttcctgctttgtaggctgggaagatgcccctggggtaggggtgctgattacctcagccatgtggaggaaggctggagcttgttcctgccccaggaataggccaggagggaaggccgcagcaggactgccgtggggagcacccctgctgcccccctctcactgaccaggggtggacaatgcccaagcagagggagcccccttgccctgtttggccaccctctggccagccaaaagcactctgaaaccaagaccttcccatttcctcctccccacatggtgctgaggctccctgctgcaatgcaattaaagcaattgattttctagtgctggtatttgttgactaccatgcagaagggctatctttctattcacgtcaaacttttggttgtgtggggttttttgttgttttttgggttttgttttttaatactttagggtcctgatttgtgggaacagaccttcttgtaaataaccactatttgagttgtggcaggaggatgataaagcacgcggcccctcccaaaggagcccttgagctagggaggtggtgcagtcagcctcgctctcaacgtgacccggggaatgaccacccagagggatgagctagcctgtagaggggaactggggtccaaaggtctttggggagggaggcagagctggctggctcagctaagtggcacgatgacgcatgaaggagattatgttgtgctctttattgccaaaaataaacacttttaaaaagacaa

SEQ ID NO: 4585 - DNA, 3031 bp, Homo Sapiens
  NM_018115
gcgctatttccggtcatacccggaaacacgagtccaagctgcagctggcagggattgcggggtgccggccgtctgagtttttttaaaactgctcgccgcgaagtctgtctgcagccaaaatgtccaacagaaacaacaacaagcttcccagcaacctgccgcagttacagaatctaatcaagcgagacccgccggcctacatcgaggagtttctacagcagtataatcactacaaatccaatgtggagattttcaaattgcaaccaaataaacccagcaaagaactagcagagctggtgatgtttatggcacagattagtcactgctacccagagtacctaagtaattttcctcaagaggtgaaagatcttctctcctgcaatcataccgtattggatccagatctgcgaatgacattttgcaaagctttgatcttgctgagaaataagaatctcatcaatccatcaagcctgctagaactcttctttgaactttttcgttgccatgataaacttctgcgaaagactttatacacacatattgtgactgatatcaagaatataaatgcaaaacacaagaacaataaagtgaatgtagtattgcaaaatttcatgtacaccatgttaagagatagcaatgcaaccgcagccaagatgtctttagatgtaatgattgaactctacagaaggaacatctggaatgatgcaaaaactgtcaatgttatcacaactgcatgtttctctaaggtcaccaagatattagttgccgctttgacattctttcttgggaaagatgaagatgaaaaacaggacagtgactccgaatctgaggatgatggaccaacagcaagagacctgctagtacaatatgctacagggaagaaaagttccaaaaacaagaaaaagttggaaaaggcaatgaaagtgctcaagaaacaaaaaaagaagaaaaaaccagaggtgtttaacttttcagccattcacttgattcatgatccccaagattttgcggaaaaactactaaagcagcttgagtgctgtaaggagaggtttgaagtgaagatgatgctcatgaaccttatctccagattggtgggaattcatgagcttttcctcttcaatttctatccctttttgcaaaggtttctgcagccccaccaaagagaagtaaccaagatccttctgtttgctgcacaagcatctcatcacctagtacccccagagattattcaatcattgcttatgactgtggcaaacaattttgttaccgacaagaactctggagaagtcatgacagtaggaatcaatgctataaaggagataacagctcgatgtcctctggccatgactgaagaacttctccaagacctggctcagtataaaacacacaaggataagaatgtaatgatgtctgctagaactttgattcacctcttccgaacactgaatcctcagatgctgcagaagaaattccggggtaagcctacagaggcctccatagaagcaagagtacaagaatatggagaattagatgctaaagattacattccaggagcagaagttctggaagttgagaaagaagagaatgctgaaaatgatgaagatggatgggaaagtaccagtctcagtgaggaggaggatgctgatggtgaatggattgatgtgcaacactcttccgatgaagaacagcaagaaatctccaagaagctgaacagcatgcccatggaggagcggaaggccaaagctgcagccatcagcactagccgagttttaactcaggaagacttccagaaaatccgcatggcccaaatgagaaaagaacttgatgctgcccccgggaaatcccagaagaggaaatacattgaaatagacagtgatgaagagcccaggggtgaattactttctcttcgggacattgaacgccttcataaaaagccaaagtctgacaaagagacaagactagcaactgcaatggctggaaagacagaccgaaaagaatttgtgaggaagaaaaccaaaacaaatccattttccagttcgacaaataaagagaagaaaaaacagaagaactttatgatgatgcggtatagccagaatgtccggtcaaaaaataagcgttccttccgagaaaaacagttggcactacgagatgcacttttgaaaaagagaaaaagaatgaagtaacttcctggcaagttttccattcctagaagaatgctaagtttgtgtccttgctctgaaaattggtaaatcaagcatgtttgtttacattaaaaagtccagacacactgtattgtgaaaactgctgaacatgtggcagcaattttgtgtttttattttggagacggctaatggtaggaatgttaatgtaaatagtggtggtaatgtaaaatcatttcatttatcattcatgcaaaaaaaagtatgtattgagtgcctattcattgtcactgtagatgcaaaacgaatgagctgtaaccccttcactcaaggcattgacagcttagctgtgagggtggacacacatatgtgtatttacagtgcagtgtaaatagttctgtagtagaggttaactccatatttctgtgaggtcactgaggccttatggactaactctgtgaggataggagttatatattcttataagacaaaacaaaacaggacaatgttacaagagtaagaggttcttacttgtacataggctttcctgctgaaaacaggcccctgctgtacagattttgggtacataatttagctcttttagtcaatccaagagatttaagtgacccccccccccccgtgttttttttgtttttgtttttgttttgaatgccatgtaaaggctttttggttaagacctcacttttaaaactgccttaagtataaatagtacctttggaatatatttagttcatcatttgagctgccttcatactggtttcctcagccttccttcagcctgtaatattttcagcccactgtttaccttgtctcaataaaaggtttctaatgccaaataaaaaaaaaaaaaa

SEQ ID NO: 4586 - DNA, 2446 bp, Homo Sapiens
  NM_018116
ctgaggcgcggcggccccgtggagcagcgcagtatggcgggcggggcccgggaggtgctcacactgcagttgggacattttgccggtttcgtgggcgcgcactggtggaaccagcaggatgctgcgctgggccgagcgaccgattccaaggagcccccgggagagctgtgccccgacgtcctgtatcgtacgggccggacgctgcacggccaggagacctacacgccgcgactcatcctcatggatctgaagggtagtttgagctccctaaaagaggaaggtggactctacagggacaaacagttggatgctgcaatagcatggcaggggaagctcaccacacacaaagaggaactctatcccaagaacccttatctccaagactttctgagtgcagagggagtgctgagtagtgatggtgtctggagggtcaaatccattcccaatggcaaaggttcctcaccactccccaccgctacaactccaaaaccacttatccctacagaggccagcatcagggtctggtcagacttcctcagagtccatctccatccccggagcatctgtatgattcagaagtacaaccacgatggggaagcaggtcggctggaggcttttggccaaggggaaagtgtcctaaaggaacccaagtaccaggaagagctggaggacaggctgcatttctacgtggaggaatgtgactacttgcagggcttccagatcctgtgtgacctgcacgatggcttctctggggtaggcgcgaaggcggcagagctgctacaagatgaatattcagggcggggaataataacctggggcctgctacctggtccctaccatcgtggggaggcccagagaaacatctatcgtctattaaacacagcttttggtctcgtgcacctgactgctcacagctctcttgtctgccccttgtccttgggtgggagcctgggcctgcgacccgagccacctgtcagcttcccttacctgcattatgatgccactctgcccttccactgcagtgccatcctggctacagccctggacacagtcactgttccttatcgcctgtgttcctctccagtttccatggttcatctggctgacatgctgagcttctgtgggaaaaaggtggtgacagcaggagcaatcatccctttccccttggctccaggccagtcccttcctgattccctgatgcagtttggaggagccaccccatggaccccactgtctgcatgtggggagccttctggaacacgttgctttgcccagtcagtggtgctgaggggtatagacagagcatgccacacaagccagctcaccccagggacacctccaccctctgcccttcatgcatgtaccactggggaagaaatcttggctcagtatttacaacagcagcagcctggagtcatgagttcttcccatctgctgctgactccctgcagggtggctcctccttacccccacctcttctcaagctgcagtccaccgggtatggttctggatggttcccccaagggagcagcagtggagagcatcccagtgtttggggcactgtgttcctcttcgtccctgcaccagaccctggaagccttggccagagacctcaccaaactcgacttgcggcgctgggccagcttcatggatgctggagtggagcacgatgacgtagcagagctgctgcaggagctacaaagcctggcccagtgctaccagggtggtgacagcctcgtggactaaagttcccagtgtgggagaaaggagctagtttgcaataaaaacagctggatgcaggagcccagtgtcttcatgcagaggagctcaatgtcgcgggactagctacaccaacatatgcactttttacatttagaaacactgtgattagaccacagaacaataaatatgtgccatcagaccaaaaaaaagtagagaaaggagctgaactccactctcgatgctacttacagaggacatctgtaaagtcttcataaaagaccttgaatgatgcctaggatggcagagcccctgggtcctactccatcctccagcctttgtccttgtcctggcctcctgctctccagatctgtaaactgggctcaaggactgtacaagcagagtacaactacccgcctccccggtgccagggcgcctgttgggtttggtcctgtgtagatgattcccagagtctcattcatccagctcctcttcagacagaaggtccccatggtcagacagctggtctgcattgctggtactggttgcatcatcctcatcctcagagctggcttcacaggcagtgtggaagagctgcatgagttctcgaaaatggtgggaaacctaagaaaggaggagggctgtattcactgatccttagtaacatgttaacatttatgaagcactatatattgatttgcaaaatcttttgtttattccaaaaaaa

SEQ ID NO: 4587 - DNA, 4746 bp, Homo Sapiens
  NM_018117
agcacaaccgcctaagcggcggaactctggagagtgcggaacctaggatcctaggaaactgaaggcaacggaacctgggggcgatggaatccgggagcggtggaacccggagcctgtagaacttgaatctagaggaacctgacagcggcgccgagggggccacccggactctgtttggaacggaagcacagtgtccgccgcttcctggttgcgggtcagcgcccaggtcctgggctggccgccgggatgttgccctacacagtgaacttcaaggtgtcggcgcgcaccctcacgggggccctcaacgcccacaacaaggcggcggtggactggggctggcaaggtttaattgcttatggatgtcattcacttgtggtagtgattgattccattactgcccaaactcttcaagttttagaaaagcataaagctgatgttgtaaaggttaaatgggccagggaaaactatcaccataacattggctcaccatattgcttacggttagcttctgctgatgtcaatgggaagatcatcgtctgggatgtagcagcaggagtagctcagtgtgagatccaagagcatgccaagcctatccaggatgttcagtggttgtggaatcaagatgcttcccgcgatttactgcttgctatccacccgccaaattacattgtgctctggaatgccgacactggcaccaaactatggaagaagagctatgcagataacattctttctttttcttttgacccttttgatccctcacatttaactttgcttaccagcgagggtattgttttcatctcagacttctccccatccaagcctccctcaggccctgggaaaaaagtttacatatccagcccacactctagcccagctcataacaagctggccacagccacaggtgccaagaaagctctaaataaagtaaaaattttaatcactcaagagaaacctagtgctgaattcataactctcaatgattgccttcagttggcatacctgccttcaaaaaggaatcacatgttgttgctctatcctcgagagattttaatccttgaccttgaggtgaatcagacggtgggtgtgattgcaatagaacgcacaggagttccatttttacaggtaataccctgctttcagcgtgatggtttattttgtctacatgaaaatggttgtataactttacgtgttcgaagatcttataataacatttttaccacttcaaatgaggaaccagatccagatccagttcaggagcttacctatgatttacgaagccagtgtgatgcaatcagggtgacaaaaaccgtccgtcccttcagtatggtgtgctgtcctgtcaatgagaatgcagccgccctcgtagtgagtgatggcagggtcatgatatgggaactcaagtctgcagtttgtaatcgaaattcacggaacagtagttctggtgtgtcacctttatattcaccagtgtctttctgtggaattcctgtaggagtgctacagaataaactcccagacctttccttagataacatgattgggcaaagtgcaattgctggggaagaacatcccagaggttcaattctgcgggaagtgcacctcaagttcctgctgacgggactgctttcaggactgcccgcaccacagtttgctattcgtatgtgtccaccgttgaccacaaaaaacatcaagatgtatcagccactgctggctgttggtacaagtaatggttctgtcctggtgtaccatctcaccagtggtctgctacacaaagagttaagcatccactcatgtgaagtcaagggtattgaatggacaagtttgactagttttctttcttttgctacctcaacaccaaacaatatgggattagtgagaaatgaacttcaactggttgatcttccaacaggtaggagcattgcttttcgtggtgaaagaggcaatgatgaatctgccatcgaaatgattaaagtatctcatttgaagcagtatttggcagtcgtattcagagataaacccctggagctatgggatgttaggacttgtacccttcttagagagatgtccaaaaacttccctacaataactgctttggagtggtcaccatctcacaacttgaagagcctgagaaagaagcaacttgcaactcgagaggccatggcccgccagaccgtagtctcagacacagagctgagtattgttgaatcatctgtgatcagcttgctgcaggaggcagaaagtaaatctgaacttagtcagaacatctctgcccgggaacattttgtatttaccgatattgatggccaagtgtatcatctcactgttgaaggaaactcagtaaaagacagtgctcggattccaccagatggaagtatgggtagtattacctgcatcgcttggaaaggtgatacattagtgcttggagatatggatggaaatttaaatttctgggacttgaaaggcagagtatccagaggaatacccacacaccgaagttgggtgaggaagattcgttttgctcctggtaaaggaaatcaaaaattaatagcaatgtacaatgatggagctgaagtgtgggatactaaagaggttcagatggtgagcagtttaagaagtggcagaaatgtgacctttcgtatattggatgtggactggtgtacgtcagataaagtgatcttggcctcagatgatgggtgcatcagagtcctagagatgtctatgaagtctgcgtgctttagaatggatgaacaagagttaaccgagcctgtgtggtgcccctatctccttgttccaagggcctctcttgccttgaaagccttcttattacaccagccttggaatggacagtattctttggacatttctcatgttgactatccagaaaatgaagaaataaagaatctcctccaagaacagttgaattcattgtctaatgacataaagaaactgttgcttgatccagaattcactctcttgcagaggtgcctgcttgtttcaaggctctatggtgatgaatcggagctgcacttctggactgtcgctgcccactacctgcacagcttatcccaggaaaagtcagccagcacaacagctcctaaagaagctgctcctcgagacaaactgagcaacccactggatatatgctatgacgtgctctgtgaaaatgcctactttcagaaatttcagctagaaagggttaatctgcaggaagtgaaacggtcaacttatgatcatacaaggaaatgtacagaccagctactgctcttgggtcaaacagacagagctgtgcagttgctgttggaaacaagtgcagataaccagcattattactgtgattcactgaaagcctgtttagtcactactgtcacctcgtcaggcccctctcagagcaccattaagttggtggcaacgaatatgattgccaatggcaaattggcagagggcgttcagttgctctgcctgatagataaggctgcagacgcctgccgctacctgcagacatacggcgagtggaatcgggctgcatggctggcaaaagtccgtttgaatcctgaggagtgtgccgatgttttaaggcggtgggttgaccacctttgttctccacaagtcaatcagaaatcaaaggctctcctggttctcctctctctgggctgcttttttagcgtggcagagacgcttcacagcatgagatactttgatagagcagccttatttgtggaagcttgcctcaagtatggagcatttgaagtcactgaggacacagagaaactcatcactgctatatatgcagattatgcccggagtttgaagaacctcggttttaagcagggagcagttctctttgcttcaaaagccggagcagctggcaaagacttattgaatgagcttgagtcccccaaggaagaacccattgaagagtgacagcttaataaatgccagggaatctgacctggaaggcagatgggagggggctggtctggctgtggccaccgtcacagtccaggatgaagaggagtacagggtcctgtgagctgtttgaccactgttctaagactatgtgtgcccaaaagcacataagcatctatgttgagagtaagtttgtatcctgcgttggtctcagaaagaacgtgaatgcttaagattttgaaagtacataatattttatactttgggagagagctttaagagtccctggaaatactttttaatttttttaacttaaaattcaagagactgaatcacttttctcattgattaaatgtaaagattattgagaaacctatagtaaatgaaatttgtgagatgttttctcaaatatatgctgtgcctgtacttatatacagtctttcaagagagatacaaacaaggcagaaacatttaaactagtattaaaggtagtttaccaaagcattttttgttttcttaccttgaaaacacagaaccgttaattccttggtttaagcagttgctaagttttgtaattttaggctcagaggaccataggaggttttaagatttatgtttagtccgataggtgaggtctttgatattttgaattttaactccttttatgatacatcacagtaacctcatttttgaagtctttctttgtactttaatgttctctctgttctaatagttgaagtatgagatgtaactattataaactgttgctgaaaacataaatgtctgtaacttacaaacatgataaataaattaaaaattccatccaggaaaaaaaaaaaa

SEQ ID NO: 4588 - DNA, 3042 bp, Homo Sapiens
  NM_018120
ataagcgacagaggcgtcaggtcacctgggaagagtctgcagagcctttgcccgccagcgccttcgctctttggctccctgagttagtccggttgcttgcgatcgccgcggccggggctgcgaaccgaagggctcgctccgcgccgcctgggtctctacctcatccgtaggtgtggccctgatggtgtggcaggctctggactcctaaagctctggagcgaatttaagattttattcatgtgcatggcatagaagatgaattcttccacttccaccatgagtgaagagcctgacgctctatcggtagttaaccagttacgggatctagcagcagatccgttaaacagaagagccatcgtccaggatcagggatgtctgcctggccttattttatttatggaccatcccaaccctccagtcgtccactccgctttgcttgctcttcgatacttggcagaatgccgtgcaaacagagaaaagatgaaaggagaactgggtatgatgttgagcttacaaaatgttatacagaaaactacaactccaggagaaacaaaacttctggcctctgaaatctatgacattcttcagtcctccaatatggcagatggtgatagttttaatgagatgaattcacgtcgaaggaaagctcaattttttctgggaactacaaacaaacgtgccaaaacagtggttttgcatatagatggccttgatgatacgtctcggagaaatctatgtgaagaggctttgttaaaaattaaaggtgttattagctttacttttcaaatggctgttcaaaggtgtgtggtgcgaatccgttcagatttgaaagctgaggctttggcatcagcaatagcatcaaccaaggttatgaaagctcagcaagttgtgaaaagtgaaagtggagaagagatgttggtcccattccaagatactcctgtggaagttgaacagaacacagagctacctgactacctgcctgaggatgagagtcccacaaaggaacaggacaaagcggtgtcccgggtcggctcacacccagaaggtggagctagctggcttagcacagctgcaaactttttatccagatcattttattggtgacttcacttttgggctcaaggactgtgtgaaccaacaaggggccagttttccattgttgtggtgaactgtcaagtgcaatttgcaataagttatcatgaaaagtttttagattacacgatcgcatatgctgcatttcacgttttattggacattttaccccactgagtggtaaaaaggacagaggctacagatggagttgctttgtttatgaaagtattttggtttgttttctttcatttaattgcctcatatttaaaaaccatgggtccactgttaaaaccacatgtgtatgtgcagctttacattttattttacgtgaagcatgtgattaggaaaactcattttcttttcaagcctcaggacctacctgaagagaagttttcttgtagctcaagttgtgcatgaattactgaatattttactgtgcttttcttcatgaagggtacatgctttgtactcttcactgaaagctgaaaacatttcttgttaccctcttttgtgcctttttattttgccaaccgtgtttatagaaaggacattactaatgacattttgcagattaaaaacattcatttgaacacagtagtcccctagaaaaacaactctacaaaaattttgcagccttattcattataattttgataaaattaacacaaaatcagtcaagaaggaaacatgtatattagtgaagtgtttttggagactgtttgaatgtgaccaaatgtggttctagttgacttcttttcactttggcttatatcaattcttgagagttaatgtgatcatgatattgcaaacaactataaatggtctctaggccttactttgtgattatacgttatctccggctagaaaaaaataatggtagtaaagaaactgacaaactgaaaataagaaaacaaaaatcaaatgcctataataccataatgccagtttggtatagagtccaactttaaaacatgaattgctcgacagagttctattcagtaggtgtttctttgtattgtcttttgtgaatttattatgaaaatgctgcgttgtgttgaatgaaaaagacccaaattactgcttatgaagaaataaagccagcattgatcacttaatcctgtttctcatgtccagccagaaaaaagaacttcagtgaaggtaagataaataaatacatacacatatgtttttttggtagataagtgctaattacatatatgtaatgctttattaaatttctgaaatatttggtaactaaaattttctttttggaaattaataaatccagatacatattaatgttgatatgagtaaaaacaaataggaagaaattgaaatttcttttcatcaacatgtagagctgctattttactatttggagaatatgatgtgaaaattggacctcaaagggtttccttgtgttttcattgtaaaataccatcatcagtgagagtcttgagttcactaacattgtcaccttctggagagagagttaatggggggcattgaggatgatatttttttacatgtgtttggtttctgattcaagtgacacgcacaaactgaaaaaaaaaaaacaaaaaaagcaacaataactttcagggcacctattgctctaaatgcataatataacttgctgccagaaccagatgtgtttaaaaaagaaaataaaaccaccttctttctatagccattaaagcaaactttactgttctaacaaatttgtattttattttgcattgccacacatctgcttatttaaaaactacatccctttggtagtaatgtttcaggacaagtaggtattacagcttgatgtttgtgtgttctaattctaagagttctttattccagatcatatagagtagttaagacaactgtaacagcattttttgaaatacattgtaaaataataaaaggtaacataattaaaatcgagtggatattata

SEQ ID NO: 4589 - DNA, 7291 bp, Homo Sapiens
  NM_018121
caattgtgtgacacaggaagcccaagtgttggccatcctcaacgaaggcagctgccgggctccggtttgcttcagcaaaccctcacccctcgccttcaaccaggcgggtgtcgtcagctgtccgccagctgctgcccgcgcctttccgcccccgcgcgccggccaaggccgaggcggccgggaccagaggcgcgcgccctcagtgcatgtgacggggtgggagggggaggtttcttcctcccccgtccccaagccccgccttctccagagaggctgcggcttcctattgcgccaccaccgaaatgaccaccgtgccagccaatcaagacgtgattcatgaagtaagacccgccccttactggtccccaggttccttcccgctcacgccggagtcacttccgaagagagaaccgccatgaagagagaagggggtgccgcccacctctgctccgacagcctcccggagtcccagcagcaagacggcaaccacgcacccaacttctccagccacggctcatgccgccgtcgccagcggcgccgacatgacaaggcgctgcatgcccgctaggccaggtttcccctcatccccagccccggggtcgtcgcccccgcgctgccatctgagacccggtagtaccgcccatgctgcagcgggaaagagaacagagagtcctggggacaggaagcagtcaattatagatttcttcaaaccagcttcaaaacaagacagacacatgttggattcaccacaaaaatcaaacatcaaatatggaggaagtagattgtctatcactgggacagagcagtttgaaaggaaactatcctcaccaaaagaatctaaacccaaaagggtgccaccagaaaagagccctattatagaagctttcatgaaaggtgttaaagagcaccatgaagatcatggtatacatgagtcacgtcggccttgtctgtcactagcctccaaatatttagccaaaggaacaaatatctatgttccttcttcatatcacttgccaaaggagatgaagtcactaaagaaaaaacatcgatccccagagagaaggaagtcactattcattcatgaaaataatgagaagaatgatagagatcgaggcaaaaccaatgcagactccaaaaagcagaccacagtggcagaagctgacatcttcaataacagctccagaagccttagcagcaggagcagcctgtccaggcaccacccggaagaaagcccactgggagctaaattccagttgtcactagcttcttactgcagagaacgagaactaaagaggttgagaaaggagcaaatggagcagagaatcaactccgagaattctttctcagaagcaagcagtctttccttaaaatctagtatagaaagaaaatataaaccaaggcaggaacaaaggaaacagaatgacatcatacctggaaaaaataatctgtcaaatgtggaaaatggacatctctcaagaaaaagatcctcttctgattcatgggaacctacttcagcaggctctaagcagaataaattccctgaaaaaagaaaaaggaactctgtggactcagatctgaaaagcacaagagaatctatgataccaaaagcaagagagtccttccttgagaagcgtcctgatggaccacatcagaaagaaaaatttataaaacatattgcactgaagacacctggtgatgtgttgcgcttagaagatatatccaaggaaccgagtgatgaaactgatggctcttctgcaggcttggcaccttcaaattctggcaattctggccaccattctaccaggaatagtgaccaaatccaagtggcaggtaccaaggagactaagatgcagaaaccccacttacctttatctcaggaaaagtctgcaattaaaaaagctagcaaccttcagaaaaataaaaccgctagctccacgacaaaggagaaggagacaaaactacctttactttcccgtgttccaagtgctggttcctctctagtaccattaaatgctaaaaattgtgctcttccagtttctaaaaaagataaagagcgttcctcatctaaagaatgttctgggcattctacagaatccaccaaacacaaggaacacaaagcaaagactaataaggccgattctaatgtatcttcagggaaaatttctgggggacctttgcgctcagaatatggcactcctacaaagtctccccctgctgctttggaagttgtgccatgtatcccaagccctgcagcaccttcagataaagccccttcagaaggagagagttcaggaaattccaatgcaggtagcagtgcactgaaaagaaaactaaggggtgattttgatagtgatgaagaaagtttaggttacaacctagacagtgatgaggaagaggaaacattaaagtcactggaagaaataatggctttgaacttcaatcagactcctgcagctacaggaaagcctcctgctctttccaaggggcttagatctcagtcatcagactatacaggacatgttcatcctggaacttacacaaataccttagaacgtctagtgaaggaaatggaagacacacaaaggctagatgaactgcagaagcaactacaagaagacataaggcaaggccgaggcattaaatccccaatcagaattggagaagaagacagtacagatgatgaggatggcctcttagaagagcacaaggaatttctaaagaaattttcagttacaattgatgctattcctgatcatcatccaggtgaagaaatatttaatttcctcaattctggaaaaattttcaatcagtataccttggatttaagagactctggttttattggacaaagtgctgtagaaaaacttattcttaaatcgggaaaaacagatcagatttttttgacaacacaaggtttccttacgtctgcttatcactatgtccagtgtcctgtccctgtgttaaagtggctgtttcggatgatgtcagttcatacagactgtattgtgtcagtgcagattttaagtacattgatggaaataacaattagaaatgataccttcagtgactcaccagtttggccatggatcccatcattgtctgatgtagcagctgtgtttttcaatatggggattgattttagatctttgtttcccctggagaatcttcagccagactttaatgaagactatctagtttctgaaacacagacaacatcaagggggaaagaaagtgaagattcatcttataagccaattttttcaacacttcctgaaaccaacattttaaatgtggttaagtttctaggcttgtgtacatctatacatccagaaggttaccaggatcgtgaaataatgttgctgattttaatgttatttaaaatgagtttggaaaaacagctgaaacagattcctttagtagactttcaaagcctcctgataaacctgatgaaaaacatcagagattggaacacaaaggtgcctgaactctgtctgggcataaatgaactctccagtcatccccacaacctcctgtggttggtacagctggtccctaattggacatcacgtggaaggcaactgagacagtgcctcagtctagtgattatttcaaagcttttggatgagaaacacgaagatgttcctaatgccagtaatctgcaggtatcagtcctacatcgctatcttgtgcagatgaagccttctgatttgttaaagaaaatggtcttgaagaaaaaggctgaacaaccagatggcattattgatgacagtcttcatttagaacttgaaaagcaggcatattacctgacctacattcttcttcatttagtcggtgaagttagttgttctcattctttttcttctggacaacggaaacactttgtgctactctgtggggctttggaaaagcatgttaaatgtgatattagggaagatgcaagacttttttacagaactaaggtgaaagacttggtcgccaggatacatggaaaatggcaggaaataatccagaactgtcggcctactcaggggcagcttcatgacttctgggtaccagattcttaataggagttgcagcagcaaaaatatgaaccaagagaaattcaataagagcctttcatagaggagtagaaaggattattacagaatccaatgaatgccaagaaaatgtacagcaaatgtgccacttgaatatctagtatgaagctggtaatgaagaaattgccatttctgaagcagatatgaaatatgatctgcttaattgttaaggcaactgacctttcaaaagtgcagagtcttattaaaagaggggaggggtagaagcagaataatagtcatatgtctaacctgccccagttaactcctcttgttaaattataagccagttatcttttttagatagtatttttgtcacttggataatcacaggaaatatataagaaaagagcttggactaacttgagaagttggacatggaaagcaagaccaagttccagttgggtttaattttccctcttggttattttcggacacaaagggaatgcttaaaactgagtttagtaataaaaagcataaatctcttctgtaacttttataaaccacagggaggtttcaatccatgcattttccttcattactcaagattataaatctgtttttaaaatacatctaaacaaacagttgagaaacaaaagtttggcatgttgtcagatccccttaagaggaagaggttaagctgtaaagtagtggccctgttttgatgccagaacattcatatgctgtttgttctggatttcttttaaatgcatgtattttaaatactggttaaatcttagaatcttggctatatcttagaattctggctcttggtaaccatattacagaagtctatattgtaaaagcctaaagatctggacaagtttccaacaaccttgtttccatgagtatataattttggcagacacctgaattctttgggacactgtgtctgtgtatgtgtgtgtgtgtgtgtgtgtgtgtgtgcgcttgtatcttgaagttgttgcacttcaaaaccacagctgctgtaaattcttaaacactggagagccatcctttggtttaaatggtagagggttagtggaagtgcacacgttgtttttagcccaggggtagtaacaaactcttactagccaactagaaaattattttgttgacgagatgtcccttttaggagggtttgtttcctgaaagaatgccaactttttttgttgttctttcagtattggcttgagtgacctgttctcctgagtgctctagtgtctccagttgtgggggggaaagatgatggaggggaacagaaactggacttgatgtttgcggtttgagaggcaagaaaataaaataactttctacctctaaattgaggcttaggagtaaaaagcattttgtcctaaatttatcatttaaaatagcatcagtaacttttgagctcatgtcaatcaagcattggcagtcagagattttatagggaagactaagtaaatccagtttccaagaacctaaactgattgaggctccaagagtcagaccaacaaaagttttattctgtgttgtttactggtaagaatattattatcttgatactacctctcaagggtattgttacaaaatgccacttatggttaaagagatagatacaaagagttctatttgacagaagcttgaaactctggcatctatctgcccaacgatgggggctttcgttctgtaatttaatcctttgtagatacattatttgtgtgtaattttatacgtgttcatatttttctcattttgcattgtgtaaagtgtacaaaatctcaaagtataaaatactgcttatattgcttgtaatttacagtgtgtaaatattttctaattgtgtacattgatgggggggacaagtgggttattcaggtttttttttaatgacccttttgtattgcagtttcaacagataactgtccatcaaatttaaaaccactttgatacatttttatttaacagttccaataagaaaaaaatctctatttttaattatatttctcctttagaaaaaaaatacttcatggtccctctaaaataaatggccagacctcagtttaggcccttgtatttatgactctggtagaggtcttcagactccaggtcatagtccagtcagtatttgcatttgggttctcatgaaaactttgtgactctcttttagcacaagtagcccatggtttttcttccaaatcaagtattttacttctcccttgagtccccatgctttgtctccctcctgctgctattgcccggtgaatgggatggtagagagggagaaatgttcattgcacagagaatgtcaggccactttggggacttggcaaacgaagcttgcactgagtggtggtgtgtttggcaatattactgtgccaaaaatcaccttgtctaattttatggatatgtatggcaaacttattacccttcttgcaagctgcacattaaggtacttgtaagtgtttatgcttttgtgtgtaactgtttgccttttctaactgcttttcttgttactgaaaatataattctactagttttatcacattaagaggctctccatgcacaaaatgcattgatgtagccgtaaagtaacagcatttgtacattttctatctcctgatggcagtggtgcctttgtcaccttttggaaggtttgcattttgtttctgctttcaagcgcaaatagtagcttgctttcagcttcacaaaaatctcctcaaatgtaaaagatacaaaatggcgtgttatcatccaggcttagttggagtatttgcatttttatttttatcaaaacaaatataattggtggggactggccagtaataatgtgtggcgtctttaagccaagagtaatttttaaattaaaaatgaaaattttaagaggtagcccattaaacaagctactgagttggagaattaggggatgactgtggtggtttgtcgctaaggaggcaacagtagggtccaggcggcggggcacgtagagcagttagcatgatccatggttattccttactcatgaacagtgtcggcgcacctcattatctgtgcatttgtttttcctgggcagtcctgtcagccagttaatccaccagctcttaggaagtaaatacagatttttttctttccttttttttttttttaaagattttatactacatcttgttaaagtcctatgaatgtgtgtgtgtgtgtgctattaaaactgctttttctcagtttgaaaaaaa

SEQ ID NO: 4590 - DNA, 3348 bp, Homo Sapiens
  NM_018122
tagcgggcggagttgaagggcgcttggaccccagcggcgatctgtgtttgggttcgcgctctgggagaattttggctttgctcgccttcctctttcagaagactcgaaatcggccagcaggtctgcgagatttgaaacgcgactgttactccttgttttccggttctggccgcgggagcctctcgagaagcgtggaaagaggagaagggcgtataccttgtgaccgcctctggttgtcttgggctcgcgcctggcgccgctacgtggagtcgctctctcgtcgtcacttttggctgccgacttgttgagtagaagtgcagactgatgctttaagactcagggagaggtctttcccttatctccaccccagcaagcaccccagagaccttggagatttgtcttgtttctagacacgtgtactccaatgttgtgcggaggaggccttaaatattcgagaagagagtgggaactcctggaattttaagggatttctgtgtatttccaaaactgacttttaactaccggcagcgtgggatttcgtgattgtttttcgccatcgtgtggctccaacatgtacttcccttcttggttaagtcagctgtacaggggtttatccagacccatcagaaggaccacccaaccgatctggggttctctctacagaagtctgttgcagagttcacagaggagaattccagaattcagtagctttgttgtccggaccaacacatgtggagagttgcgttcgtctcacttaggccaagaagtcaccttgtgtggatggattcagtaccgaaggcaaaacacattcttggtcctaagagatttcgatgggcttgttcaagttatcattccccaggatgagtcggcagcctctgtgaagaagattttatgtgaagcccctgtggaatctgtggtgcaagtgtctggtacagtcatttcccgtcctgcaggacaagagaatccaaaaatgccaacaggtgagattgaaatcaaagttaaaacagctgagcttctgaatgcctgcaagaagctgccctttgaaattaagaacttcgtgaagaaaacagaggctcttcggttgcagtatcgctacttagacttgcgtagtttccaaatgcagtataacctgcgactgaggtcccagatggtcatgaaaatgcgggaatatctctgtaatctgcatgggtttgtggatatagaaacccccacattgtttaagaggaccccagggggtgccaaagagtttttagtaccatccagggaacctggaaagttttattctctccctcagagtcctcaacagtttaagcaacttctgatggttggcggtttagacagatattttcaggttgcccgatgttatcgagatgaaggttcaagaccagacagacagcctgagtttactcagattgacatagagatgtcatttgtagaccagactgggatccagagtttaattgagggtttgctccagtattcctggcccaatgacaaagatcctgtggttgttccttttcctactatgacttttgctgaggtgctggccacctatggaactgataaacctgacactcgctttggaatgaagattatagatatcagtgatgtgtttagaaacacagagattggatttcttcaagatgcacttagtaagccccatggaactgtgaaagccatatgtatccctgaaggagcaaaatacttaaaaaggaaagacattgaatccattagaaactttgcagctgaccattttaatcaggaaatcttacctgtattccttaacgccaatagaaactggaattctccagttgctaatttcataatggagtcacaaagactggaattaatcagactaatggagacccaagaggaagatgtggtcctactaactgctggagagcacaataaagcatgctctttgttaggaaaattacgactggaatgtgctgaccttctagaaacaagaggagtggtgctccgtgaccccactctgttctctttcctttgggtggtagatttcccactcttcctgcccaaggaggaaaatcccagagagctggaatcggcccaccacccatttactgctccccaccccagtgacatacatctcctgtacactgagcccaaaaaggcccgtagccaacactatgacttggttttaaatggcaatgaaataggaggtggttcaattcgaattcacaatgcagagctgcagcgttatatcctggcaaccttactaaaggaggatgtgaaaatgctctcccatctgctccaggctttagattatggggcaccccctcatggaggaattgccttagggttagacagactgatatgccttgtcactggatctccaagcatcagagatgtcatagccttcccaaagtccttccggggacatgacctcatgagcaataccccagattctgtccctcctgaggaactgaagccctatcatatccgagtctccaagccaacagactccaaagcagaaagagctcattgaatcatgcataccatgcagaaagttgagcttttaggttttgtcctctttgcttccccaaggctaaagtcagatctagagttctgccacaggtctaacaatcaagtctttagatggaaggaatccaggcaacattcttcaccacaacgaagaaacagataaaagatacccaattttgacttgatttcatgcatcatttggattttttttggttaggactttttttgaagttcctttttacttaggtgtgaaagatggttctttgttgaaataatatagtggtttagtgttttcaaatcatgtttctcatacccagatagtagattattcacttaggacagaggtaatcaaattatgtgtgaaatgtaggaaaatgcttgcccctgtaaactagtgagttgatggagcatttgcttcatcatcctcatcaagagaatcatataaattaagctttataatgacatttcaaccatcaacataatatagtgaggagtagcataatattttttaataatgcagaaaacatcactgaaatgagagtcacaaatttttcttcagtgtttcagcctgagtaagttacataaacctcgcttagcctcccttcctgctaatgtgtaaaatacatacttgccctggctacctcaccgggctgttattgctggaatcagaggagataacatatatggaagataaagtgaataaaagtactttgaaaaactataaagcattccacaaatatgagatgatggtattatccatccataaataggtagatatatctctattttatagtttcagattaaacaaaactgatatcaatagtaaaagtcattttacttatc

SEQ ID NO: 4591 - DNA, 4952 bp, Homo Sapiens
  NM_018124
aagtggcagttggcgtaggtgcattcggagtgcggccgaggtaactaccgagtcttcggcgggctcgcgagcccggccgcggcctgctggtttcagtgatggctcatgaagcaatggaatatgatgttcaggtgcagttaaatcatgccgaacaacagccagctcctgctggcatggccagcagccaagggggaccagccctcctccagcctgttcctgctgatgtggtcagcagccagggggtaccatccatcctccagccagctcctgctgaggtgatcagcagccaagcgacaccacccctgctccagcctgctccgcaactgtctgttgacctgacagaagtggaggtcttgggagaagacactgtggagaacatcaatccaagaacttcagaacaacataggcagggatctgatggtaatcacaccatcccagcatcttcgttgcattcaatgaccaacttcatcagcggactgcagagacttcatggcatgctggaattcctgagaccttcatcttcaaaccacagtgtagggccaatgagaacaagaaggagggtatctgcttcacggagggcaagagccggagggtctcagaggacagacagtgccaggttgagagcaccattggatgcttactttcaggtgagcaggacccagcctgacttgccagctaccacttatgattcagagactaggaatcctgtatctgaagagttgcaggtgtctagtagttctgattctgacagtgacagctctgcagagtatggaggggttgttgaccaggcagaggaatctggagctgtcattttagaagagcaactagcaggtgtctcagcagagcaagaagttacatgtatcgatggaggcaagaccctccccaaacagccatctccccagaagtctgagcctctgctaccttctgcttctatggatgaggaagaaggggacacttgtacaatatgtctggaacagtggaccaatgctggggaccaccggctctcagcattacgctgtgggcatctctttgggtataggtgcatttccacgtggcttaaaggacaagtacgaaaatgtccccagtgcaacaagaaagccaggcacagtgacattgtcgtcctttatgcccgaaccctgagagctttggacactagtgaacaggagcgcatgaaaagttccctactgaaggaacagatgctaaggaaacaggccgagttagaatcagcacagtgccgactccaactgcaggtcctcactgataagtgcactaggcttcaaaggcgtgttcaggacttgcaaaaacttacgtcacatcaaagtcagaatttacagcaacccaggggctcccaagcatgggtcctgagctgctcaccctccagccagggccagcacaagcacaagtaccacttccaaaagaccttcacagtatctcaggcaggaaactgccggatcatggcatactgtgatgctctgagctgcctggtgatatcacagccttctcctcaggcctcttttcttccaggctttggtgttaagatgttgagtactgccaacatgaagagcagtcagtacattccgatgcatggcaaacagatccgtggactggcgtttagcagttacctcagaggcttgctactctctgcttccctagacaacactattaaactgaccagcctggagacaaataccgtggtccagacttataatgctggacgtcctgtctggagctgttgctggtgtcttgatgaggctaactacatctatgctggactggccaatggttcaattctggtatatgacgtgcgaaacacgagcagtcatgtgcaggagttagtagctcagaaagccagatgcccactggtctccctgtcatacatgcccagagctgcctcagctgcatttccatatggtggggtgctggctggaaccttggaggatgcttcattctgggaacagaaaatggacttttctcattggcctcatgtgctgcccttggagccagggggctgcatagactttcagacagagaacagctcccggcactgtcttgtgacctacaggcctgataaaaatcacaccaccatacgaagtgtgctgatggaaatgtcctaccgactggatgacactggaaatccaatctgctcctgccagcctgtacatacattttttggaggacctacttgcaaactattgaccaaaaatgccattttccaaagcccagagaatgatggcaacatcctggtgtgtactggggatgaagcagcaaattctgccctgctgtgggatgctgccagtggctcgttgctccaggacctacagaccgatcagcctgtgttggacatctgcccatttgaggtgaaccgtaacagctacttggctaccttaacagagaagatggtccacatctataagtgggagtgactgtggtctcgaaaccttgaaggcatgctgctggttagatgttgtttgctagcgcctagcagccccaagcaagatccctgtttattgtctgcagtctagaacattgggaatcatggtttgtttgcattagtatgattctaggaccctaggtcactgagacactacagattgtgtatctgttatgtccactaaaagagtaattgatgggtactttatctacattatccatttcttgggtttaaagccttcattaaccattattgtatgttggaaattcttattttctttattttctgtgtgactttctggaccttagagagtgtcctctcatcatctaggatgtgagtgggcatcaagcattttctggggaatatgacatcccatctgagttgtcctgtcacttaagtatccttgaagggactaaccatcgtcttggtactgatttgatgcaacgtagatgtaaaagagtattattcagttgaacacaagagggcactgtagaaccttgtgtccggtttatttctgaccttgaaggctgacaatcttttagtaacttgtctcatctccacacaagtgtgtgatagcacacctgggtgtgctttgtggcaataacacttgtgttccaggtgtgaagtgctgggacattggcaggcccagtgatggaagcagctagtgaacgattccctttgctaatgcctagtgcattaagttcattgctttgcgaaaggtaaggaaagaggccagttgtttgagcggtggggaagattttgttttttctagccagcttaggatctcaggattggttttatccaagctagtgctttgaagaacactatctcttgccaggaaaagatgagtgataggtcaaagcttttacttgagtctcccctagtgtcagagatcaggagaaaagacataagagaatttacaaaagctattcagactgctattgaaaacatgagaagaacttgtctcccattttgagagttcctatctaaataaagccaattcctcagactgaggggctgttcttaagtgttctttatacattccagttatccagttaaagccttccccatgtgaagctgatgtttgattccagtttcctttgatttgcctccctaaccttttctagggctcagtttgtatttctttgccttgcctcagactactttgccaacccacttccacaacagaatatgcttcaagatgtgggcaggtcagtgtcctgttcatgggagaaaatggcttaacagtctgattttctcaaatgattattgaagagttgttatcgtttttattataaaacacttctgacctgtcaattcaagagctgtttctaggatctttctctccggcaaggggttgttgcactagatttccccagagttccaagttctagttgtgccttttaatgaccctttaatattttaggacataattttttccttttttaaatttttttgtagaaatagatgtttcactacgttgtccaggctggtcttggactcctggcctcaagcaatcctcccacctcagcctcctaaagtgccaaaattataggcgtgagccactgcacccggcccctatttgaagacgtcttttgtaaaagctagcttctagaacctgagaaaagctcttttctcagaggagatactccttttgatatgttaatgattaagagtggttgcccaggcctagtttcagtggcagaataggattggaattaaaaagcagaactcatctggcttcagcagattgccaccaagaggatacaggtggtcaggtcctggctggctttgtctttgggcctgggcaggcttaggatttgactttctttgaagtacctgatgctgattgattccactaatagtaggaagcaagagacttaactatgagggacgttatgtgaatcttaagtcttaccagtccttgcattagtacattaaatttggatgttttggaagcaaattcatacgatcgtgagtgatttctccaaagaaaaaaagccttgtccagcctgaccaacatggtgaaaccccatctctactaaaaatacaaaaattaactgggtgcagtggtgcgcatgcctgtagtcccagctacttgggaggctgaggcaggagaattgcttgaaccctgggaggcagaggttgcagtgagtcgagatcgcgccactgcactccagcctcggtgacagagcaagactccatctcaaaaaaaacaaacaaacaaaaaaaaaccctgatgccattcccagtccccgttgtaggacatcacatttataaatccaggctttagtcttctgggctccaccagtctctgccccaccatattcctttgtcactacctctaagtttttttccccacttgaggatttggagttaaacgaactcaaaatgtcttgtcattgtatgtattcttgcccctgctttgaaaacagggccatgggaactctgtttatgccctgttttaatgtttctgttttatgttttactgttaatatgaaaataaagaatttgctatgta

SEQ ID NO: 4592 - DNA, 7717 bp, Homo Sapiens
  NM_018126
acggaaatgaaaggagcacttccgggttcggcaataacctggagccggcggcgtaggttggctctttagggcttcaccccgaagctccaccttcgctcccgtctttctggaaacaccgctttgatctcggcggtgcgggacaggtacctcccggctgctgcgggtgccctggatccagtcggctgcaccaggcgagcgagacccttccctggtggaggctcagagttccggcagggtgcatccggcctgtgtgtggcgcgaggcagggaagccggtacccgggtcctggccccagcgctgacgttttctctcccctttcttctctcttcgcggttgcggcgtcgcagacgctagtgtgagcccccatggcagatacgaccccgaacggcccccaaggggcgggcgctgtgcaattcatgatgaccaataaactggacacggcaatgtggctttctcgcttgttcacagtttactgctctgctctgtttgttctgcctcttcttgggttgcatgaagcagcaagcttttaccaacgtgctttgctggcaaatgctcttaccagtgctctgaggctgcatcaaagattaccacacttccagttaagcagagcattcctggcccaggctttgttagaggacagctgccactacctgttgtattcactcatctttgtaaattcctatccagttacaatgagtatcttcccagtcttgttattctctttgcttcatgctgccacatatacgaaaaaggtccttgacgcaaggggctcaaatagtttacctctgctgagatctgtcttggacaaattaagtgctaatcaacaaaatattctgaaattcattgcttgcaatgaaatattcctgatgcctgcgacagtttttatgctttttagtggtcaaggaagtttgctccaaccttttatatactatagatttcttacccttcgatattcgtctcgaagaaacccatattgtcggaccttatttaatgaactgaggattgttgttgaacacataataatgaaacctgcttgcccactgtttgtgagaagactttgtctccagagcattgcctttataagcagattggcaccaacagttccatagtttaacatctagttaagctacaaatatagtataagcattattagcagctggtacttctgctaggggttgtaaattccaggtgttacactgacctcaatccaatttacataatttacataaatgcatctcggtggaaaaataatcattttcttggcatgttaaatcaagcttaaaaagttttgagaaaattttactgcgctgtgttgctaatggttaaagaagtctgtatctagtgataaatataccagtttttttaaaaagatgctgttgtgcctatatcatgaagtacattaatttctcatgtaaaaaaaatagctctaaaatttgtttcaacctaattggtaacctgagtttatatctggcatgaattcattatggtgatacacatatgtgaattcagtacattttgagacagtattctaccattcagtaattttggttaatgattttaacacttctcagtgtatttaatttcaaattgtttttttaattggttttatgctgctttgttaggacagatgtgttttgaatgtaccattataagaagaattctatgtatcttaaactatgatcttctaaaattttatttccgtaagtacttctgtggccttgagtattttttaaaaggctcaactgtaagcctcttagccagttggataaatatttggggtcacctagccattgaaagcagaaagcagtagtgacacagctttcccttcaaagagccattgagaaacatttctcaaacaggaaatccttcttttactaatgtggacatatagattattcgtattatagtttgtagaactacctagttcagaatcttgactgccagttttcttggtttcttaggcttgaattttcatagacaattgcaacagtttagatgccttttgaaaggaatgtaatgaagattcagcatctgactatatgtgtgtctatcctgaaataataatggagagtatactgtagattacatgtttacccatcaaatctgacttaaaaggttaaatggaaggttttataggtaaggtaattgattgggaatggggtagggggaggagttgtgggggaataatgtgcatttcagtctcaacgcatagataaatttaggggaattggatgtattattcaactttgatttgggttgtaaaatgtgttaaatcctgttcattgaactcccatcaactcttataaaattcatgctgatcttcattaccgttgcatgattggaaatgtttaaaacattgtacagttttagtatagagaaatgtaatggtttttgtgaccagtttctgtctgcatgtaatttggatttctcaaatacattcattagtaatttatcagtaacattagttttatttttgttcatctccttatctataaaaaggggatattcttaggataaatacatgaaaaattatacttgatagcttaactataatcagctatttttgtatttttgtaatatttgtccactaagctggagaagcagcctcatacagttgattttgtgtatgtggctagtcttattgtcactatgtaagtaatccaatggttttagaaactaaactttctagagcaataaaatgactataatgttaagtaaacataatgttgatttctaattatgttttaaaaaatgaagtcttgaattatatcaagaaattttggcagctgaagtcatgtttattttgaagctgttagttttttcctataatttaaaaagatcttttagatttatagaagagtcagaaatgtacaagagagtttttttgttgttgtttttgttttttgagacagagtctgtctctgtcgccaaggctggagtgcagtggcgcaatcctggctcactgtagcctctgcctcctgggttcaagtgcttctcctgcctcagcctcccgagtagctgggactacaggtgcacgccaccacgcctgtagtcccagctgtattgtaaaaatacaaaattttagtatttttagtagagacagggtttcaccatgttggccaggatggtctcgatctcctgacctcgtgatctgcctgcctcggcctcccaaagtgccgggattacaggtgtgagccaccgcgccctgccaagaagagttcttttgcataccctttactcaggtcctctcatgttaacgttttacataactgtagaacatttatctaaagtaagatattagcccagaacaatactactaactgaagtataaaacttatttgaatttcaacagtttttttttcatttcttattttccttttgtgtgctctgtttataccatgatccatgatttttttaaaatcatgattgtcttttaaagatctgtgtgtctctgttttgagtttttcctgtttattttgaaaagtactgttggtcaagataattggtcaataatccatgttggttttaacaaaaagcattttaacattaaaaatattacagtataaaataacactctgtgctttaaattgaggttttatgtcattttagcagaattataatatttctgatatactcatgtttgacaagttgaaacagatttgtttcttaaaggaaggtttaatatacaaaaaaaggtaatcttaaacttacgaaaaagtaaattttacaatttgagcattactagatgtttagtttgcatgaactcatagttagaaattctgcaataggaatatctacaaccggctgatttggaatttgaaattatagtgttacatgtatacctatcaaattaaaattaaggaaatacaatagcaatatatagaatgaatgtagtaacagaaattaactctttactgcatcattgaacttattgttagttacaggtttaaaagaagttcatttaacatccagtgtgtctaattcttctggaagtggtgtagtaccattgttcttctggcatttttaaatattaaacctttttggatagatggaagccttatacaaaatctactttattttagcaaggattctctgtccttttgtatagttggtaccttactaatttaaactctaatatcaatctaaagagaaatttattatgcaatttgtatttaggtttttttttttttttttggaatgaagttcagaggtagatcctcctggaagaaagaaagcaagcgaactttttaaagaaaattagacttgaatatttaagaatgtcccttacagagaaaaggccaactataatactaagctaaaagttatgaaaaattaataggttcttttatagagctaagaatgatgaaaccatcaatacttccttcttcctaaaaatccagatcaaaacttcaggttaggtttctaagtttaggacatgaatattatttttttctggaaaagaagatgagtatatgtgtaataagacaagtagaactgagagatttagttttttttttttttaagttttagttcagaataacattaattttgagagattgaggtaaagaaccttaactaatgctaaggagtttattttgattaacataggttattctgaccaccacctcttccttccttaatctccttagaatctgacagtctcaaagctgtcacacaaattagactaattttgacactttgaaatgaaaacttcaaggaagaagtagccacggacagttatgtttataatcagtaggtggcactctttcctcaggtagccccccattttcacatgatgtgtttgaaggttaaatgccaccaaaagtgctgagtcagctataaaactaagtccctgaattccatggcccttttaaatatgtaatcattcaagattgaaaaaaaaaattaagcattttttgtttgtttgcttgtttgtttttgagacggagtttcactcttgttggccaggctggagtgcaatggcgccatctcagctcactgcaacctctgcctcccggattcaagcaattctccttcagccctccaagtagctggggttacaggtgcccgccaccatgcccagctagtttttgtatttttagtagagatgaggtttcaccatgttggccaggctggtcttgaactcctgacctcgtgatccccccacctcggccttccaaagtgctggattacaggcgtgagccactgtgcctggcttgcatttttaaaatactgaattattcaaaagaagtaccctgtcaatatgtgctttctaggaaaacagtaaaataggccacaatttggagtgacaccattcagatcaaggtctatccagttttttcttttcatgctaagtgcctacatcaccgaaacacactaatataaaattatcctttctccttcattttcagatgtgtaaaaaatggtacttaaagtgttttcatgatcattttgtaggtagactagatatagcccgttgaacctcttttaaaatttagacttttgatagtaatataaaagcatattgaaatttgtagatattatatgaggaatggcacctagatttgaaaattatgcttggcttgtagagacaactagtttctctcgctcttttttttttttttttttttttttttgagacagattctcactcagttgcccaggctggagtgcagtggtgcagtcttggctcactgcaacctctgcctcctgggttaaagcgattctcatgcctcagcctccctagtagctgagactacaggcgtgcaccaccacgcccagctaatttttgtatttttagtagagacaggatttcaccatgttcaccatgttggtcaggctggtcttgaactcctggcctcaagtgatctgcccgcctcgacctcccagagtgctgggattataggtgtgagccactaagcctggctgagacaactagtttcccttaactcattggaattctctaggattaggagaattccacagagcctatatgatattatagctcaacatttagtataccaaaggcatacccgtgtaaatctaggagttatttccagagattgttttaaggagcagtcttatattcagggtagaaagttatgattggatctgctgttaaggagaacaaaggagcttctaaaggtttgggaggtttactggtagtaactattctaggaaatatttatgttttaaggtgatgttcacatgggttctttagaaggaacatagtcaagtgtgatggattaactctatatagtctttctcctcttgtgcgtgtaggaaatctgacctgcagtgtcagttgatgtgacaagagataaagaaagcacagtattttaaaatctaaagcagattcctttcttagaaaacaataggaaaaaattatagatggatgtctttgctgaaatctaacaattagctcatattccatgagaaagagtggcctaagaattatttcatgttacctagccttctgaagctactcacttgatgtgcctagcactttgaaactaaccttttctttctttgttcatgacagtttaattccaaatatttactattttctcttgtaactgttagaacagttccttttgacattaatttttgcctacatatatatttttaagttgagaccaaatcggtgaagtgttgagcaagtaacatttatgatgtgtgtatattggaacaaatgtaaaagggttacaaagattagaaacagagtcataaaaaatggcttgatttataaaggcattacttttggtgctttatataatggcatatattgaactaaaaatttgtatatacagtatgtcagcatttcttagtaacttctcttgaatccatttttaatatctaatattgtacaggttggggagttacattcttcaggccaatactatccagactatataaatttataaaataaattgaaaaattcattcccctgtattcaagaccaaagcacataaatgctaatgtagggctcagaggggaaatacagttctcctgcatatttgagaaaatgtgaagtcctttcaagaaaatctaataaacataataatcatagcctgctgacactaaggaaaaaggacctcattcactctttcttttatgcagtgatttactggtccctactgatttccaaattggatcacgatagtaaattatccatgctggtacctgtgaaagtaagccctgggatccatatttgttttgtgttctgcttaaatcagcaagaatgataaatttgatggtgtgaaattggaagtatcaagggctttctttggtgattgagggaaataatgtctctacttgtaatttattgtgaccctttttcactgtatatgctttgtatgtctaatatttatttcaatgcaaattcaattgttccttcatctgtattgttatatctaagattttattgatgttaaaatctaattgtggaataaaaatctctctggaatttagcagatacaaaaatgttatcttgcaaaagaactaagaacatttgtagttagaaatcagctttcctttgagcttaattgcctttttgttagaataaggtgaatttgaacacactcctcttatcctcagcccatcacaaataatagagatgccatgattttgaggtctgatgtgaaactggtaaaaatgtgatctaaggtgtaactggaaaaaaaaaggaaagaaaaattacattgatgcctcagctgtt

SEQ ID NO: 4593 - DNA, 3814 bp, Homo Sapiens
  NM_018127
agctcggtgcacggcgcgctgattggctggatccgccatgcggagcggctaggtggtgcacgggaaacgcgggcgtaggtgaccggcggctttctcagttttggtggagacgggcgcatgtgggcgctttgctcgctgctgcggtccgcggccggacgcaccatgtcgcagggacgcaccatatcgcaggcacccgcccgccgcgagcggccgcgcaaggacccgctgcggcacctgcgcacgcgagagaagcgcggaccgtcggggtgctccggcggcccaaacaccgtgtacctgcaggtggtggcagcgggtagccgggactcgggcgccgcgctctacgtcttctccgagttcaaccggtatctcttcaactgtggagaaggcgttcagagactcatgcaggagcacaagttaaaggttgctcgcctggacaacatattcctgacacgaatgcactggtctaatgttgggggcttaagtggaatgattcttactttaaaggaaaccgggcttccaaagtgtgtactttctggacctccacaactggaaaaatacctcgaagcaatcaaaatattttctggtccattgaaaggaatagaactggctgtgcggccccactctgccccagaatacgaggatgaaaccatgacagtttaccagatccccatacacagtgaacagaggaggggaaagcaccaaccatggcagagtccagaaaggcctctcagcaggctcagtccagagcgatcttcagactccgagtcgaatgaaaatgagccacaccttccacatggtgttagccagagaagaggggtcagggactcttccctggtcgtagctttcatctgtaagcttcacttaaagagaggaaacttcttggtgctcaaagcaaaggagatgggcctcccagttgggacagctgccatcgctcccatcattgctgctgtcaaggacgggaaaagcatcactcatgaaggaagagagattttggctgaagagctgtgtactcctccagatcctggtgctgcttttgtggtggtagaatgtccagatgaaagcttcattcaacccatctgtgagaatgccacctttcagaggtaccaaggaaaggcagatgcccccgtggccttggtggttcacatggccccagcatctgtgcttgtggacagcaggtaccagcagtggatggagaggtttgggcctgacacccagcacttggtcctgaatgagaactgtgcctcagttcacaaccttcgcagccacaagattcaaacccagctcaacctcatccacccggacatcttccccctgctcaccagtttccgctgtaagaaggagggccccaccctcagtgtgcccatggttcagggtgaatgcctcctcaagtaccagctccgtcccaggagggagtggcagagggatgccattattacttgcaatcctgaggaattcatagttgaggcgctgcagcttcccaacttccagcagagcgtgcaggagtacaggaggagtgcgcaggacggcccagccccagcagagaaaagaagtcagtacccagaaatcatcttccttggaacagggtctgccatcccgatgaagattcgaaatgtcagtgccacacttgtcaacataagccccgacacgtctctgctactggactgtggtgagggcacatttgggcagctgtgccgtcattacggagaccaggtggacagggtcctgggcaccctggctgctgtgtttgtgtcccacctgcacgcagatcaccacacgggcttgccaagtatcttgctgcagagagaacgcgccttggcatctttgggaaagccgcttcaccctttgctggtggttgcccccaaccagctcaaagcctggctccagcagtaccacaaccagtgccaggaggtcctgcaccacatcagtatgattcctgccaaatgccttcaggaaggggctgagatctccagtcctgcagtggaaagattgatcagttcgctgttgcgaacatgtgatttggaagagtttcagacctgtctggtgcggcactgcaagcatgcgtttggctgtgcgctggtgcacacctctggctggaaagtggtctattccggggacaccatgccctgcgaggctctggtccggatggggaaagatgccaccctcctgatacatgaagccaccctggaagatggtttggaagaggaagcagtggaaaagacacacagcacaacgtcccaagccatcagcgtggggatgcggatgaacgcggagttcattatgctgaaccacttcagccagcgctatgccaaggtccccctcttcagccccaacttcagcgagaaagtgggagttgcctttgaccacatgaaggtctgctttggagactttccaacaatgcccaagctgattcccccactgaaagccctgtttgctggcgacatcgaggagatggaggagcgcagggagaagcgggagctgcggcaggtgcgggcggccctcctgtccagggagctggcaggcggcctggaggatggggagcctcagcagaagcgggcccacacagaggagccacaggccaagaaggtcagagcccagtgaagatctgggagaccctgaactcagaaggctgtgtgtcttctgccccacgcacgcacccgtatctgccctccttgctggtagaagctgaagagcacggtcccccaggaggcagctcaggataggtggtatggagctgtgccgaggcttgggctcccacataagcactagtctatagatgcctcttaggactggtgcctggcacagccgcgggccaggaggctgccacacggaagcaagcagatgaactaatttcatttcaaggcagtttttaaagaagtcttggaaacagacggcggcacctttcctctaatccagcaaagtgattccctgcacaccagagacaagcagagtaacaggatcagtgggtctaagtgtccgagacttaacgaaaatagtatttcagctgcaataaagattgagtttgcaattgtgagttcttttgcttcctcctgctgctgctacagagcagggtctgctgtgcaccaccttggagaaggctctctgtgctgtagtgtggcagctgcctggtacccgggtggcttggaagaagtcagctcccgtcgtagtgagcacctctggaacctgtcctcagagagccacccttattcgccaagtctttttgacaactcgagctgtgccagctcacagcagggcgtgctttctctatcaatcaatcaatcaatcaatcaaatcaatcagtgagagcctggctgggctggtgtcattggtcagggaaatgcaagtcttctggtggttctgggtaaaagtggagacaatagatttgctgtgttgttgcttccatactgagaggagtgaggatcactttgccctcgaaggttttgagaaatggcacacggggctggtttccattgtcctccttgcgggatttacagacgtggattagtgctcgacaaatggagagcattttccaaggaagtaagtaagtaaagtaagtaagtaagtaagtaagttgaatctagtatttattgtgtatattccctacccaggagaatgtaaaaagaagagctttaaaaactcaaaagacaagcaagcgagagatcagccagggacctggctttacacaggtggtgaccttcaggctccatcccggtgtgcatttgagattgacggccatgtccccgcaggtttattaaagcaagaacagatgccaagctcagggataataaatctattttaataacgttaaaaaaaaaaa

SEQ ID NO: 4594 - DNA, 4890 bp, Homo Sapiens
  NM_018128
cgccacgggggtcgctgtcatggcaacgcacccgctcccgcatggagggcgcgaagccgcattgtgagcgctggccctggagcccgcggccccgcggctgagagcgagcctcggtcccgctgaagctcccctgacttctgcctgctccctctcccgacgggacggaaagggccggggctcgggcatggggtcccctgcggtccgagcctgcccacggcgaagccggtgcagcctggccccgtgacccctctgaatccccgtccggccgtcgccgtgcagttgtcaagtttctgggaagattagtgggagcgcagccgcccgagcccgacggccggagggtcgcggccagtcccccttgccgggtcgccacgtcccacaaggtccttcccggccgctccgtgggaggcggggcgcaggttggagtaacagggacgggcttgagctggtacggaaccgggcaaggtgagagaagtgtcttccacgcgattcccaagcctcgctagggaatcgagggagaagaaaggttgctcagagtgataaagaacatgccgttgcaaacggaagagcaacgtgcccgaatctaggtgacaggaagggcttaggccttttcggcacgaatggagccttccagtcaacatgcttctacgtgatgcagctttatagcgcaaaaaaatgacaatgcaaggggtacaaacagccctgctagaccaacagcccgagcctcgacagtctacatccggcgccttcaagcccccaaccacacactgcgaagtgggaaaagttcccagcgcggcttggcgaacccgctaacacggcgctctcacgagctgctggaaaagaccttcgcgagagggcgcagggagtcccgctccctggagggcccgcccccttggaggggaccggaagcgcttgtcctggcccggaagcagtgctgactccgtacacgcgcgctgcggcatggcggcccaccgccccggcccgctcaagcagcagaataaagctcataaaggcggacggcatcggggtcggggatctgcacagcgggacggcaagggccgtctggcactgaaaaccctaagcaagaaggtgagaaaagaactcagcagagtcgaccagaggcatcgcgccagccagctccgaaagcagaagaaggaggcggttctggcagagaagagacagctgggtggcaaggatggccctcctcatcaggtactggtggtgcccctgcacagcagaatttccctgccagaggccatgcagctgcttcaagatagggacactggaacagtacacttgaatgaattgggaaacacccagaactttatgctgctgtgcccccgcttgaaacatcggtggtttttcacctcagcaaggccaggggatctgcacgttgtgttagacatggctaaagtagctgataccatcctgttcctccttgatccactagaaggctgggacagcaccggtgattactgtctttcctgcctctttgctcagggccttccgacctatacactagctgtccaggggatttctggcctcccactgaagaaacaaatagataccaggaagaagctaagtaaagcagtggagaagcgctttccgcatgacaaactcctcttgttagacactcaacaggaggcagggatgctgcttaggcagttggctaaccagaagcaacagcatcttgcttttcgagatcggcgggcctacctatttgcccatgctgttgattttgttcctagtgaagagaataacttggtgggcaccttgaaaatttcaggctatgttcgagggcagactctgaatgtcaataggttgctgcatatcgttggatatggtgatttccagatgaaacagatagatgcccccggagaccctttccctttaaatcctagaggaattaaaccccaaaaggacccagacatggcaatggagatttgtgctacggatgctgtagatgatatggaagaaggtcttaaagtcctaatgaaggcagaccctggtagacaggaatccttgcaagcagaggttatcccagatccaatggagggagagcaaacctggcccactgaggaggagctgagcgaggcaaaggatttcttgaaggaaagttctaaggtggtaaagaaggtccccaaaggaacatccagttaccaagctgaatggattttggatggtggcagccaaagtggtggggaaggagatgaatatgaatatgatgatatggaacatgaggattttatggaggaggaatctcaggatgagagtagtgaagaagaggaagaatatgaaactatgactattggggagtctgtgcatgatgatctgtatgataagaaagtagatgaagaagctgaggcaaaaatgttggagaaatataaacaagaaagactggaagagatgtttccagatgaagtggacacgccccgtgatgtggctgctcgaattcgatttcagaaatacagaggccttaagagcttccggacatctccatgggatcctaaggaaaaccttcctcaagattatgctcgaatatttcagtttcagaactttactaacactaggaaaagcatctttaaagaggttgaagaaaaagaggttgaaggagctgaggttggctggtatgtcacacttcatgtctctgaagtccccgtctcagtggtcgagtgcttcaggcaaggaacacccttgattgcattttctttactacctcatgaacagaagatgtcagtattgaatatggtggtgaggcgtgaccctggcaacactgaacctgtgaaagccaaggaagagctcatatttcactgtggattcaggcgcttccgagcctcacctttattctctcagcacactgcagcggacaaacataaattgcagagattcctgactgctgacatggccctggtggcgacagtctatgcgccaatcacttttcctcctgcatctgtgctgcttttcaagcaaaaaagcaatggaatgcacagcctcattgctacaggccatcttatgtcagtagatccagacagaatggtcatcaagagagttgttctgagtggtcatcctttcaaaatttttactaagatggcagtagtacgttacatgttcttcaacagagaggatgtgctgtggtttaaaccagtggaactgagaacgaagtggggccggagaggacatatcaaggaacctttaggtacccatggccacatgaaatgcagctttgatgggaagctaaaatctcaagacacagtactgatgaacctgtataaacgagtcttccccaaatggacttatgatccatatgtaccagaaccagtaccctggctgaaaagtgagatttcttcaacagtgcctcaagggggcatggagtaatggattcaaagagattctgtcttaccggtgccagtcagtactccagggatgggaggcacaagttgtgattgggcaaagtttattttctatgtcagcctgtcagtccactgccccattttgcaagacttttttttagccttgacaaaatgtctcagttaagtataaaagtttttccactacttagtccaaaaaaaactattaaatcttaatgaaatagccactctccattaagaatctgataactaagagttgacaatactaggaaacaaaatgtcttcagtatctaaagacactgaattcccaccatttccttttctgtaaattaaacagaaacagactgataagaagctggcctttcagcctgcttcacccaagttatggaggaggttaagtctacatttccaccactgagcacaatacaaatgttctttacttctggggaaacagtttgaaaatgttgagacagcacagcagccactccaacaccagctgtaggttcaatgagtagtttcatcctctcccacaccagctgggttgcacactgttgatatggaagggagtaggaattagtgaaaggggagtctagttggtttacctataaagttcagatgagaatacgtgtccagtttgaattttcttatcactgtgtacacacgcttcccaaagcttttctttaattctgactctgcttctgtcaagagggttgtcattaatacatctagggtaccctcccatgtcatgaagttacctagtcaggttcccgtgggtcacttgctactcctaagggaagtttcttctgcctaagaagttacaccatgctttgctatttcttttcttgctggagcctcaccttaatttcatcctctgtgacagtgaagatatcatccacaaggtccctgataataggccaggtgttcaagccaatgctggatttgacaccatctgctatggtttctggaggataaagattgggcatcagtttccccttcagcttggactggtagcagtcatctgcatttgagggttcagcagcatataccttcacactaggtttcagagcctgggaagaggaatattaagacatcttaacaacaaaccacaacattgcctgcatgtctaaaagaaaatatgggcctggtgtggtggctcacacctgtaatcccaacactttgggagcccgaggcgggtggatcagctgaggtcaggagttcaagaccagcctggccaacctggtgaaatgcagtgtcaactaaaaataggaaaatcagccaggcgtggtggcagacccctgtaatcccagctactcaagaggctgaggtaggagaatcacttgaacttgggaggggtaggttgcagtgagctgagatcacaccaaaatggggtggggcgcagtggctcacgcctgtaatcccagcactttgggaggccgaggtgggcggatcacgaggtagggagatcaagaccatcctggctaacacggtgaaaccccgtctctactaaaaatacaaaaaaaaaaaa

SEQ ID NO: 4595 - DNA, 3482 bp, Homo Sapiens
  NM_018129
cattggctccgaggacttaggacctgttagcttggttgggcgactggcaaatccttccttccccggggtagaagtccagggtgagaaattggttccgaactcaaaggaacccagtgccgggccacagccgggtcacgtggccggcggccccccatgacgtgctggctgcggggcgtcacggcgacgttcgggcgacctgccgagtggccaggctacctcagtcacctgtgtggtcgcagtgctgccatggacctgggacccatgcgcaagagttaccgcggggaccgagaggcatttgaggagactcatctgacctcccttgacccagtgaaacagtttgctgcctggtttgaggaggctgttcagtgtcctgacataggggaagccaatgccatgtgtctggctacctgcaccagagatggaaaaccctctgctcgcatgttgctgctgaagggcttcgggaaagatggcttccgcttcttcactaacttcgagagtcgaaaaggaaaagagctggactctaatccctttgcttcccttgtcttctactgggagccacttaaccgtcaggtgcgtgtggaaggccctgtgaagaaactgcctgaggaggaggctgagtgctacttccactcccgccccaagagcagccagattggggctgtggtcagccaccagagttctgtgatccctgatcgggagtatctgagaaagaaaaatgaggaactggaacagctctaccaggatcaagaggtgcccaagccaaaatcctggggtggctatgtcctgtaccctcaggtgatggagttctggcaaggtcaaaccaaccgcctgcatgaccggatagtctttcggcggggcctacccacaggagattcccctttggggcccatgacccaccgcggggaggaagactggctctatgagagacttgcaccttaactctgggacctgctggcccagagtggagctagggctaggtgtcaagagagggtgtgggattgggacccaggcccttctttctaaactcaacccatttccctccctaccccttatcttcaggactcttcagagctaatcctctaagttctctgtactcagttggttctcagttagctggtcaagtggagtgtaatggtggcgtagagaatcacaaatggaaaataattccataattatttttttgaccttgcctatgattgattaggatagctccctctaggggtagcagccggtgtgactccctttctggtgacagacagggccccagcagccctgtctgttaccatgtgagtcatactggccaaagcttagtcctagcatatgcacctgagccaacctggccaatcagattgttttgtcaataatttgaaatttgaactggagagatccagaaccttgggagtcattaaagccaagtcattcatagcagccaggaaacaataggaaccaaaagcctctgcctgctgctattgcaattcccaggatctctccttccctggatccctccctcccaggtctgggctgtgcagttcctccccctgccttaaaacaccccactatctctgtaaagtctctctctctcttttttttttttttacttaatctagctagaatctatttctgttgattacaacttaactaactcatttacggataggacttttttttttctttttttcttttttcttttcttttttttttttgagatggagtctcactctgtcacccaggctggagtgcagtggtgtgatcttggctcactgcaacctctgcctcccaggttcaagcaattctcctgcctcagcctcccaagtagctgggactacaggcacacgccaccacacccaactaatttttgtatttttagtagagatggggtttcaccatgttggccaggattgtctccatctcttgaccttgtgatccacccacctcagcctcccaaagtgctgggattacaggcatgagccaccacacccagcgagacggggtttcattatgttggccaggctggtctccaactcctgacctaaagtgatctgcccgccttggcctcccaaagtgctgggattacagacatgagccaccacgcttggccgggatagtatatttttatagcacttcccctactgattgctgccttctctgtggctacaagggacccacagaattacagggaagttacagggaagcaggtttcatctcaatattgggagagatttcaaacaatcacacctgcctgagaaggagtgggctgtcactaggaatttttattcccagtccgtcaggaattttgtagaagggcttcatgtgctggtaccaataggacaggaagattttaatcagctttactatctatgtttttttatggaaactgtgtgtatgtatacatacattttccaaaaagaaaaattaaatgattatagagattatgtttttcagactactcacgtatctgcttttcttactccccacctctgctgataattcctagttcattggtttttcccccacactggaattacctggggagcttaaaaaaccctgatgcctgggtcccaccctcagagatgattgaaccagcctggccagcatggcaaaaccctgtctctactatgatatgaatgcagcctgggcactgggaaatttaaaaactccccagataattctgtgcagccaaggttgagacctcctagtctagagctttgctatacacagggtggtccacaagccaggagcatcagcatcacttggcagcgccttagagattcagaccccagacccactgaatctgaccctgcattttcactagaccccaggtgatcagctgcactagactcaacctctaaaccaagacctcccaccctcacagtctatgatcctttagtgaccctcagctgagtcctgtgctgaactgtgtttgttctccttgagcacatgcccgctaaccagggacagactggatgagcaagcaacctgctggctatggagaagagccaggctgggtaaatgtttgctgtgactaagccaggatcaaagaactgcctgttgcttgcactggctggcactgagcttgccactctgtgaactgtgcttccttcccctgcatggacctgtgcctcagtcactattatccgcaggccttctccaagggcagccctctccttgtttatccctcttaagcctgcgtgcaggaaggcacattaaccctgtggccccctgcaggcaggagggtgttgggtgcccttacctaccttgccctttttcttgtaccgtaggctgtgccgtttatgagtaagtgatgtgtgtctgtgtgtgtgtctagaagtgctgcactcaccttgtgttattggaggttgtgtaaccccctagctttgagcctggtctcagatgttccttttccgttctctgtccagccgttaccgcccccagtctgtaataaaagcctatcagccgtgcactttaaaaaaaaaaaaaaaaaa

SEQ ID NO: 4596 - DNA, 2861 bp, Homo Sapiens
  NM_018130
gtccctcacaccgagagttcctgcgcgtggggagttggagagtttgcgtggcgggaacgcggcggcagtgagagcgagcggcgccggcccttgcgtccggtgcggcgatgctgaccccggcgttcgacctcagccaggatccggacttcctgactatcgccatccgcgtgccctacgcccgggtctccgagttcgacgtctacttcgaggggtctgacttcaagttctacgccaagccatactttctcagattaacccttcctggaagaattgtagaaaatggaagtgagcaagggtcctatgatgcagataaaggaatttttaccattcgcctgcccaaagaaacccctggccagcattttgaggggctgaacatgttaactgctcttctggcaccaagaaaatccaggacagcaaaaccacttgtggaagaaataggtgcttctgagattcctgaggaagtagttgacgatgaagagtttgattgggaaattgagcagacaccctgtgaagaggtatcagaaagtgctttgaatccgcagtgccactatggatttggaaacttacgatcaggagtgttgcaacggttacaggatgaactgagtgatgttattgatattaaggatccagatttcacccctgcagctgaacgaagacagaagcgcctggccgctgagctggccaagtttgatcctgatcattatctagctgacttttttgaagatgaggcgattgaacagattttgaagtataatccttggtggactgacaaatattcaaaaatgatggcctttttggaaaagagtcaggaacaagaaaatcatgctacattagtgtctttttctgaagaagagaagtatcagctacgaaaatttgtcaataaatcttatctgctggacaagagagcctgtcgtcaagtgtgctacagtttgattgatatccttctggcatattgctatgaaacccgtgtcactgaaggagagaagaatgttgaatctgcatggaatatcaggaaactgagtccaacactatgctggtttgagacttggactaacgttcatgatatcatggtgtcttttggaagaagggtgttgtgttacccactctatcgccatttcaagctggtgatgaaggcctacagggacactataaagatattgcaactgggtaaaagtgcagttttaaagtgtctcctggatattcacaaaatttttcaggaaaatgacccagcgtacatactgaatgatctctacatctcagactactgtgtgtggattcagaaagtcaaatccaaaaagttggcagctcttgcagaagccttaaaggaagtctcccttacaaaggcccagctggggttagaactggaagaactagaagcagcagcactgcttgtccaggaggaagaaactgcattaaaagcagcccattcagtttctgggcagcagacactttgctccagctctgaggcaagtgattcggaggactcagacagcagcgtgtcatctggaaacgaagactcaggctcagattcagaacaagatgaactcaaagatagtccatctgagacagtcagttctttgcaaggtccctttcttgaagaaagcagtgcctttcttattgttgatggtggagtacgcagaaacacagccatccaggagtctgatgccagtcagggaaagccacttgcctcttcctggcctcttggagtgtctgggcctctgatagaggagcttggggaacaactgaagactacagttcaggtttctgaacccaagggcaccactgctgtaaaccgcagcaatattcaggagagagacggctgtcagacaccaaataattgactcttaggtggttttattcattgttgagaaatatggtagattgggtttcatttaccgaatgagaattcttcattttcactttgtaatttttcttagtatatagtcagcccactgtatttgtgtgttccacatctgtggattcaaccaactgcagatcaaaaatattgaagaaaaaatcgcatctgtaccaaacatgtacagacttttttcttgttattattctctaaataatacagtatgacaactatttccacagcatttacattgtattgggtaatataagtaatctagtgatgatttaaactgtgcaggaggatgtgggtaggttatatgcaaatactgcaccattttttatcaggggcttgagcatctgaggattttagtatcctcaggagtcctggaaccaaccccccacagatacggggacaactttatgacattgtttttcaaccaatgaatgtttataccttttgttttccttgccgcgactgtgaagataaagttcaaaagtatttttaccaaagtgtagctaatatttcaagctgaaaataatagttctactgcccgtgtctccagaatgtagagcccatcaatatttttattttaggaggtgtacttgacacccaataaactgcacgtatcaaaagtgtacaatgtgttggcgtatgtataccctgcgtaaaactatcaccacaactgaagtgaggaacggacccatcattcccaagtgcccttgtgccctgttattagtttgcatgtcctagaattctatgtaaattgaatcatacaatatgtatcccttttttggtcaggcatattttactcagtatagttattttgagattcatccatgtggtagcatgtgtcacgagtttttgtttttatgtttttcattgctgagtactgcttcattgaatagatttgttcattgacctatcgatggacacctgggttgtttccagtttggggctgttataaataaagctgttatgaacatttgtgtacaaaaaaaaaaaaaaa

SEQ ID NO: 4597 - DNA, 2656 bp, Homo Sapiens
  NM_018131
cacacctgatggtgtgactcggccgacgcgagcgccgcgcttcgcttcagctgctagctggcccaagggaggcgaccgcggagggtggcgaggggcggccaggacccgcagccccggggccgggccggtccggaccgccagggagggcaggtcagtgggcagatcgcgtccgcgggattcaatctctgcccgctctgataacagtccttttccctggcgctcacttcgtgcctggcacccggctgggcgcctcaagaccgttgtctcttcgatcgcttctttggacttggcgaccatttcagagatgtcttccagaagtaccaaagatttaattaaaagtaagtggggatcgaagcctagtaactccaaatccgaaactacattagaaaaattaaagggagaaattgcacacttaaagacatcagtggatgaaatcacaagtgggaaaggaaagctgactgataaagagagacacagacttttggagaaaattcgagtccttgaggctgagaaggagaagaatgcttatcaactcacagagaaggacaaagaaatacagcgactgagagaccaactgaaggccagatatagtactaccgcattgcttgaacagctggaagagacaacgagagaaggagaaaggagggagcaggtgttgaaagccttatctgaagagaaagacgtattgaaacaacagttgtctgctgcaacctcacgaattgctgaacttgaaagcaaaaccaatacactccgtttatcacagactgtggctccaaactgcttcaactcatcaataaataatattcatgaaatggaaatacagctgaaagatgctctggagaaaaatcagcagtggctcgtgtatgatcagcagcgggaagtctatgtaaaaggacttttagcaaagatctttgagttggaaaagaaaacggaaacagctgctcattcactcccacagcagacaaaaaagcctgaatcagaaggttatcttcaagaagagaagcagaaatgttacaacgatctcttggcaagtgcaaaaaaagatcttgaggttgaacgacaaaccataactcagctgagttttgaactgagtgaatttcgaagaaaatatgaagaaacccaaaaagaagttcacaatttaaatcagctgttgtattcacaaagaagggcagatgtgcaacatctggaagatgataggcataaaacagagaagatacaaaaactcagggaagagaatgatattgctaggggaaaacttgaagaagagaagaagagatccgaagagctcttatctcaggtccagtttctttacacatctctgctaaagcagcaagaagaacaaacaagggtagctctgttggaacaacagatgcaggcatgtactttagactttgaaaatgaaaaactcgaccgtcaacatgtgcagcatcaattgcatgtaattcttaaggagctccgaaaagcaagaaatcaaataacacagttggaatccttgaaacagcttcatgagtttgccatcacagagccattagtcactttccaaggagagactgaaaacagagaaaaagttgccgcctcaccaaaaagtcccactgctgcactcaatgaaagcctggtggaatgtcccaagtgcaatatacagtatccagccactgagcatcgcgatctgcttgtccatgtggaatactgttcaaagtagcaaaataagtatttgttttgatattaaaagattcaatactgtattttctgttagcttgtgggcattttgaattatatatttcacattttgcataaaactgcctatctacctttgacactccagcatgctagtgaatcatgtatcttttaggctgctgtgcatttctcttggcagtgatacctccctgacatggttcatcatcaggctgcaatgacagaatgtggtgagcagcgtctactgagactactaacattttgcactgtcaaaatacttggtgaggaaaagatagctcaggttattgctaatgggttaatgcaccagcaagcaaaatattttatgttttgggggttttgaaaaatcaaagataattaaccaaggatcttaactgtgttcgcattttttatccaagcacttagaaaacctacaatcctaattttgatgtccattgttaagaggtggtgatagatactattttttttttcatattgtatagcggttattagaaaagttggggattttcttgatctttattgctgcttaccattgaaacttaacccagctgtgttccccaactctgttctgcgcacgaaacagtatctgtttgaggcataatcttaagtggccacacacaatgttttctcttatgttatctggcagtaactgtaacttgaattacattagcacattctgcttagctaaaattgttaaaataaactttaataaacccatgtagccctctcatttgattgacagtattttagttatttttggcattcttaaagctgggcaatgtaatgatcagatctttgtttgtctgaacaggtatttttatacatgctttttgtaaaccaaaaacttttaaatttcttcaggttttctaacatgcttaccactgggctactgtaaatgagaaaagaataaaattatttaatgttttaaaaaaaaaaaaaaaaaaaa

SEQ ID NO: 4598 - DNA, 2053 bp, Homo Sapiens
  NM_018134
aatgacgtacttcgcaggcgcgcgggcgggcctggcagttggcgcccatggagccagagctgctggttcggaaggtgtctgcattgcaggcctgcgtccggggcttcttggtccgacgccagttccagagcctgcgagctgagtatgaggcgattgtacgagaggtcgagggcgacctgggcacgcttcagtggaccgagggccgcattcccaggccgcgattcctcccagagaaggcaaaatcccatcagacctggaaagcaggagacagggtagcaaatccagagcaggggctgtggaaccacttcccatgtgaagagtctgagggagaggccacctgggaggagatggtgctgaagaagtcaggagagagctcagcaaatcaaggaagcctctgcagagatcacagctcctggcttcagatgaagcagaacaggaaacccagccaagagaagaccagagacacgacaaggatggagaatccagaagccacagatcaaagactgccccacagccaacctcagcttcaagagcttcagtaccaccgcagccacttggccatggaattgctgtggctgcaacaggccatcaatagccgtaaggagtacctacttcttaaacaaacactgagatccccagaggcgggcccgatcagagaggaaccccgcgtgttcctagaacatggggaacaggcctgtgagagggaccagtcacaaccaagcgcaccactggaggaccagtcctacagagacaggaccactggagagctagaacaggaggatgactcctgtcacagggtcaaatcaccccacagatccccaggaagtttggccactacacaaaaaaacattgctggggctaagtgcagagaaccatgctacagcaagtctggaccaccgtcgtctataccatcaaacagccaggccttgggggacaggctcaccaaagggccagacgatggaagacagacctttggagggacctgcctgctgcagatgaaaatcctggaggaccagacccccagaggtttaaaacctaggaaccattgtcccaggaagtccaggacacagctgtctgcactctatgaggactcaaatattaaggagatgtctcccagaaaactagaccacaaagagcctgactgccgaacagtcaggacacaagagttgggcctctcagaggaccacatcatctgggatggtaccttgggggggccagagcatagtgtcctcgatctctggaggactaaaccacccaaaggccaggcccccactgatagaagctccagagatggaacctccaatgagcctagtcatgaaggacagaaaaagcagaggactataccatggagatcaaagtcacctgagattctgtcttctacaaaggcaggctgtacaggagaggaacagtggaggggcaggccatggaaaacagaaccacctggctagaccctaggaagccaggagaggatcaggttccaaaggggaatgctatgaaagggcagtgagacaagacctcatcctacctccctgaccagctctggcttctgctcctgcccctggccattggtgactagtggggccaagagaagctggagcagagagctggcatgagtatagggaaggaggaaggacacattttcaatcctctgcctgtagctcaatccaaatttgtggataaggggccgggtgcagtggctcacacctgtaatcccagcactttgggaggccaaggtgagtggatcacctgaggtcagaagtttgagaccagcctgaccaacatggtgaaatgaaaccccatctcaactaaaaatataaaaattagccaggcgtggtggtgcatgcctgtagtcccagttactcgggaggctgagacaggagaatcgcttgaacccaggagatggagattgcagtaggccaagatgatgccactgcactccagcctgggctacagagcgagacacggtctcaaaaaacaaatgtgtggctaaggagttacctgggggaagtagaatgagaggtctgttgggaataaaggtttttcttagattctg

SEQ ID NO: 4599 - DNA, 10906 bp, Homo Sapiens
  NM_018136
attggtggaggcggcaagtttaaacagagtcaaaacgccatacttgtttggctcctctttttaatttgcgagtttattgggcttgttttctgttttctagggagtaggttagtggaaaagaaaaagggccgaattcactcccacgacctctacagccgcccctgaggggaagcggtcagcgtaagtcccggatccccgctccggagccgcctcgtgggagcggggcaaggagatccaggaggggtctcgaatctgccatggcgaaccggcgagtggggcgaggctgctgggaagtgagcccgaccgagcggaggccgcccgcggggctgcggggccccgcggccgaggaggaggcgtcttccccgccggtcctgtctctcagccacttctgcaggtctcctttcctttgcttcggggacgttctcctgggagcctcacggacgctgtctctggccctagacaaccctaacgaggaggtggcagaagtgaagatctcccacttcccggccgcggacctgggcttcagtgtgtcgcagcgctgtttcgtgttgcagcctaaagagaaaattgttatttctgttaactggacaccactcaaagaaggccgagtaagagagattatgacatttcttgtaaatgatgttctgaaacaccaagctatattactaggaaatgcagaagagcagaaaaagaaaaagaggagtctttgggataccattaaaaagaagaaaatttcagcctctacaagtcacaacagaagggtttcaaatattcagaatgttaataaaacatttagtgtttcccaaaaagttgacagagttaggagcccactacaagcttgtgaaaacttggctatgaatgaaggcggtcccccaacagaaaacaattctttaatacttgaagaaaataaaatacccatatcacctattagccctgctttcaatgaatgccatggtgcaacttgcttgccactctctgtacgtcgatctactacctactcatctcttcatgcatcagaaaatagggaactattaaatgtacacagtgccaacgtttcaaaagtttcttttaatgagaaagctgtaactgaaacttcctttaattccgtaaatgttaatggccaaagaggagagaatagtaaacttagtcttacccccaactgttcttcaactttgaacattacacaaagccaaatacattttctaagtccagattcttttgtaaataatagtcatggagctaataatgaactagaattagtaacatgtctttcatcagatatgtttatgaaagataattcacagcctgtgcatttggaatcaacaattgcacatgaaatttatcagaaaattttaagtccagattctttcataaaagataattatggactaaatcaggatctagaatcagagtcagttaatcctattttatcccctaatcaatttttaaaagataacatggcatatatgtgtacatctcagcaaacatgtaaagtaccattatcaaatgaaaattctcaagtcccacagtctcctgaagattggagaaaaagtgaagtttcgccacgtattcctgaatgtcagggttcaaaatctcccaaagctatttttgaagaactagtagaaatgaagtcaaattactacagttttataaaacaaaataatcctaaattttctgcagttcaggatatttctagtcatagccacaataaacaacctaagagacgtccaatactttctgccactgttactaaaaggaaggccacctgtaccagagaaaaccaaactgagattaataaaccaaaagcaaaaagatgtctcaacagtgcagtgggtgaacatgaaaaagtaataaataatcaaaaggaaaaagaagattttcattcttatcttccaattatagatccaatattaagtaaatctaagagttataaaaacgaggtaacaccctcttcgacaacagcttcagttgctcggaaaagaaagagcgatggaagcatggaagatgcaaatgtgagagttgcaattacagaacatacagaagtgcgagaaatcaaaagaatccatttttctccctcagagcctaaaacatcagctgttaagaaaacaaaaaatgtgacaacacccatctcaaaacgtattagcaacagagagaaattaaacctgaagaagaaaactgatttatcaatattcagaactccaatttctaaaacaaacaaaaggacaaaacccattatcgctgtggcacagtccagtttgaccttcataaaaccattaaaaacagatattcccagacacccgatgccatttgctgcaaaaaacatgttttatgatgaacgctggaaggaaaagcaggaacagggcttcacttggtggttaaattttatattaacccctgatgacttcactgtaaaaacaaatatttctgaagtaaatgctgctactcttcttttgggaatagagaatcaacataaaataagtgttcctagagcacctacaaaagaggaaatgtctctcagagcttatactgctcggtgtaggttaaacagactacgtcgtgcagcatgccgtttgtttacttctgaaaaaatggttaaagctattaaaaagcttgaaattgaaattgaagctaggcggttaattgttcgaaaagatagacacctatggaaagatgtgggagaacgtcagaaagtcctgaattggctgttgtcctacaatcctttgtggcttcgaattggtctagagacaacttatggagaactcatatctttggaagataacagtgatgtcacagggttggctatgtttattctgaatcgcctactttggaatcctgatatagcagctgagtatagacaccccactgttcctcacctgtatagagatggtcatgaagaagctttgtccaagtttacattgaaaaagttattgttgttggtctgttttcttgattatgctaaaatttccagactcattgatcatgatccttgtctcttctgtaaagatgccgaattcaaggctagtaaagaaatccttttggctttttcacgagatttcctaagtggtgaaggtgacctttcccgtcaccttggcttattgggattacctgttaaccatgttcagacaccatttgatgaatttgattttgccgttacaaatcttgccgtagacttgcaatgtggagtgcgccttgtgcgaaccatggaacttctcacacagaactgggacctctcaaagaaactcaggattccggcaataagtcgtcttcaaaagatgcacaatgttgacattgttcttcaagttcttaaatcacgaggaattgaattaagtgatgagcatggaaatacaattctatctaaggatattgtggataggcacagagaaaaaactctcaggttgctttggaaaatagcgtttgcttttcaggtggatatttcccttaacttagatcaattaaaggaagaaattgcctttctaaaacacacaaagagtataaagaaaacaatatctctactatcatgccattctgatgatcttattaataagaaaaaaggcaaaagggatagtggttcctttgaacaatatagtgaaaacataaagttattgatggattgggtaaatgctgtttgtgccttctataataaaaaggtggagaattttacagtgtctttctcagacggccgtgtgttatgttacctgatccaccattaccatccttgctatgtgccatttgacgctatatgtcagcgtactactcaaactgtggaatgtacgcaaactggttcagtggtattaaattcatcatctgaatctgatgacagttctctggatatgtctcttaaagcatttgatcatgaaaatacttcagagctatacaaagagctcctagaaaatgaaaagaaaaattttcacttggttaggtctgcagttagagaccttggtggaatacctgctatgattaatcattcagatatgtcaaatacaattccagatgaaaaggtggttattacctatttgtcatttctttgtgcaaggcttttggatcttcgtaaagaaataagagctgctcgactcatacaaacaacatggagaaaatataaactaaaaacagatctcaaacgccatcaggagagagagaaagctgcaagaattattcaattggctgtaatcaattttctagcaaaacaaagattgagaaaaagagttaatgcagcactcgtcattcagaaatattggcgaagagtcttagcacagagaaaattattaatgttaaaaaaggaaaagctggaaaaagttcaaaataaagcagcatcacttattcagggatattggagaagatattccactagacaaagatttctgaaattgaaatattattcaatcatcctgcaatctaggataagaatgataattgctgttacatcttataaacgatatctttgggctacagttacaattcagaggcattggcgtgcttatttaagaagaaaacaagatcaacaaagatatgaaatgctaaaatcatcaactcttataatccaatctatgttcagaaaatggaagcaacgtaaaatgcaatcacaagtaaaagctacagtaatattgcaaagagcttttagagaatggcatttaagaaaacaagctaaagaagaaaattctgctattatcatacaatcatggtatagaatgcataaagaattacggaaatatatttatattagatcttgtgttgttatcattcagaaaagatttcggtgctttcaagcccaaaagttatataaaagaagaaaagagtccatactaaccatccagaagtactacaaagcatatctgaaaggaaagattgagcgcaccaactatttgcagaaacgagctgcagccattcaattacaagctgcttttaggagactgaaagctcataatttatgtagacaaattagagctgcttgtgttattcagtcatactggagaatgagacaagacagagttcgatttttaaaccttaagaagactattatcaaatttcaggcacatgtaagaaaacatcaacaacgacagaaatataagaagatgaagaaagcagctgttataattcagactcatttccgagcttatatttttgccatgaaagttctagcatcttaccagaaaacacgctctgctgtcattgtgctgcagtctgcatatagagggatgcaagccaggaaaatgtatattcacatcctcacatctgttataaagattcaatcatattatcgtgcttatgtttctaaaaaggaatttttgagcctaaaaaatgctacaataaaattgcagtcaactgttaagatgaaacaaacacgtaaacaatatttgcatttaagagcagctgcactatttatccagcaatgttaccgttccaaaaaaatagctgcacaaaagagagaagagtatatgcagatgcgggaatcttgtatcaaactgcaagcatttgttagaggataccttgtccgaaagcagatgaggttacaaagaaaagctgttatttcactacagtcttatttcagaatgagaaaggctcggcagtattatctgaaaatgtataaagcaattattgtcattcagaattactatcatgcatacaaagcacaggtcaatcagaggaagaacttcttgcaagtcaaaaaagcagctacttgcttgcaagcagcttacagaggttataaagtacgccagctaatcaaacaacaatctatagctgctcttaaaattcagtctgcttttagaggctataataaaagggtaaaatatcaatctgtgcttcaatctataataaagattcagagatggtacagggcgtacaagactcttcatgatacaagaacacattttttgaagacaaaggcagctgtgatttccctccagtctgcttatcgtggctggaaggttcggaaacagattagaagggaacatcaagctgccttgaagattcagtctgcttttagaatggccaaggcccagaaacagtttagattgtttaaaacagcagcattagtcatccagcaaaatttcagagcatggactgcaggaaggaagcaatgtatggagtatattgaactccgtcatgcggtactggtgcttcaatctatgtggaagggaaaaacactgagaagacagcttcaaaggcaacataaatgtgctatcatcatacagtcatactatagaatgcatgtgcaacaaaagaagtggaaaatcatgaaaaaagctgctcttctgattcaaaagtattatagggcttacagtattggaagagaacagaatcatttatatttgaaaacaaaagcagctgtagtaactttacagtcagcttatcgtggtatgaaagtgagaaaaagaataaaggattgcaacaaagcagcagtcactatacagtctaaatacagagcttacaaaaccaaaaagaaatatgcaacctatagagcttcagctattataattcagagatggtatcgaggtattaaaattacaaaccatcagcataaggagtatcttaatttgaagaagacagcaattaaaatccaatctgtttatagaggtattagagttagaagacatattcaacacatgcacagggcagccacttttattaaagccatgtttaaaatgcatcagtcaagaataagttaccatacaatgagaaaagcagctattgttattcaagtaagatgtagagcatattatcaaggtaaaatgcagcgtgaaaagtacctgacaattttgaaagctgttaaagtccttcaggcaagttttagaggagtaagagttagacggactcttagaaagatgcagactgcagcaacactcattcagtcaaactacagaagatacagacagcaaacatactttaataagttaaagaaaataacaaaaacagtacagcaaagatactgggcaatgaaagaaagaaacatacaatttcaaaggtataacaaactgaggcattctgtaatatacattcaggctatttttaggggaaagaaagctagaagacatttaaaaatgatgcatatagccgcaactctcattcagaggagatttagaactctaatgatgagaagaagattcctctctctcaagaaaactgctattttgattcagagaaaatatcgggcacatctttgtacaaagcatcacttacagttccttcaggtacaaaatgcagttattaaaatccagtcatcatacagaagatggatgataaggaaaaggatgcgagagatgcacagggctgctactttcatccagtctactttcagaatgcacagattacatatgagatatcaggctttgaaacaggcctccgttgtgatccaacagcaataccaagcaaatagagctgcaaaactgcagaggcagcattatctcagacaaagacactctgctgtgatccttcaggctgcattcaggggtatgaaaactagaagacatttgaagagtatgcattcctctgcaacccttattcagagtaggtttagatcattactggtgaggagaagattcatttccctcaaaaaagctactatttttgttcagaggaaatatcgagccaccatttgtgccaaacataaattgtaccaattcttgcacttaagaaaggcagccattacaatacagtcatcttacagaagactgatggtaaagaagaagttacaagaaatgcaaagggctgcagttctcattcaggctactttcaggatgtacagaacatatattacatttcagacttggaaacatgcttcaattctaattcagcaacattatcgaacatatagagctgcaaaattacaaagagaaaattatatcagacaatggcattctgctgtggttattcaggctgcatataaaggaatgaaagcaagacaacttttaagggaaaaacacaaagcttctatcgtaatacaaagcacctacagaatgtataggcagtattgtttctaccaaaagcttcagtgggctacaaaaatcatacaagaaaaatatagagcaaataaaaagaaacagaaagtatttcaacacaatgaacttaagaaagagacttgtgttcaggcaggttttcaggacatgaacataaaaaaacagattcaggaacagcaccaggctgccattattattcagaagcattgtaaagcctttaaaataaggaagcattatctccaccttagagcaacagtagtttctattcaaagaagatacagaaaactaactgcagtgcgtacccaagcagttatttgtatacagtcttattacagaggctttaaagtacgaaaggatattcaaaatatgcaccgggctgccacactaattcagtcattctatcgaatgcacagggccaaagttgattatgaaacaaagaaaactgcaattgtggttatacagaattattataggttgtatgttagagtaaaaacagaaagaaaaaactttttagcagttcagaaatctgtacgaactattcaggctgcttttagaggcatgaaagttagacaaaaattgaaaaatgtatcagaggaaaagatggcagccattgttaaccaatctgcactctgctgttacagaagtaaaactcagtatgaagctgttcaaagtgaaggtgttatgattcaagagtggtataaagcttctggccttgcttgttcacaggaagcagagtatcattctcaaagtagggctgcagtaacaattcaaaaagctttttgtagaatggtcacaagaaaactggaaacacagaaatgtgctgccctacggattcagttcttccttcagatggctgtgtatcggagaagatttgttcagcagaaaagagctgctatcactttacagcattattttaggacgtggcaaaccagaaaacagtttttactatatagaaaagcagcagtggttttacaaaatcactacagagcatttctgtctgcaaaacatcaaagacaagtctatttacagatcagaagcagtgttatcattattcaagctagaagtaaaggatttatacagaaacggaagtttcaggaaattaaaaatagcaccataaaaattcaggctatgtggaggagatatagagccaagaaatatttatgtaaagtgaaagctgcctgcaagattcaagcctggtatagatgttggagagcacacaaagaatatctagctatattaaaagctgttaaaattattcaaggttgcttctataccaaactagagagaacacggtttttgaatgtgagagcatcagcaattatcattcagagaaaatggagagctatacttcctgcaaagatagctcatgaacacttcttaatgataaaaagacatcgagctgcttgtttgatccaagcacattatagaggatataaaggaaggcaggtctttcttcggcagaaatctgctgctttgatcatacaaaaatatatacgagccagggaggctggaaagcatgaaaggataaaatatattgaatttaaaaaatctacagttatcctacaagcactggtgcgtggttggctagtacgaaaaagatttttagaacagagagccaaaattcgacttcttcacttcactgcagctgcatattatcacctgaatgctgttagaattcaaagagcctataaactttacctggctgtgaagaatgctaacaagcaggttaattcagtcatctgtattcagagatggtttcgagcaagattacaagaaaagagatttattcagaaatatcatagcatcaaaaagattgagcatgaaggtcaagaatgtctgagccagcgaaatagggctgcatcagtaatacagaaagcagtgcgccattttctcctccgtaaaaagcaggaaaaattcactagtggaatcattaaaattcaggcattatggagaggctattcttggaggaagaaaaatgattgtacaaaaattaaagctatacgactaagtcttcaagttgttaatagggagattcgagaagaaaacaaactctacaaaagaactgcacttgcacttcattaccttttgacatataagcacctttctgccattcttgaggccttaaaacacctagaggtagttactagattgtctccactttgttgtgagaacatggcccagagtggagcaatttctaaaatatttgttttgatccgaagttgtaatcgcagtattccttgtatggaagtcatcagatatgctgtgcaagtcttgcttaatgtatctaagtatgagaaaactacttcagcagtttatgatgtagaaaattgtatagatatactattggagcttttgcagatataccgagaaaagcctggtaataaagttgcagacaaaggcggaagcatttttacaaaaacttgttgtttgttggctattttactgaagacaacaaatagagcctctgatgtacgaagtaggtccaaagttgttgaccgtatttacagtctctacaaacttacagctcataaacataaaatgaatactgaaagaatactttacaagcaaaagaagaattcttctataagcattccttttatcccagaaacacctgtaaggaccagaatagtttcaagacttaagccagattgggttttgagaagagataacatggaagaaatcacaaatcccctgcaagctattcaaatggtgatggatacgcttggcattccttattagtaaatgtaaacattttcagtatgtatagtgtaaagaaatattaaagccaatcatgagtacgtaaagtgatttttgctctccgtgtacaacttttaaaatctgactttgttttaaaaaaacataaactgttcattacattcttcatttttatcatttatagttttatgcatgtaataaactaatatgtcataagatgaaaaaaaaaaaaaaaaaaa

SEQ ID NO: 4600 - DNA, 2665 bp, Homo Sapiens
  NM_018137
agaagcccccgtttcctggagcccgcgccgtgccgcgctacgcccgccgggagccgggcagagcggccaagatgtcgcagcccaagaaaagaaagcttgagtcggggggcggcggcgaaggaggggagggaactgaagaggaagatggcgcggagcgggaggcggccctggagcgaccccggaggactaagcgggaacgggaccagctgtactacgagtgctactcggacgtttcggtccacgaggagatgatcgcggaccgcgtccgcaccgatgcctaccgcctgggtatccttcggaactgggcagcactgcgaggcaagacggtactggacgtgggcgcgggcaccggcattctgagcatcttctgtgcccaggccggggcccggcgcgtgtacgcggtagaggccagcgccatctggcaacaggcccgggaggtggtgcggttcaacgggctggaggaccgggtgcacgtcctgccgggaccagtggagactgtagagttgccggaacaggtggatgccatcgtgagcgagtggatgggctacggactcctgcacgagtccatgctgagctccgtcctccacgcgcgaaccaagtggctgaaggagggcggtcttctcctgccggcctccgccgagctcttcatagcccccatcagcgaccagatgctggaatggcgcctgggcttctggagccaggtgaagcagcactatggtgtggacatgagctgcctggagggcttcgccacgcgctgtctcatgggccactcggagatcgttgtgcagggattgtccggcgaggacgtgctggcccggccgcagcgctttgctcagctagagctctcccgcgccggcttggagcaggagctggaggccggagtgggcgggcgcttccgctgcagctgctatggctcggcgcccatgcatggctttgccatctggttccaggtgaccttccctggaggggagtcggagaaacccctggtgctgtccacctcgccttttcacccggccactcactggaaacaggcgctcctctacctgaacgagccggtgcaagtggagcaagacacggacgtttcaggagagatcacgctgctgccctcccgggacaacccccgtcgcctgcgcgtgctgctgcgctacaaagtgggagaccaggaggagaagaccaaagactttgccatggaggactgagcgttgccttttctcccagctacctcccaaagcagcctgacctgcgtgggagaggcgtagcgaggtcggaggggaaagggagatcccacgtgcaagtagggggaatatctcccccttttccctcatagcctctagggagggagagtgacttcattctccatttgaagagattcttctggtgatgtttacttaaaaagtgatccccctcaacaacggatacagcgtgcttattattgggcatttagcctcaaaagcatgtagtaccaagcacttgtatttccgtatattttgtttcgcgggggagtgagggggaagaacacggatgaaaatgtcagtttttgaagggtccatgcacatccctgacacctcacaccttatctaagtctgaagctggggagaaaggggttcatttagacttcatacatttccagtacgactttagtatctctccagagccatattttctcagtccgaattaattccccctccctaggtgcctgtaggctatggtacttcttcctcattgttttctaggtaaacttcactactggtaattaaggggaaggatatgaggaagcagtttaaatagccctgttctcattactctgaccacatacatcatagggtgctaaagttgatgaacacattaatccgttaagtaaaatggactttgtaattgtacagcatacctaagaaactcagaaggtgcatttaagagagagacctgaaagaaatagtatggatttttaaaaattcttgtctctactattataaccaaaaaatatttcttgtatgtcccataaaaatatttgtgtaattcttatgaaacaggctggtagaggaggtttctgagcctagcccaagggcttattcatcaccatgggtaaattatttaaactcacttaattaaggaaaatattttcccagctagaaaagtatactcattctcatttaaactctctcatttggagggatcatgtgagttggcctacttacaagtagtgaaagttcccttttcagttttgttttgttttgttttgtttttctctttcactcagccaaatgtgaaagttgtgaatttaggaaaatcacttgtaatgaagtgtgaatcttgttatcaaatttatttctctgatgtttccttccttatccttgtagccaataaaacattgacattctcacgttttatagatgaggtaaaaagtcttgtgtgctgtgagttataatgcttttgcctttttaatattattagttcttaagtgttacagccccttcagaatataacttcaggacaattcaaactatgcttaatgtatgattttcgagcttctgtatgctaagaaaataggtgtgaaaaactggtgttctgaaatagcctaacatttattgtaattctgaattttctgcccttttattcattgcatattaaagtattagagtataaaaactaaaaaaaaaaaaaaaaa

SEQ ID NO: 4601 - DNA, 2729 bp, Homo Sapiens
  NM_018138
aggagggtgaggggcgggcccagcgagcggacgccgggcgcggcggcgcgcggagaagtgcggcggagcggcgcctgcattagcaggtatgcaaagaagccttttcaccctgatgtccttagagataatatggatcagtccagagttctcctctgggtgaaagcagaaccctttatagtgggtgccttgcaggtcccccctccatccaagtttagtcttcactatctcaggaagatatccacctatgtgcaaatccgggccacagaaggagcttacccgcgcctctactggtctacatggaggcacatcgcttgtgggaagctgcagttggccaaggacctggcgtggctttacttcgaaatatttgatagtctttcaatgaagacacctgaggagcgcctggaatggtctgaggttctgtccaactgcatgtctgaggaggaagttgaaaagcagagaaatcagctttcagtggacacgctacagtttctgctcttcttatacattcaacagttgaacaaggtctccctaaggacatctttgattggcgaagagtggcccagtcccagaaacaaatctcagtctcctgacctgactgaaaaatctaattgtcataataagaactggaatgattacagtcaccaagcttttgtctatgatcatctgtctgatctcctcgagctgcttttagatccaaaacaactcactgcatcatttcattcaacccatagtagtctagtgtctcgagaagctgttgtggcgctcagcttccttattgaaggtacaataagtagagccaggaagatctatccacttcatgaacttgcactgtggcaaccactgcatgcagatagtggcttctcaaagatctctaagactttctctttctacaaactggaaacctggttgaggtcctgtttgactgggaatccatttggtacatcagcttgcctcaagtctggaaagaaattggcttgggctcatcaagttgaagggaccaccaaaagagctaagattgcttgtaatactcatgtggcccctaggatgcaccgactggtagtgatgagccaggtttacaagcagacactggctaagagctcagacactctggcgggggcacatgtaaagattcatcgttgcaacgaatcttttatatatctgctctctcccttacgatctgtgacaattgagaagtgcaggaatagcatctttgtcttgggccctgtagggactacacttcacctccacagttgtgacaatgttaaagtcattgctgtttgccatcgtttgtccatctcttctacaacaggttgcatctttcacgttcttacgcctacacgcccacttattctctctgggaaccagacagtaacttttgccccttttcatacacattacccaatgctagaggaccatatggccaggactggccttgctacagtgcctaactattgggataatccaatggttgtgtgcagagagaacagcgacacaagagtcttccagcttttaccaccttgtgaattctatgtatttattattccctttgaaatggaaggggacacaacagagatacccgggggtcttccatctgtatatcagaaagcactgggtcaaagagaacagaagatacagatctggcagaaaactgtgaaggaggctcatttgacaaaggatcaaaggaagcagttccaggtactggtagagaacaagttttatgaatggttgattaatacaggacatcgccaacagctggacagccttgtaccccctgcagcaggctccaaacaagcagctggataaggatcttacatgcagacactgggccctggaaatacaaggataaatggaggatggtgctcatcttgaaacttgaaactaaattgggaaggtgctattgctgcttaagagacattgggacttttctgtctttttttttttttttttttgaggcagagtcttgttctgtcgcccaggctggagtgcagtggcgcgatctcggctcactgcaagctctgcctcccgggttcacgccattctcctgcctcagcctcctgagtagctgggactacaggcgcccgccaccacgcccggccaattttttttgtatttttagtagagacggggtttcaccgtgttagtcaggatggtctcgatttcctgacctcgtgatccgcccatctcggcctcccaaagtgctgggattacaggcgtgagccaccgtgcccagccttctgttctatttaagaactttgatttccattccattttcatttattactgtttaggccgaattttcgctaaacttctgactttcatataaacatattgcttatagaacatcagaagactcgtctttgtgatgcccaaatgaaaaagttggtgaaggtagtaccattgtatgtatgttaatattaaagcaactgagtgtagatttgcaactatagtgtgtatcttcatttgtgtgatgaaagagttttattctttctagagttaaataagagttttatagttctttgtaactatttaaaaggaaattgctactccttttaaaaaataattggaaaggaagtatgatttgttggtatatagacatagaaatagttttatactatattttagtccttaaagtatggaacttaatgaaattgtttaaaaaaatctttatttttcacttcctgcttcaaattttcaataaacaaactctaaagaaaaaaaaaaaaaaaaaa

SEQ ID NO: 4602 - DNA, 2976 bp, Homo Sapiens
  NM_018139
cccagaaactctgaggcggatcccccaacccagtgtcagactgatcgcctttggcccgagggcgaggagccacaggacagtatggccaaagcggcggcctcctcgtcgctggaggacttggacctgagcggagaggaggtccagcggctcacctccgccttccaggacccggagttccggcgaatgttctcccagtacgccgaggagctcaccgacccggagaaccggcggcgctacgaggcggagatcaccgcgctagagcgtgagcgcggggtggaagtgcggttcgtgcacccggagcccggccatgtgctgcgcaccagcctggacggggcgcggcgctgctttgtgaatgtctgcagcaacgcgttggtgggcgcgcccagcagccggcccggctccggtggcgaccggggcgcagctcctggcagccactggtccctgccctacagcctggcgcccggccgcgagtacgcggggcgcagcagcagccgctacatggtctacgacgtggtcttccatccagacgcgcttgcgctggcccggcggcacgagggcttccgccagatgctggacgccacggccctggaggccgtcgagaagcagttcggcgtgaagctggaccgcaggaatgccaagaccctgaaggccaagtataaggggaccccagaggctgcggtgctgcgcacgcccctgcccggggtcatccccgcaaggcctgacggggagccgaagggtcctctcccggacttcccctacccttaccagtacccggcagcccccgggccccgggcgccctcccctccggaagcggccttgcagcccgcccccaccgagcctcgctacagcgtggtgcagcgccaccacgtggacctccaggattaccgctgctccagggactcagccccgagccccgtgccccatgagctggtgatcaccatcgaactgccgctgttgcgctcggccgagcaggcggcgctggaggtaacgagaaagctgctgtgcctcgactcgaggaaacctgactaccggctgcggctctcgctcccgtacccagtggacgatggccgcggcaaggcacaattcaacaaggcccggcggcagctggtggttacgctgccagtggtgctgccggccgcgcgccgggagcccgctgtcgccgtcgccgccgccgcgccggaagagtccgcggaccggtccggaactgacggccaggcctgcgcttccgctcgcgagggggaggcgggacccgcgaggagtcgcgcggaggacggaggccacgatacctgcgtggctggggctgcgggctccggggtcaccaccctgggcgacccggaggtggcgcctccgccggccgcagctggagaggagcgtgtccccaagccgggggagcaggacttgagcaggcacgcggggtcaccgccgggcagcgtggaggagccatctcctggaggagaaaactcacctggtggcggaggctccccttgtttgtcctcccggagcctggcgtggggttcttctgcgggaagagagagtgcgcgcggagatagcagtgtggaaacacgcgaggagtcggagggcacgggcggccagcgctcagcctgcgccatgggtggtcccgggaccaagagcggggagcctttgtgtcctccgttactgtgtaatcaggacaaagaaaccttgactctgctcattcaggtgcctcggatccagccgcaaagtcttcaaggagatttgaatcccctctggtacaaattacgcttctccgcacaagacttagtttattccttctttttgcaatttgctccagagaataaattgagtaccacagaacctgtgattagcatttcttcaaacaatgcagtgatagaactggcaaaatctccagagagccatggacattggagagagtggtattatggtgtaaacaacgattctttggaggaaaggttatttgtcaatgaagaaaatgttaatgagtttcttgaagaggtcctgagctctccattcaaacagtctatgtccttgaccccaccattaattgaagttcttcaagttactgataataagattcaaattaatgcaaagttgcaagaatgtagtaactctgatcagctacaaggaaaggaggaaagagtaaatgaagaaagtcatctaactgaaaaggaatatatagaacattgtaacacccctacaactgattctgattcatctatagcagttaaagcactacaaatagatagctttggtttagttacatgctttcaacaagagtctcttgatgtttctcaaatgatacttggaaaatctcagcaacctgagtcaaaaatgcaatctgaatttataaaagaaaaaagtgctacttgttcaaatgaggaaaaagataacttaaacgagtcagtaataactgaagagaaagaaacagatggagatcacctatcttcattactgaacaaaactacggttcacaatatacctggattcgacagcataaaagaaaccaatatgcaggatggtagtgtgcaggtcattaaagatcatgtgaccaattgtgcattcagttttcagaattctttgctatatgatttggattaattctatataattttggacttttaaatattaaggttaaaaaatacctgtatctaaaattgattctgttaactgttgtcttaaaactaaaggtattaaagtataaaattaaaatttgcaattttttttaaaaaattgcaattttgattctcatgggggaaattggagataatttttttttttttgcctctggagtttaaagtttccttatggagataagttttgtgattcctgtaatagatgtgtatgttttctatttgagagttaaaacatttgagagttaaaacatttagttttaatacaacctatgtatatatacttctgtgttaaattttgctttgtcattaataaaatttaaaaatattcactaaaaaaaaaaaaaaa

SEQ ID NO: 4603 - DNA, 2167 bp, Homo Sapiens
  NM_018141
gccgctgtaaccccggaagcaatcctgagaggtcgggaccggcaagatggcggcgcggacagcgttcggtgctgtgtgccggcgcctctggcagggattggggaatttttctgtaaacacttctaagggcaatacagccaaaaatggtggcttgcttctcagtaccaatatgaagtgggtacagttttcaaacctacacgttgatgttccaaaggatttgaccaaacctgtggtaacaatctctgatgaaccagacatattatataagcgcctctcggttttggtgaaaggtcacgataaggctgtattggacagttatgaatattttgctgtgcttgctgctaaagaacttggtatctctattaaagtacatgaacctccaaggaaaatagagcgatttactcttctccaatcagtgcatatttacaagaagcacagagttcagtatgaaatgagaacactttacagatgtttagagttagaacatctaactggaagcacagcagatgtctacttggaatatattcagcgaaacttacctgaaggggttgccatggaagtaacaaagacacaattagaacagttaccagaacacatcaaggagccaatctgggaaacactatcagaagaaaaagaagaaagcaagtcataaagcctcagggaggccatttttgcctaaatttgaaatgagggtgggccagatgagtatgtttaagtggagagtgcttccagctgagatgatttgagtctgccctaactgctccattgagttctcgtgccctcatcagctgagggcagggaatggaactttaatggaagaaccacttttatctattctttttattcattgtttcagttctgatttcagcaaacatgagcaaaccactttgactgaaagcagaaagagtgaaaattctattttgttacgctactggtgttcaattattagtttgtaccatttttaatttatgtcagttgatgcatctgaaaataagtgcttggagtgttcgtacccttatttttttttaagattcctagaaggaatctttggttaattcagattgagcagttaaagtttttgctatttacctttgtgcaggctggcatatgctaatttgggggtggtaaccaaccgattttatctcatgtaagcattacattttgaagactgaatatacttcacagcagatcaaacacatttatggcatgcactgacctcttcttggagcccagaactttatagagttgcctaccagggttactgtaatggaatttatgatcttaagaaattactagttgtattatttatcctatgattcattcattcaataagcttttactgcataaactttacatccagcactgtagttaagtacccaaaattgaatagaaataatggcttttgaaaatcgcacaaagcaggccaggcacggtggctcacgcctgtaatcccagcattttgggaggccgaggcaggcggatcacgaggtcaagagatccagaccatcctggctaacacggtgaaaccccgtctctaataaaaatacaaaaattagctggacatggtggcacgtgcctgtaatcccagctactcaggaggctgaggcaggagaattgcgtgaacccgggcccggtggaggctgcagtgagacgagatcgcgccactgcactccagcctggcgacagagcgagacgccgtctcaaaaaaaaaaaaagaaaattgtgcaaagcataggtaaatatttttctttattaagcttctcactgagaagccctctttattttggtaaatgtcactctgtttgttaggagatgtctgcttttccatgaaatgaaatagtggctaaagccctgaaagaggcaagactacaatgggctgaaacagttggtatagcaaccccagagaagtgcttcattttctttttatagtagaagcaggtccatgtcttttgtggtttcctgcacatctttggagtagttatgacttctcagtttttccccccttaaactgcattgcctattcttttttcctgacatgctatcaggtatcagtgtgttgaatacatactgcttgtgtatcagacttacgttactgtcatcaccattaaaagaattgcagctttgtgccccatgaccttcaaaaaaaaaaaaaaaaaaaaaaaaaaaa

SEQ ID NO: 4604 - DNA, 2539 bp, Homo Sapiens
  NM_018142
tgcgcctccagacatgcgcagtagcctcccccgcggtggcggcggcggcggcggtggctgccgtggcggctgagagtccagagccggacgttccggccgcttcgggctggcggctggagagcgctcgggtcatgtctgcccagggggactgcgagttcctggtgcagcgagcccgggagttggtgccgcaagacctgtgggcagccaaggcgtggctgatcacggcccgcagcctctacccggcagactttaacatccagtatgagatgtacaccatcgagcggaatgcagagcggaccgccaccgccgggaggctgctgtacgacatgtttgtgaatttcccagaccagccggtggtgtggagagaaatcagcattattacatcagcattaaggaacgattcacaggacaaacaaacccaatttttaagaagtttatttgaaactcttcctggtcgggtccagtgtgaaatgttactaaaggtcacggaacaatgcttcaacacgttagaacgatcagaaatgttgcttctacttttgaggcgcttccctgaaacggtggtgcagcatggggttggccttggggaggcactattagaggctgaaactattgaagaacaagaatctccagtgaactgctttagaaaattatttgtttgtgatgtccttcctctaataattaacaaccatgatgttcgattacctgccaatttattgtataagtacttgaacaaagcagctgaattttatatcaattatgtcactaggtctactcaaatagaaaatcagcatcaaggcgcccaggatacatctgatttaatgtcacctagcaaacgtagctctcagaagtacataatagaagggctgacggaaaaatcatcccagatcgtggacccttgggagaggttgtttaagattttgaatgttgttggaatgagatgtgaatggcagatggataaaggaagacgaagctatggagatattttgcatagaatgaaggatctctgcagatacatgaacaactttgatagtgaagcacatgcaaaatataaaaaccaagtggtgtattccaccatgctggtcttctttaagaatgcattccagtatgtcaacagcatacagccatctctcttccaaggtcctaatgccccgagccaagttccactggttcttcttgaagatgtatcgaatgtgtatggtgatgtagaaattgatcgtaataaacacatccataaaaagaggaaactagctgaaggaagagaaaaaaccatgagttcagacgatgaagactgttcggcgaaaggaagaaatcgtcacattgtagtcaataaagccgaacttgctaactccactgaagtgttagaaagctttaaattggccagggagagctgggagttgctctattccctagaattccttgacaaagaatttacaaggatttgcttggcctggaagacggatacttggctttggttaagaatcttcctcactgatatgatcatctatcagggtcaatataaaaaggcgatagccagcctgcatcacttagcagctctccagggatccatttctcagccacagatcacagggcaggggaccctggagcatcagagggcgctcatccagctggcgacgtgccactttgcgctaggggagtacagaatgacatgtgaaaaagtccttgatttgatgtgctacatggtactccccattcaagatggaggcaaatcccaggaggaaccctcgaaagtaaagcccaaatttagaaaaggttcggatctgaagctcctgccttgtaccagcaaggctatcatgccatactgcctccatttaatgttagcctgttttaagcttagagctttcacagacaacagagacgacatggcattggggcatgtgattgtgttgcttcagcaagagtggccacggggcgagaatcttttcctgaaagctgtcaataaaatttgccaacaaggaaatttccaatatgagaattttttcaattacgttacaaatattgatatgctggaggaatttgcctacttgagaactcaggaaggtgggaaaattcatctggaattactacccaatcaaggaatgctgatcaagcaccacactgtaactcgaggcatcaccaaaggcgtgaaggaggactttcgcctggccatggagcgccaggtctcccgctgtggagagaatctgatggtggttctgcacaggttctgcattaatgagaagatcttgctccttcagactctgacctgagtggagacctttccaccagacacagctcgggcctgtgtaattgtaggagaagacactcagcagtgattgccatggcacagagccgtggtcattgttgctgttacaaagaagaaaaccatctgagttctaactccttggttgcttaaaagtagttcccaagagtctgagaagctatttctatttttaagagtcattttttgtaatttttgtaaaacaaaagtaccaatctgttttgtaaataaaaatcatcctaaaatttgaagtttttaaaaaaa

SEQ ID NO: 4605 - DNA, 1815 bp, Homo Sapiens
  NM_018146
gccgtcacgcgcaccgtacagcccagtccacgaagggcgccacgggccgtgacgtcactagccgccgacggcgcgctttcgtgacgcagcccgggtctcagggaacatggcggcgctggtgagacccgcgaggtttgtcgtgcgaccgttgctgcaggtggtccaggcttgggaccttgacgcgaggcgctgggtccgggcgctgcggcggagcccagtgaaagtggtgtttccttccggagaggtggtggaacagaagcgcgctcctgggaagcagccccgcaaggcaccatctgaggccagtgcccaggagcaacgagagaaacaaccgctcgaggagtccgcatcccgcgctcccagcacctgggaagagtctgggcttcgctacgataaagcttatcccggggacaggaggctgagcagtgtaatgacaatagtaaagtccaggccatttcgggaaaaacaagggaagatcctgctggaaggtcgcaggctcatttcagacgctctcaaggctggagctgtgccaaaaatgttcttctttagccgtctagaatacctaaaggagttgccagtcgataagctgaaaggtgtcagcctcattaaggtgaaatttgaggatatcaaggattggtccgacctcgtaacgccacaaggaataatggggatttttgccaagcctgaccatgttaagatgacatatccaaagactcagcttcagcattcactgcctttattattgatttgtgacaatctccgtgaccctgggaacctggggacaattctgagatctgcagctggggcaggctgcagcaaagtgttactcaccaaaggctgtgtggatgcctgggagcccaaagtgctccgggcgggtatgggcgcacatttccggatgcccattatcaataatctggaatgggaaaccgtgcccaattacctgccccctgacactcgggtctatgtggctgacaactgtggcctttatgcccaggctgagatgtctaataaagctagtgaccatggctgggtgtgtgatcaacgagtgatgaagtttcacaagtatgaggaagaggaagatgtagaaaccggagccagtcaagattggctgcctcatgttgaggttcagagttacgactcggactggacagaggcgccggcagctgtggtgattggcggggagacctacggcgtgagcctggagtccctgcagctggccgagagcactggtggcaagaggctgctgatccccgttgtgcctggtgtggacagcctcaactcggccatggcggcaagcatcctgcttttcgaagggaaaagacagctgcgggggagggcggaggacttgagcagggacaggagttaccactgaggacgcagaagtgacttctgcttgaggacgtctgcagctcctcctacaccagcacactggtgggaggctggcggagtcagtgactatggcccccacgttcaggaggaaggtgtgatgccgtcatacagttacaggaaaaataagaacttcctcagaaagaacaggtccgaattcttcctgtcgcgtcactgattttgaggttcttttttctcttggtgacaataggtgacccacgtggctctgtgtgtttttaaaaattgtccaccaagaagcactttgtgcccagaaagttcctgaagcatcatcctggcagggaggcgcctgctccaccagctggtgggtgtttgtaatcgccaagcaccagctataggtcacagccacatcactcacagctgatcactggttggtggaaaataaactatgagcagcagaaaaaaaaaaaaaaa

SEQ ID NO: 4606 - DNA, 3025 bp, Homo Sapiens
  NM_018150
actgctccttctctcacgccaactgagtctcttgatctgtacatgcaatcccaggcagctcgcgaacacaaacccggggccagccgcctactgctgctgctgctgctgccgctgccgccgccgccgccgccgctgcctccgccggctctgcgaacccgggacttttcatgcaccacactctccgcctgcttccctccgtgtcctgaaaagtgcgaccgttctcccaaggaatttccacggcaagtcttaggagggaatgattccccagtaatattccctgccctgacccaaagtgctggttggcctccctcccagggaagactgcttcttgcgtaacgccggccacagaaagagactccgatggacttacaccgggcagccttcaagatggagaactcatcctaccttcccaaccctctggcatccccagcactgatggtcctggcatccacggctgaggccagccgtgatgcttccatcccttgtcagcagccacgaccctttggtgtacctgtctcagttgacaaggacgtgcatattcctttcaccaacggttcctatacctttgcctctatgtaccatcggcaaggtggggtgccaggcacttttgccaatcgtgatttccccccttctctactacacctccaccctcaatttgctcccccaaatctagattgcaccccaatcagtatgctgaatcatagtggtgtgggggctttccggccctttgcctccaccgaggaccgggagagctatcagtcagcctttacgccggccaagcgacttaagaactgccatgacacagagtctccccacttgcgcttctcagatgcagatggcaaggaatatgactttgggacacagctgccatctagctcccccggttcactaaaggttgatgacactgggaagaagatttttgctgtctctggcctcatttctgatcgggaagcctcatctagcccagaggatcggaatgacagatgtaagaagaaagcagcggcattgttcgacagccaggccccaatttgccccatctgccaggtcctgctgaggcccagtgagctgcaggagcatatggagcaggaactggagcagctagcccaactgccctcgagcaagaattcccttctgaaggatgccatggctccaggcaccccaaagtccctcctgttgtctgcttccatcaagagggaaggagagtctccaacggcatcaccccactcatctgccaccgatgacctccaccattcagacagataccagacctttctgcgagtacgagccaaccggcagacccgactgaatgctcggattgggaaaatgaaacggaggaagcaagatgaagggcagagggaaggctcctgcatggctgaggatgatgctgtggacatcgagcatgagaacaacaaccgctttgaggagtatgagtggtgtggacagaagcggatacgggccaccactctcctggaaggtggcttccgaggctctggcttcatcatgtgcagcggcaaagagaacccggacagtgatgctgacttggatgtggatggggatgacactctggagtatgggaagccacaatacacagaggctgatgtcatcccctgcacaggcgaggagcctggtgaagccaaggagagagaggcacttcggggcgcagtcctaaatggcggccctcccagcacgcgcatcacacctgagttctctaaatgggccagtgatgagatgccatccaccagcaatggtgaaagcagcaagcaggaggccatgcagaagacctgcaagaacagcgacatcgagaaaatcaccgaagattcagctgtgaccacgtttgaggctctgaaggctcgggtcagagaacttgaacggcagctatctcgtggggaccgttacaaatgcctcatctgcatggactcgtactcgatgcccctaacgtccatccagtgttggcacgtgcactgcgaggagtgctggctgcggaccctgggtgccaagaagctctgccctcagtgcaacacgatcacagcgcccggagacctgcggaggatctacttgtgagctatctgccccaggcaggcctcgcctccagcagccccacctgcccccagcctctgtgacagtgaccgtctccctttgtacatacttgcacacaggttccccatgtacatacatgcacatactcaaacatgcgtacacacacacacatttacacacgcaggactctggagccagagtagaggctgtggcccaggcactacctgctggctcccacctatggtttgggggccatacctgttccagctctgttcccagggtggggcagggaggtgggggttgggggagtagtggggcacggctcctaagatccagcccccatactgacagacggacagacagacatgcaaacaccagactgaagcacatgtaatatagaccgtgtatgtttacaatgttgtgtataaatgggacaactcctcgccctctacctgtcccctccccctttggttgtatgattttcttcttttttaagaacccctggaagcagcgcctccttcagggttggctgggagctcggcccatccacctcttggggtacctgcctctctctctcctgtggtgtcccttccctctcccatgtgctcggtgttcagtggtgtatatttcttctcccagacatggggcacacgccccaagggacatgatcctctccttagtcttagctcatggggctctttataaggagttggggggtagaggcaggaaatgggaaccgagctgaagcagaggctgagttagggggctagaggacagtgctcctggccacccagcctctgctgagaaccattcctgggattagagctgcctttcccagggaaaaagtgtcgtctccccgaccctcccgtgggccctgtggtgtgatgctgtgtctgtatattctatacaaaggtacttgtcctttccctttgtaaactacatttgacatggattaaaccagtataaacagttgaaaaaaaaaaaaaaa

SEQ ID NO: 4607 - DNA, 2360 bp, Homo Sapiens
  NM_018153
atcatatttaaaatctgggacaaagaaccgtcgggacggaactccttccattgcaaaagctcggcgcggcctcgggagctgcccggcggccccggaccgaggcagccctcccctttaaaagaagcggaggacaggattgggatccttgaaacccgaaacccagaaacagcatcggagcggaaaccagaggggaaaccttgaactcctccagacaattgcttccggggagttgcgagggagcgagggggaataaaggacccgcgaggaagggcccgcggatggcgcgtccctgagggtcgtggcgagttcgcggagcgtgggaaggagcggaccctgctctccccgggctgcgggccatggccacggcggagcggagagccctcggcatcggcttccagtggctctctttggccactctggtgctcatctgcgccgggcaagggggacgcagggaggatgggggtccagcctgctacggcggatttgacctgtacttcattttggacaaatcaggaagtgtgctgcaccactggaatgaaatctattactttgtggaacagttggctcacaaattcatcagcccacagttgagaatgtcctttattgttttctccacccgaggaacaaccttaatgaaactgacagaagacagagaacaaatccgtcaaggcctagaagaactccagaaagttctgccaggaggagacacttacatgcatgaaggatttgaaagggccagtgagcagatttattatgaaaacagacaagggtacaggacagccagcgtcatcattgctttgactgatggagaactccatgaagatctctttttctattcagagagggaggctaataggtctcgagatcttggtgcaattgtttactgtgttggtgtgaaagatttcaatgagacacagctggcccggattgcggacagtaaggatcatgtgtttcccgtgaatgacggctttcaggctctgcaaggcatcatccactcaattttgaagaagtcctgcatcgaaattctagcagctgaaccatccaccatatgtgcaggagagtcatttcaagttgtcgtgagaggaaacggcttccgacatgcccgcaacgtggacagggtcctctgcagcttcaagatcaatgactcggtcacactcaatgagaagcccttttctgtggaagatacttatttactgtgtccagcgcctatcttaaaagaagttggcatgaaagctgcactccaggtcagcatgaacgatggcctctcttttatctccagttctgtcatcatcaccaccacacactgtagcctccacaaaattgcatcaggccccacaacagctgcttgcatggaatagcagagaataccgcctgctccctccggacagcacactcctgaaaacggggagagaggagccaaacatgctcggtttacactttccttatttactgaatgagtggagggcagagacaggcctggagttacgcacactgagtgccccaacatggaaagaaacatcaggagggacaggaaacgttccctccttaaccaacagttttcaagaccttactggaggcactttattggctacataatcactccatgcggtgggcatcaggcagaatcctggtgcagacccaactttgaggtggaggatttcacagtttctttattttgaacttcccccaggctcccactaattcctctccattctatcctcctccctttcccacaaaagaaaacagaaaggagcagcagtgtttgataccgtatcatccagaggcctggttctctcccattatagggcaaacaagccctggcaagatatttcactcccgccccatgccatgcattaaaaatccaaaattgcctatattccacctgccaagcaagagatgctttcattattgaagttccaaatgtatacctttgagaacagtgccttctcgtcttaaaagagaggtcctcattttgtgagttgggagcagagggaattaaagaaagccatgatgcagggatttggccattcaagccgggcagccttcagagaatgtcatccctaatgacacatgcccgaatgaaggagcggggctgagcttgtcctgccttcgtattgaatgttgcctgtctgcctccttaatagcgggcctctgtgtgagcatttgacaagacttaaaactattcattgaagaaaatggatgatcccccaacaggaagatgcaaccccatgggctgcctgcttgaccacagaagtgcttccagctccagttgctcatctgagaactccccccaccacttgctgttaaaattgttaaaattaaaggccatgttgattgattttttaaaaaaaaaaaaaaaa

SEQ ID NO: 4608 - DNA, 4674 bp, Homo Sapiens
  NM_018155
gcgctgcgtcgctttcagcctctggtgaagggcggcgcgcttaggcaggcggtggcgcggctggagtgccgcggggagggctgtgccggttgctttctgcagccgcatctcggccagctctcctcgccgtccccggggcgctgtgcgtctccagtccgggaccgaagccgcctgccgtagcgggcggccagatccgcgtcccgcctcagcggccggaggacatgcgggagagagaatgagccagagggacacgctggtgcatctgtttgccggaggatgtggtggtacagtgggagctattctgacatgtccactggaagttgtaaaaacacgactgcagtcatcttctgtgacgctttatatttctgaagttcagctgaacaccatggctggagccagtgtcaaccgagtagtgtctcccggacctcttcattgcctaaaggtgatcttggaaaaagaagggcctcgttccttgtttagaggactaggccccaatttagtgggggtagccccttccagagcaatatactttgctgcttattcaaactgcaaggaaaagttgaatgatgtatttgatcctgattctacccaagtacatatgatttcagctgcaatggcaggttttactgcaatcacagcaaccaaccccatttggcttataaagactcggttacagcttgatgcaaggaaccgcggggaaaggcgaatgggtgcttttgaatgtgttcgtaaagtgtatcagacagatggactaaaaggattttataggggcatgtctgcttcatatgctggtatatcagagactgttatccattttgttatttatgaaagtataaaacaaaaactactggaatataagactgcttctacaatggaaaatgatgaagagtctgtgaaagaagcatcagattttgtgggaatgatgctagctgctgccacctcaaaaacttgtgccacaactatagcatatccacatgttgtaagaacaagactacgtgaagagggaacaaaatacagatctttttttcagactctatctttgcttgttcaagaagaaggttatgggtctctttatcgtggtctgacaactcatctagtgagacagattccaaacacagccattatgatggccacctatgaattggtggtttacctactcaatggatagcagcacgaggactgctgtactgcaaaaaaagaagaccaaaagattacagtggaccatgggatacagaagccagcatggcagacagaagaaaaatagtttgggaacatgtaactattctaagtggaagttttgttgtaggaattatagtaatcacaccacattacttggcctttcggtaatgtgaaaaaaaaaaaaaacctcagagcctccaaggaaatgcctttagaagcactcctctctcaaaattgccattttctctaccatgtcccccagacacagttgggttttgttgatttatggcagtcttctaaacaaagccatccttaattttacatactgtattgtaactatccaaagatagtattggcagtcataaatttataacttctggcctttgtttaattccagtaaaataacagcaatgacaatgagatcgtcagtattattttcacatttccctgagaggacctggcacaatattttaaatttaattatttggcagtagtcactgtttttgacaaccaatgaaatagcgtctaaatatcttgtatattttttagcatcaaaatgttttggtttccactgctgacaggtgcttgttgtttagcctaatgtggatatttaaattgttaacataccaaacacacatggtaatagtttgggacaaaataactagtaaaatgttgatttctcggctatttcactgactgcggcatgtcctcgtgtcttctctgattttgtggtacatgaatgaatgcatttatctttttagtgacttactagttacgaacttgaattatcacctctttgtcatacttaagtatcatttacataaagtgtaaaagattttttcacttttgaatctttacctacttgctttcacattaagaatttgaacttttgagttttttccaggtctatatataatagattacatttattttgtaaagaaaatagtaatttaaagttttgccattttaaggtgacaatatttgggacagtataaatattatagacaagggcccccttgctgtctgctttagcaggtagtgacattaattgacttatagttttgtgtaaatgaacaaactgcttttgacaagaaatttattctgtcctagtttcctgcgtggtaaatcatagaaagattcaagttcatttgggttaaatgtgctaataggatgtagcttttaaattctgctattgagtcagctgtaccttttaatactttaaatgtgttatttgtatggcccttataaaggtgtttgctgtaattctgttaaaagacttcgcctatgccatactggtgtataaaaactgccgcaattggacgccggtgtggtactcatttcagtatacctgaactgtacattttgtgcaatggctttatctaaaagaatgacgcttcgtgaaagcactttgtggccttttttgggggggagggtgagagagtaggagagaataccatgttaagattaaaaaaaaaaacaaaaacattggtcatgtattaggcagaaacagtgttcataacatttttctgggttttaaatatgttgtttcggatatccttaatataaatgttttaggtattctgtgtaccctgtcgtacccccaacattatagaatattgcagcgtgtcattgcaagctttctctgctgtcaccagtgaaacatagtgccctgttaaattcccccactttaacttccttgtgatcaacagtaactggatgtttttgaggtgctcaattggaataaaaatattccaatctatttggagaccaaaggcaaaatcagttttcttacctttggaattattcgtaccttttatggtaaatttcagctttgacatgtattatgaggaacgtaccaaaaaccggtttgtaacaaatctgtagagaaggtctgaatctatcgtgtttgccttttcaggtgccatttctactgcctaatacagtgccatttgccttgtgaagacccataaacattcattgtgttgaatgtaagatagagactctccctagtcttactgatctcagtaccccacaaatgattaagaatgatatgaaaaccagcagctaaggaacatcttattatttagttgtagcatattcataacaagtgtccttcaaggataaacatatattctctatttgtatttagcaagtaaaacttgtgttgacctttagtgcattatattcagcttttaacagtattatgtatgtactggaaagcaaagaaatcttagagtcttggacattgtttatttgtgcaacaactagaaaggagcaatgaagtttatttcagttgtatttttccctaagcacaatctgcaatagtttatgtatgacagagataattcaaaaaggaaaactatatataaaagttgtatataaagtttgtctctgaaatatttctttgaagtttttaaaaaatcgactcatgtttaaaaacaaaaacacatattcagagcattggacttttttaacttgttttcatctgtttatcatgacttttttatttctggtgtagagtccacattatttagtttgttgtacttttaaatttcaaagttcaaatctgaagaattagcgtttgtgatttcgggataccatgcagtggttttaatcccaggaaaaaaactatcaccaaaagttcgtttgattctcattatgtaactttgtagaaccatcctttctagatgggtccaccacagtgaatttgtaactttgaagtcaggatagaatatcattagattatctgtgagatagcattactatgttaggaccagcagagtttgggttggtaaaaataatgtttgctctattactgggttacagacatttcagcatttttaggttggttttaaatcactaaaaatatttattcggatttgaaggatttaagtgctaaaaatcaatccatttcttgcccttcaataattgtccatgcctgccttttgttgtttacatgctcttctgcccagactgttagtaatctagggaccccctttggagctgataagtacagttcagccttttctcctcaaatatataatgactttaacattcctaagaatataggtatttctgaatgatttaaatttgaggaattttaatacataaaatacaatgtacaaactttctgcccactcagatctcttctccatcatgtacttagtatttcccattaacctacacactgatttttatgctactccttgtagaaacaaaattctggtttgactcagtttttgtgtttataaacttttggaatgtgtaccccgtttatgtgaagaattatgacctatcagtcatagctaaatagtgaacctcaaaagtgttaacttttgactattcatgtgaggtttggtatcttgcatttatgtacatggctgtaaattatgtgcatttactctgtatttatgttatctagctgacttttacttgaattgttcaaattttaaaaattaaaatacgctcatgaaaatatgaaaaaaaaaaaaaaaa

SEQ ID NO: 4609 - DNA, 4989 bp, Homo Sapiens
  NM_018157
aggacggagggagggaaagagggaaggaaggaagctgggaaggagcgagcgggggcgcgaggcgtttacctggaggcagcggcttgggcgcgcagagcggccgcggctcccccgcacctgcggccatggatgaggagcgcgccctctacatcgtccgggccggcgaagcaggggctatcgagcgggtcctgagggattacagcgacaagcatagggctactttcaaatttgaatcaacagatgaagataaaagaaagaaactctgtgaaggcatatttaaagtccttataaaggacatcccaacaacatgtcaagtgtcctgcctggaagtactccgcattctctccagagacaaaaaggttttagttcctgtgacaactaaggaaaatatgcagatactgctgcgactagccaagctaaatgagttagatgattctttggagaaagtatcagagttcccagttattgtggagtcattaaaatgtctgtgtaatatagtgttcaacagtcagatggcacagcagctcagcctggaacttaatcttgctgcaaagctctgtaacctcctgagaaagtgcaaggaccggaaatttatcaatgacattaagtgctttgacttgcgcttgctcttccttctgtcacttttgcacaccgacatcaggtcacaattgcgctatgagctccagggactaccgctgctaacgcagatcttggaaagtgcctttagcatcaagtggaccgatgagtatgaatcggccatagaccataatggacctcctctctcacctcaggagacagactgtgccattgaggccctcaaagctctcttcaatgtgacggtagacagttggaaggtgcataaagagagtgattctcatcagttccgtgtaatggcagctgtccttcgtcattgtttactaatcgtaggtccaactgaagacaaaacagaagagctacacagcaatgcagtcaaccttttaagcaatgttccagtctcttgtttggatgttctcatttgtccgttaacccatgaagaaacagcccaagaggcaacgactctagatgaactgcccagtaataaaacagctgagaaagaaacagttttgaaaaacaataccatggtatacaatggtatgaatatggaggccattcatgttttactgaattttatggagaagagaatagacaagggaagcagctatagagagggtctaactccagttctcagcttattaaccgaatgttcccgagcccatcgaaacatccgaaaatttctcaaagatcaggttttaccaccgttgagggatgtgacaaatcgacctgaagttggctcaactgtgagaaataagctggtgcgcctcatgacacatgttgaccttggagtcaagcaaattgctgctgaattcctttttgtcctttgcaaagagagagtggatagtctgctgaaatacactggctatgggaatgctgcaggactgttggcggccaggggcctcttggctggaggaagaggagataattggtactcagaggatgaggacacagacactgaagaatacaaaaatgcaaaaccaaaagaggagttgcttaaaccaatgggactaaaacctgatgggacaataacgcctttggaggaagcactcaaccagtactctgtcatcgaagagaccagctctgacacagactaaaagcatcacctgctcaactctcaatattgctttatcagcatcttttctctgtagctccaggggaatcttttctctaaaacatttatgcccttgctttggctagaaacacattaactggtttactcattgagaatccagcatatttaagaggtgaccctgtgttttttgtgatattgaggcattcatacagagctgcagttagacggggttacgggggctaaaagcagaaaaaaaattccatttcatcgggatggaactgaaggattttattctataaagcggccctggttgaatctggcaattctttttgccaagatccctagcagaagatttagccatgtccttcccctcacttgtgtgagtggccccttctgaatctctccagcagccagaggcacgtgagaagcagaaagagctggtaaataaagccttgggcaagcgacttcttagatcagaactcaccaaatggaagcctagcagctgctccataaacctagccccattcttcatatcaattttgtataaatatatagaaacacacacacagcctcagacttacaaactgattatactctaaaagtttgtatgtcagttagctaaaacttcagaatacatttctccctataaagagttataaatgatggtttagttctcaggcagctacaaatgcctatttattccctaatgtacctgaacactagtaccatagaactgaaccaccatctgtatcagcgcatggggagtgtgcattctgaggtctaacccggggtgccaggaacacacacatcctccatcccagcatagagaatggggactccctgagtaatgggagttctttcatggcctctgcttggggtgggggagtcagcagcacccatttgtacatataggtcattcatacatcacattttaaattggggactgtgtgtgctggtgtgtgtgtgagttctacgtttctaccatatgtgatcagtttaatagtaactttatttatttaaaaaaaagaaacacaattagttactgttaaactgataaagggtgtttatttttacttttagaattggtcctatgaagaagtagaaagtgagtcatgcactagacagtgggcctagctcatcagtggctaaagttgaaaaggggttggtttcctgtatatatatgtatgtatatacacacgtacatacattcatatatatacatatatacataatgtgcttaaccactgccttttaaaactttaaattaaataaaacattggggttgattcaatttggccatctgtgtgtgtttctttatagatacatgggctaaacaatactatttcacagtttatgcttttttaaagtgcttttacatccatggtcccacttctaatagcctttttaaggacaggtagagtacatggagggttactgaaaaggtcatttatccagaagttacctctctggcaaagcaaaaaaatcaggaattacgtcttaaaggcctttcagctgccagaggagatgtcacaaagtttcttgcaacttacttatgggagagatcttcaagaatatcactcttagactctgaactgaaatttgcatacgcttccaacatgttttattagctggctttgaagctcacaaaagaatggcaaagaaagaggctgctagattgaaggcaggcatactgaaagaagaaaaaggccaactgaaaactagatagtgagatgagaagaataaaacttcaagacatagcaaatctgggactgtctacttaccaaaggatactctagttgacccagaaaatgtgtgtacaacagtatggcccgtagactacttcctataatggtgaccctgagtttttttaaaagaagaaattaaatccagaacgctttataaaagggtaggaagaagacaatagatgttagaatttcatccaaaatgtttgagggagaggtgagtgacccaggttttaaccaacagcaaaagaaatgggcaattcataattttagattaagtgaaaagtttagaaaaaatttaagtatttttgttattctacaaatgcatttttaaagtatttttataatttctataatcaaatagctttggcatgcatgtcagcttacctaaatgaagatgtgtttaatgaaatgccatcttaccagctttctttatgcagagtaagtgtttgaacagtcctgtttcagtagctgtgctcttctgctttcagtgagttctgtttcattttgcatttctctgcactgggcactaagctttgtttttgaaaagagagtttgcggggaagaagatgagagtgtcttcatctggcacacagaaagagaactaatatctgttaagtgcttactacatgctgggcttttgatgtatgttatctcatgtaacctcaccttatcgcatatgaaagatcctctccagaaagcttatgaaagttaccccacgtcacagcaaggaagagtccaactctggtggcctgactcccagcaccactccttccttttccccacagcacacctgggcccacactgtgcctccttagggctctgaaatgctgggaacagagtggtgtgaggagggtggtcattctcaggccattttaagcaataactatttcaacagaactagtttaaagaggtttttaagcagggaagtgacctgaagtggaagtatgagtgggaaacttgcatggtcagcactggatttccaatgaagacctggaatccgttaggataggccagggaccaaggctgcaggctggcctctctgcccacaactctcctgaccttggaagcagggtacggaggcgtgtgtcctaaaataaagcatttgagctgctgctacagaggaacaatcaccagatattgtgaccctttcagatgcccagtagtcctgggaggcaggcagggcaggtgttattatcccttctttataaatgaggacacagaatgaggcagtacaagtgactctaaacacccccttagtgccacatcagtctcgccacctcccaggactaggtgtcacctgtattgacctcttcccctctgattataaaagtaatatatgttcattgtggaaagtttggaaaatgcagaaaataaaattaataatttaccccaaatcccaccatcctgagatcatcactgttaatgttttagtgtatttccttcctgtattttttctatgcatatataatttattttactacaagattgggatcatgctgtatttacagatttgtatcctgctttctttaacatattgtgagcattttcccatgtcaataaatattcttcaaaaagtaa

SEQ ID NO: 4610 - DNA, 2988 bp, Homo Sapiens
  NM_018164
gagtttttccaggggaaaccggcctgggtggagagacagagaaggggagaccgggtgggtgggtcgtacgcttagggggccgtggttggtacttcgctgttggggaggctttcaggtcgcccagatcctgcttcccaatgggtgactgggaaaattagcgggtggaaaatctcgaggggtggaggctttttttttcctccttggccccgccctcttcctgttcggcgactgggacgcctggccctacgagggggaagggaggcttggccgggctatcggagagcgctgtgcgcacgcgcgagcccgagtgcgtgtgtgtgtgtgcacgcgcacgcgcgctcctgctcttaggaagcctgggaaggaccggtgtgctaggagatgatcggggaaagcatagtcccctgtctgtggcaccagacactcccgactgtgcgctgactctccccgcccagccagcagccttttccagagaggctgtggtccatagcctctgttcgttttcactgcaggaccaggcacgaaagttaaaacaaaatgaagattttttctgaatctcataaaacagtgtttgttgtggatcactgcccttatatggcagaatcttgcaggcagcatgtcgagtttgatatgctggtgaagaatagaacccaaggaatcattcctttggcccccatatctaaatcattgtggacttgctcagtagaatcttccatggaatattgtagaataatgtatgatatatttcctttcaaaaagctggtgaattttattgtgagtgactctggagcacatgttttaaattcttggactcaagaagaccaaaatttacaggagctaatggcagcattagccgctgttgggcctcctaatcctcgggcagatccagagtgctgcagtattctgcatggccttgttgcagcagtggaaactctctgcaaaattactgaataccaacatgaggctcgtactctactcatggagaatgcagaacgtgttggaaatagaggacgaataatctgtattactaatgcaaaaagtgatagtcatgtgcgaatgcttgaagactgtgtccaggaaacgattcatgaacataacaagcttgctgcaaattcagatcatctcatgcagattcaaaaatgtgagttggtcttgatccacacctacccagttggtgaagacagccttgtatctgatcgttctaaaaaagagttgtccccggttttaaccagtgaagttcatagtgttcgtgcaggacggcatcttgctaccaaattgaatattttagtacagcaacattttgacttggcttcaactactattacaaatattccaatgaaggaagaacagcatgctaacacatctgccaattatgatgtggagctacttcatcacaaagatgcacatgtagatttcctgaaaagtggtgattcgcatctaggtggcggcagtcgagaaggctcgtttaaagaaacaataacattaaagtggtgtacaccaaggacaaataacattgaattacactattgtactggagcttatcggatttcacctgtagatgtaaatagtagaccttcctcctgccttactaattttcttctaaatggtcgttctgttttattggaacaaccacgaaagtcaggttctaaagtcattagtcatatgcttagtagccatggaggagagatttttttgcacgtccttagcagttctcgatccattctagaagatccaccttcaattagtgaaggatgtggaggaagagttacagactaccggattacagattttggtgaatttatgagggaaaacagattaactccttttctagaccccagatataaaatcgatggaagtcttgaggtccctttggaacgagcaaaagatcagttagaaaaacatacccgttactggcctatgatcatttcacaaaccaccatttttaacatgcaagcggtagttccattagccagtgttattgtgaaagaatctctgacagaagaagatgtgttaaactgtcaaaaaacaatatacaacttagttgatatggaaagaaaaaatgatcctctacctatttccacagttggtacaagaggaaagggccctaaaagagatgaacaataccgtatcatgtggaatgaattagaaacccttgtcagagcccatatcaacaactcagagaaacatcaaagagtcttggaatgtctgatggcatgcaggagcaaacccccagaagaggaagaacgaaagaaacgaggaagaaagagggaagacaaagaggacaagtcagagaaagcagtgaaagattatgaacaggaaaagtcttggcaagactcagagagattaaaaggaatcttagagcgtggaaaagaagaattggctgaagctgagattataaaagattcgcctgattccccagaacctccaaacaaaaaaccccttgttgaaatggatgaaactccacaagtggaaaaatcaaaagggccagtgtcgttattatccttgtggagtaatagaatcaatactgccaattccagaaaacatcaggaatttgctggacgtttgaactctgttaataacagagctgaactatatcaacatcttaaagaggaaaatgggatggagacaacagaaaatggaaaagccagccggcagtgaagagtgacttgaagaactaaatttagcatattgcaaaaatattttgtgcggaattcgatataagtacttttacagcaagatggtatagttatgttgcctggactggtttttacatttttaaaatatttcagctgtcatttttgtactaattataaaattggcacataattcaaaaatatacatttgagatgatttgtcctcccaaattatacaagtttattttatggtataaagtgttctctctggaaatgtttttaaaaaaattcttaggcttctctttgcgaaataaaactattaaaatatttgaaatgcaaaacaaaaaaaaaaaaa

SEQ ID NO: 4611 - DNA, 2568 bp, Homo Sapiens
  NM_018167
ctcctgctccgtctaggagtcaaaatggcggcgaggggaacctggagcagtcccggagcctgagccactgacaggagaggagagggcggcggcggcggcggtgggaggaggatggccgggggtgctggcgccggtgcggacggcggtgctggtggcggcggcggcggaggcgacggcagcggtcccagcggcagcagcagcggcgggaggagcctccgggaaatggatgaaaagaggctgctggatccagggttgaaggttcataaaggcctctgggattatactctgaagaacccgcagacggaatgcctgagtgactgaagaaaatgggtgctaatgcatctaattatcctcattcatgttccccgagggtagggggaaattcacaggcccaacagacttttatagggacctcatcctattctcagcaaggctatggttgcgaatcaaagttgtatagccttgaccatggccatgagaaaccacaagacaaaaaaaagagaacctctggtcttgccaccctcaaaaagaagtttattaagcgtcggaaatctaataggtctgccgatcatgccaagcagatgcgagaactcctctctgggtgggatgttagagatgtcaatgcattagtggaggaatatgagggaacatcagcattaaaggagctttctctacaagccagtttggctagaccagaagcccggacattgcagaaagatatggctgatctttatgagtacaagtattgtactgatgtagacttaatatttcaagaaacttgttttcctgttcatcgtgccattttggcagcaaggtgtccattttttaaaacactgctttcttcctcaccagagtatggggcagagataataatggacatcaatacagctggtattgatatgcccatgttttctgctttgttacactacctttatacaggagagtttggaatggaggactcaaggtttcaaaatgtcgatatccttgttcagcttagtgaagaatttggaacaccaaattcccttgatgtagatatgcgtggactctttgattacatgtgttattatgatgtcgtccttagtttttcttcagactctgaactggttgaagcttttggtggaaatcagaactgtttagatgaagagctcaaagcccacaaggctgttatttctgcacggtccccattttttcgaaatttattacaaaggaggatacgaactggtgaagaaatcacagaccgaactttgaggactcccacaagaattatattagatgagtccattataccaaaaaaatatgcaacagtgatattacactgtatgtataccgacgtggtggacctctctgttttgcactgtagcccctctgtggggagtctcagtgaagttcaggctctcgtcgcagggaagccaaacatgaccagggcagaagaagccatggaactttaccacatagcactgttcttggaatttaacatgcttgcacaagaggagactacagtcatcaggcctgcctgtgcagcagagctttcaaacagctgcttactgcctcaatcttaaatatgaaaacccatccaaggataactggacatttgaggaaagcttccaaattgagacagagatcagagcaaaaagaacaaagtcctggaggaagcagacaatgaagggagcagaagaaaacttcagtagaatcaaaatatccttatataaaagaactttttatggaatcagtgagacataagcaggatgctattaaagtaaaaacaggagcttttagaaataagatagcagaaatgaaagatataatggaagcattgaaaggtacagttgaggaaatctagaaagtaaataatataataaagagatgagtggagacaaataaaactagagtattcatccagggtctaacatctaacaaatagtggctttagaaatatataccagagaaaagtgaagagaagacagtatctaaggagtaatataagaaatatttccaaaactaaaggaatttctatataaaaagtttctttttcagaacactggggaaaaagagacaattttaaaatgttgcagggaggagaaaaattaggttccatgcaaagaaataggaatcagatggtattgagattttcagtagcaacaactgaataccacaatacagtgaagtagtgtcttccaaaagctgatggaaaattattttaaacacaaaatcctatatttagccaaacagtcaatcaagtgtaaggctaaataaaggcatttttcagtcatacctcgaaaaactgcctgtgtagggatatttcccctgcttccccactcaggcagctgctgggaatgtattccaccaaatgacgaagcaaaccaagaacaaagaagtgaaggatctagaaaatgggctccaacacgggaaggaagcaaagggagatcccacgcatcagccacacagtaggtcttgtgggcattcagtctagcccagaccgggagggtgaaagtctccaaggaaagaggtgtctcggaagaaatcaattactttcaatgtttgaacattaaatagcaaatgacaaagcaa

SEQ ID NO: 4612 - DNA, 6822 bp, Homo Sapiens
  NM_018177
gctagccttgcgcggcgcgggagagcgcagtggcgccggcgggaaagggctgcggacctgcggcgccgcgttgtgcgttcgacgacgcggcaccggcttcgacgccctctgcccgctccagaagcagtaagaagacatgttggataacaagaagaggtgtagagtttgcatatatcaactgtggccttaatgagcatgttgacagcatcgatgctagacagacagtctttttactgctggattgtgcaagatatttaaccctattttgtttgaattatgacttaaatgtcaaacatcttaactaagaaaagggaaacattttagttttggaagtcagaatgccaaggagaaggaaaaatcttgggggaaatccttttcggaagactgcaaaccctaaggaagttgtcgtatccagtgttgctagtcgtgaggagccaaccactactctaccttccatgggtgagacaaaagttgatcaggaagaactcttcaccagtatctcagagatattttctgatctggatcctgatgtagtgtatttgatgctttctgaatgtgatttcaaagttgaaaatgctatggattgtctattagaattatctgccactgataccaagatagaagaatcatcttcacaaagtttcgttgcttctgagaaccaagtaggtgcagcagaaagtaaaataatggaaaaacgtcctgaagaagagagtgaagattcaaaaatggattcatttttggacatgcagctaactgaagacctggattccttaatacagaatgcttttgagaaattgaactcttctcctgatgaccaagtatactcatttttgccttcacaagatgttaatagttttaatgactcaagtgagtttataaatcctgattcaagtaatatgactcccattttttctacacaaaatatgaatttgaacggtgaaaatttagagaattctggttctactttaagtttaaacccattaccttcacattcagttttgaacgagtccaagtgttttataaaggataacacattggctttggaaagtaactacccggaagattctcttctcagtagttctttaaatgtagcaagtgactccatcgcaggttgtagcagtctcaatcaaaaacagaaagaacttttagaatctgagtgcgttgaggctcaattctctgaagctcctgtagatttggatgccagtgaacctcaggcttgtttaaaccttccagggcttgatttaccaggtacaggtggggatcagaaatctactcgggtctctgatgtgtttctaccttccgaagggttcaacttcaagccacacaaacatcctgaactgccaactaaggggaaggatgtgagttactgcccggtacttgctcctctcccattgctgttgcctcctccgccacctccaccgatgtggaatccaatgattcctgcttttgacctcttccaaggaaaccatggctttgtagctcctgttgtaaccacagctgcacactggagatctgtcaactacacatttccaccctcagttatttctcacacttccccaacaaaagtatggagaaataaagatggaacaagtgcttatcaagtacaagaaaccccagtttctcaggttgtaagaaagaagacatcttacgttggactagttcttgttcttctcagaggtcttccgggatctggaaaatcttttttggcaaggactttgcaagaggataatccaagtggagtcattcttagtactgatgattatttttatataaatggacagtaccagtttgatgtaaagtacttaggagaagcacatgaatggaaccagaatcgtgcaaaagaagcatttgagaagaagatatctcctataattatagataatacaaacctacaggcatgggaaatgaaaccatatgttgctttgtctcagaaacacaaatataaagtcctttttcgggaaccagacacatggtggaagtttaaaccaaaggaacttgcaaggcgtaacattcatggggtaagcaaagaaaaaataacaagaatgttggaacattatcaacgttttgtttcagtgccaataattatgagttcttcggttccagagaaaattgaacgtattgagttgtgtgcatattcttgtgaggatagaagcactagcccaagagacgatgaagatattatctctgaaaaagaagaaaatattttatctttatctttgaagcatctagagttcactgaagagaagaatcttgatgtaaccaaagaaacaatgttacctgagaatgttgcatatctctctaatgcagatttaaacaaaagaagaaaagaaataagtgatatgaatcctagcattcaaagtgctttaattctggaaactccacacatgtatttttctgactctgaaagcaaactacaggcaacagacaaaagtgaaaacgagcaaatagaaatggtggctgtaaaagggtatagtaaaactgacacagatagttctatggagagagtatcacctagtacttgctgtagtgaaaataatcaagaagactgtgatcttgcaaatagtggaccacttcaaaatgaaaaatcctcacctggtgaaatagtggaagaaagagcaacagtaacgaaaaaagcctttgggaaacaaaaaagcaaatcgactttggaaaagttcccaagacatgagctatcaaattttgttggtgactggccagttgataagactattggtcagaggacaaaaaggaacagaaaaactgaaaaaacttcatccgtacaaagcgacaaaaagtataattaccctcagtcacacaaattagttaacagtgtatctgtgaatacagattgtgtccagcaacgaggatctccacatgaaagtgtagaggatggcagaaagtcacagtgtgatgatgcttcagagccactcaatagctataaatatgatgcttataaaaatattgacaaaaactcattcaacattatgggtgactggccttcatctgattctttagctcagagggaacacagatcaagaatgccaaagactggtttaagtgagcccaacctagaaattggaacaaatgacaaaatgaatgaaatatccttatctacagcacatgaggcctgttggggcacaagctctcaaaaactaaagacattgggtagctccaatctaggaagttctgaaatgctgctcagtgaaatgacctgtgagagtcagacttgtctaagtaaaaagagtcatgggcaacacacatcgttgcctcttacttttaccaatagtgcaccaactgtttctggagtagtagaaccacaaacgttagctgaatgtcaagagcaaatgcctaagagagaccctggaaaagaagtaggcatgtgcacccagactgaaccacaggattttgctcttttatggaaaatagaaaagaataaaattagcatttcagattctatcaaagtattaacaggaagattagatggatttaagccgaaagttttcaatattaacacaaaatcagacgttcaagaagcaattccatatagagtaatgtatgataaaagcacgtttgttgaagaaagtgagcttaccagtgcagatgaatctgaaaatcttaacattctttgtaaactgtttggatccttttcattagaagccctgaaagacttatatgagaggtgcaataaagatattatttgggccacaagccttttgttggattctgaaactaagttatgtgaggatacagagtttgagaatttccaaaaatcgtgtgatggatcacaaattgggcctttttctctggggttgaatttgaaagaaattattagccaaagaggaactttagagaattctaattctcctgtgccagagtttagccatgggattggtattagtaacgctgactcacagtctacttgtgatgcagaaagaggaaactcagagcaggcggaaatgagagctgtcactcctgaaaaccatgaatcgatgacaagtatatttcccagtgctgctgtgggtctaaagaataataatgacatacttcctaacagccaggaagaacttttatatagcagtaagcagtcctttccaggtattctaaaagctactactcctaaagatatgagtgaaacagaaaaaaacctagtagtcacagagactggagacaacatacattctccttcacatttctctgatatttttaactttgtatctagtacttcaaatcttgaattaaatgaagaaatttattttactgattctcttgaaataaagagaaatgaaaattttccaaaggattatgtgaaattttcagatgaagaagaatttatgaatgaagatgagaaggaaatgaaggaaattctaatggcaggaagtagtttatcagctggagttagtggggaagataaaaccgagatattgaatcccactccagcgatggccaaatctctgaccatagactgtctggaattggcattaccccctgaactggcttttcaacttaatgaattatttggtcctgttggtattgattcagggtctctaacagttgaagattgtgtggttcatatagatctgaatctggcgaaagtgattcatgagaaatggaaagaatctgtaatggagcgacaaagacaagaagaggtgtcttgtggcaagtttatgcaagatccttccttggttggacatactgggcttgataatcctgaacaaaaatcatctcagagaacaggcaaaaaattactgaagactttaacagcatctgaaatgctacctttattggatcattggaatactcaaactaaaaaagtatcactcagagaaataatgtcagaagaaattgccttacaggaaaaacataatttgaaaagggagacccttatgtttgaaaaagattgtgccactaaactaaaggagaagcagctctttaagatatttccagccattaaccaaaattttctggtggacattttcaaggaccacaactattcattagaacacacagtgcaatttcttaactgtgttcttgaaggggaccctgtaaaaacagttgtagcccaagagtttgttcaccaaaatgagaatgtcacatctcatactggccagaagtctaaagagaaaaagccaaagaaattaaaagagactgaagaaacaccaagtgaactgtctttccaggactttgagtacccagactatgatgactacagagcagaggctttccttcaccaacagaagaggatggagtgctacagcaaggccaaagaagcttatcggatagggaaaaaaaatgtcgccaccttttatgcccagcagggtactcttcatgagcagaagatgaaagaagccaatcaccttgctgccatagagatctttgagaaagtcaatgcttcgctgctgccacagaatgttttagacctccatgggctgcatgtggatgaagctctagaacatttgatgagagttttagagaagaagactgaagaatttaagcagaacggtgggaagccctatttgtctgtgattacggggagaggaaaccacagccagggaggagttgctcgcatcaaaccagctgtcattaagtacctcataagccatagcttcaggttctctgaaattaaaccagggtgcttgaaagtcatgctaaagtaaaataaacatccttgaattagaagtatgaaggtttgtaggttaaaattacttttatttgcagtaattcagtcaattctaccctaaagatgtgttttattataaataatattcaattatgaaacaaaaaaattatgatgtttttcaaaatgcaagtgaggtttgattttttactgaatcaaatgcaaatgttacctgttaaagatattacagagaaattttattgattacaaaatatgtaagaaaattatcagctacagttttaaagtttaaaatgctctgattgtttctcagaaaaggttacctttgtattaattgttgtatgacatttagtaatgtcctaaaagtcttttgtgagaggtatttaaagtgctttgagacctgattcatgccccccaaagggtggtattaaaagaggaaaaaggacatagtagtggtagtaaagaaaaaaaggagatctaacaaaaacacttgaatattttttattttcaaaactaaacacataaaatgcttttattttgccatatcctacaggaaggaagacatgcttttgccctttcttctgctttgtatatgaccttgatcttttaccttttgttctgttcttctgtgtgcattttatggaaagaaagttgggtctgagattatattgtaattttatactttctatagacagaaaggttttcagagaaaaagaaatggttaaatatcttccagatgttgctgccttatcgaaatgcttctagaactgtctgtataagtcgtatttcagacagtactaaatacttatattttatttttgaggcatgtaattttaaaactgcagtaggttaaaattctattaaacaaatatagaaaatattttgtttataattggcctggtgtggtggcccacgcctgtaatcccagcactttgggaggccgaggtaggtggatcgcctgaggtcagaagttcaagaccagcctggccaacatggtgaatccccgtctctattaaaaatacaaaaattagctgggtgtggtggcgtgtgcctgtaatcccagctacttgggaggctgaggcaggagaaccgcttaaacctgggaggtggaggttgcagtgacccgagatcgagatcacaccactgcactcagcctgggtgacagagcaagactccgtctccaaaaaaaaaaa

SEQ ID NO: 4613 - DNA, 3008 bp, Homo Sapiens
  NM_018184
gggtgccgacggcggcgccgggacgggcgtggggggtagggcgagtcatatgatccgctcggcttcctgggtctggctgctgccgcccgccggtgtccgcccgtgtcgcgccggggcaccaaggagccgttggagggtccgggcggaggcccgctcgtgtggaagtcgtcgacgccgccgctcgtccgtcctcccgtccgttctcgctcccggccgccatcatgctggcgctcatctcccgcctgctggactggttccgttcgctcttctggaaggaagagatggagctgacgctcgtggggctgcagtactcgggcaagaccaccttcgtcaatgtcatcgcgtcaggtcaattcagtgaagatatgatacccacagtgggcttcaacatgaggaaggtaactaaaggtaacgtcacaataaagatctgggacataggaggacaaccccgatttcgaagcatgtgggagcggtattgcagaggagtcaatgctattgtttacatgatagatgctgcagatcgtgaaaagatagaagcttcccgaaatgagctacataatcttctagataaaccacagttacaaggaattccagtgctagtgcttggaaacaagagagatcttcctaatgccttggatgagaaacagctaattgaaaaaatgaatctgtctgctattcaggatagagaaatttgctgctattcaatttcttgcaaagaaaaggataatatagatatcacacttcagtggcttattcagcattcaaaatctagaagaagctgaagcatctcctgaagtcttccagtccttcttggctataatcctagaattattgtccgttcctctgaagtaattcccagaatacggtccttcctaaaccccagaaattgcctttttcagagtttatttctcatgtgcactgctgaagatgaatatccctaatccttcataaagaatcagctagagttgtcatgataaagtcagcacacacaaaaaggcttcttacacatacctgtcttaaaccatgtgtagagctttaaaaacagaaaaaaaaccccatatacttatgaccatcttaaatcaagaaaattgcatatttccattctggtctttctgggccagatttttatattggttttcagtaaatgtctatctataatatttcattatagagtccagtagcttaatactgacactgacttgatacagcatgaagtttctagtgccacacacagtatttagaaaacctttaggcgtgaatgactcatgtgggatatatgtaaacataatgtttattttatctcacaaatgcatgtgaaatgtataattacatcttaggaatccaaaatggtctgcagagagtgagcggaggcaccagatcaatgttggttctttgcactggtgagattctgcctgatgaatattaaagatatcctgctttctgagaactctatcaccagatggcagttgggatatgggaggaactaaagcatcctgttttgtatctgtccagatcattatttctgtctcttgttttttcttcctggttcaggatacttttttaaggggttgagaattgaagattttccaaaagcgttcatgaatttagagcattccacccaatataataaaacctgttaagaatgtcagtctttgttcaaacatctgtttgttctatctccagtcattaaatcagtgctgctgcatgacactcttaactcctgactttttatatccagtcataaagttgactttcagcacaaaagatacttataaacaaataaaaaatttttatttttctctcttactgatgtaagctttggcactcttttgactggtgccattagacatcttgattattgtgacaactctagacctgcctgctttatctaatgtaatcatgctcaatgtctacaggttgtttaataatcagtcacacagagaactgaggaactgatgctgtttgtttgcttctatgatacagagatgtctaaaaacttcaaatggacatgttttgtagtttagcgacttccgtatacataaagggacatattaatactggttcatttgtaaattattattcatatagaccactgtagtagataaaactctatggtacacctgcttatgtgttgcctcacactgtgtgtgattttgtttcttttgttaagcagcacttatgtagactgcatttccaaatgtgttgagcactcagagtgtagtcaacagtaagttcttttaatgaatatcagttttaatttatagactgccatggccttaaaaatattctgtacaatatactgcactgtgttgcacagacactacttgcttttctccattcatatttttatgagtagaatctgggcttttaaatttctcttcttattctttgaagcatgttgcatactaccctggtgggatggatggttctgtaaatgaagggatatttaaacttgctactgttgttcaacaccattaatggtcagtgtgaaccattacaaagaatgtggcaacttgcttgtgcctaaaaggaggaattggaactagaatgtgtgactctgtggggactgcataggtttgttaattgacctatagctaaaccttaatgtgtttgtgtgtctatacattgctttccgcatttcaagacatccagacgctattaccaacattttcctgtgcattaacctctgcatgtgaaaacttttaacagttactgaactatgtaaatatgtgaatttttttatttaggtggatgcattttttgtctgtttactgctcttctcagctttattcaataaacttgcattttaagggttgtattggcaattttaacttaaaatgtgcatcatgatggaaggtgcagacttttttggaagtttccgagaggagggtctatagaccatttgtcagaaatcagatcagccctcaaagaatggggtctgtgggctagttaaaatagaaataaacttttaaaatatccacagaaaaaaaaaaaaaaaaaaaaaaaaa

SEQ ID NO: 4614 - DNA, 2656 bp, Homo Sapiens
  NM_018188
gtgtgtgtggcgcctgcgcagtggcggtgaccaccggctcgcggcgcgtggaggctgctcccagccgcgcgcgagtcagactcgggtgggggtcccggcggcggtagcggcggcggcggtgcgagcatgtcgtggctcttcggcattaacaagggccccaagggtgaaggcgcggggccgccgccgcctttgccgcccgcgcagcccggggccgagggcggcggggaccgcgggttgggagaccggccggcgcccaaggacaaatggagcaacttcgaccccaccggcctggagcgcgccgccaaggcggcgcgcgagctggagcactcgcgttatgccaaggacgccctgaatctggcacagatgcaggagcagacgctgcagttggagcaacagtccaagctcaaaatgcggctggaagccctgagcctgctgcacacactagtctgggcatggagtctctgccgtgccggagccgtgcagacacaggagcggctgtcaggcagtgccagccctgagcaagtgccagctggtgagtgctgtgctctgcaggagtatgaggccgccgtggagcagctcaagagcgagcagatccgggcgcaggctgaggagaggaggaagaccctgagcgaggagacccggcagcaccaggccagggcccagtatcaagacaagctggcccggcagcgctacgaggaccaactgaagcagcagcaacttctcaatgaggagaatttacggaagcaggaggagtccgtgcagaagcaggaagccatgcggcgagccaccgtggagcgggagatggagctgcggcacaagaatgagatgctgcgagtggaggccgaggcccgggcgcgcgccaaggccgagcgggagaatgcagacatcatccgcgagcagatccgcctgaaggcggccgagcaccgtcagaccgtcttggagtccatcaggacggctggcaccttgtttggggaaggattccgtgcctttgtgacagactgggacaaagtgacagccacggtggctgggctgacgctgctggctgttggggtctactcagccaagaatgccacgcttgtcgccggccgcttcatcgaggctcggctggggaagccgtccctagtgagggagacgtcccgcatcacggtgcttgaggcgctgcggcaccccatccaggtcagccggcggctcctcagtcgaccccaggacgcgctggagggtgttgtgctcagtcccagcctggaagcacgggtgcgcgacatcgccatagcaacaaggaacaccaagaagaaccgcagcctgtacaggaacatcctgatgtacgggccaccaggcaccgggaagacgctgtttgccaagaaactcgccctgcactcaggcatggactacgccatcatgacaggcggggacgtggcccccatggggcgggaaggcgtgaccgccatgcacaagctctttgactgggccaataccagccggcgcggcctcctgctctttgtggatgaagcggacgccttccttcggaagcgagccaccgagaagataagcgaggacctcagggccacactgaacgccttcctgtaccgcacgggccagcacagcaacaagttcatgctggtcctggccagcaaccaaccagagcagttcgactgggccatcaatgaccgcatcaatgagatggtccacttcgacctgccagggcaggaggaacgggagcgcctggtgagaatgtattttgacaagtatgttcttaagccggccacagaaggaaagcagcgcctgaagctggcccagtttgactacgggaggaagtgctcggaggtcgctcggctgacggagggcatgtcgggccgggagatcgctcagctggccgtgtcctggcaggccacggcgtatgcctccgaggacggggtcctgaccgaggccatgatggacacccgcgtgcaagatgctgtccagcagcaccagcagaagatgtgctggctgaaggcggaagggcctgggcgtggggacgagccctccccatcctgagtccacagggagatccacagctcacggagcctggccgcggacccctcccacccctgccttgccggcccctgcacatttaggatatgctcctgggtggggactgggctgtgcccagggcctctgtcccccaggatgtcttgtggtgcgggtcggccgttctgccccccagggcaccccctgttgtaggcactggctagggaggggcaggcctccttcctgcccctcgagacactcttgggagatgcattttccgtctggctcacagggggagggtgaggctttgcaccccagcccctgcccaggccactgtgagggtgggtgctggctgagcccccggggcagcaggagccaggcaggtgatgtctttgttctcggctcccacagcagagccaggtgagggggcgcctgccagggccagacccaggtggggcagcctgaaccctgcttccccctgtggccggcatgccccgatctttcacacactggtgaccctgagagaggagggaggagggaacctggcgggggtgtctgaggccgcactgtcagctggccggtccaagcctgtggctggagctggggtctgtttacctaataaagtcccacaggtgcctcattaaaaaaaaaa

SEQ ID NO: 4615 - DNA, 4042 bp, Homo Sapiens
  NM_018191
gacccggcgggcccggcgccctggcgctcctcctcttcgctgccggtgggcaccgccgctcgctcgcacttctgcgcccattggagcttcggagatccctgcggtcccgcgggacggcgcggcagcagctgacctcgcagacaggatcttgctctcttgcccagactggaatacagtggtgtgaacacggctcactgcagcctcaacctcctggactcagagatgtcggcttatttataggaattgcttgaagccagagtcatggtggatgtcggaaagtggcccatcttcactctactctcccctcaagagatcgcgtctattcggaaggcgtgtgtcttcggcacctcagccagtgaagcactgtacgttactgacaatgatgaggtctttgtatttggactgaactatagtaactgtctaggaactggagataaccagagtacacttgtacccaaaaagctagaaggcttatgtggaaagaagattaaaagcctcagttacgggagtggaccacatgttcttctcagcaccgaagatggagtggtttatgcctggggccacaatggatatagccagcttgggaatgggacgaccaaccaaggcattgctcccgtccaggtctgtaccaatctcttgatcaagcaagtggtggaagtagcttgtggctcacatcattcaatggctctggcagctgatggagaggtgtttgcttggggttataacaactgtggccaagtgggatcaggttctacagcaaatcaaccaactcctcgaaaagttacaaactgtttacatattaagagggtagttggcattgcctgtggtcagacttcatccatggctgttctggacaatggcgaggtatatggctggggttacaatggcaacggtcagctgggcctgggaaacaatggcaaccagctgacccctgtgagagtggcagctttgcacagcgtgtgtgtgaaccagattgtctgcggttacgcacatactctagcactaacagatgagggcttgctgtatgcctggggagctaacacatatgggcagctgggaactggcaataaaaataacctgctaagcccagcacacatcatggtggagaaagaaagggtggtagagattgcagcctgtcactctgcccacacgtctgcagccaagacgcagggtgggcacgtgtacatgtggggccagtgccggggtcagtccgtgatcctcccgcacctcacccacttctcctgcaccgacgacgtgtttgcctgctttgccactcccgccgtctcgtggcgcctcctgtctgtggagcatgaagactttttaacagttgcagagtcactgaagaaagaatttgatagtccagaaactgctgatctgaagtttcgaattgatggaaaatatattcatgtccataaagctgttttgaaaatcaggtgtgagcattttcgatccatgttccagtcgtattggaatgaagacatgaaggaagtgatagaaatcgatcagttttcttacccagtgtatcgtgcctttctccagtacctctacacagacacagtcgacctgccgccagaagatgctataggtcttctggatttggcgacatcttactgtgaaaacagactgaaaaaactttgtcagcacattatcaagagaggaattactgtggagaatgccttttcgctattctctgctgcagtcagatatgatgcagaggatttagaagaattctgctttaagttttgcatcaatcatttgacagaagttacacagactgcagcattttggcaaatggatggccctctgctaaaggaattcattgctaaagccagtaaatgtggagcctttaagaactgaagcgcaaggctgctgggttctgtgtgagtgctctggggcactgttgaggatgtgtccagtttgtgctctacgggtgatgtgattctgcaggtaaaagaccatcaggttgtttttttccacatctgggacacagttgtttgtgtaggaacataacaagggtgtacggcttttcttgagcccattttaaacaacccttgtttccagataagtgtattttaaatgtgacctttcgtaaatttgggctggaacatgtaaaagggtgaaagttagtcgtttttggtcttcttttcatttttgattagaggaacttctgaacttggaaaggggaagttggcagcaactctcctgggccacgtatcaacaatcttctgacagcaggagcagtgatagttggggaattgtgagatgaatggagaggccccatcgtgaattaaagatgctgacctggggattgttaagtgctgccttagttgctagtttagtagccttactgtgaaggaataattaagattgtttcagacttttgtttgtgtgcttgcgttgatgacttttttaacttcaagataaatcaaagtaataagtttaacgtatattaaacctgttgaaatgataattatgtaaagataaatattctaggttagtcaagatttctcttaagatttaagtgcataaagaatagtaatttagaagtatccgtgaaaagttgataatgaaagaaatttgatgaaggtgaatattttataaattagaatctccactacttatccaatggtgttttatttcattaaggtagaacttgagaactcaagtttaaattgtcccccaccaccttcttctataaatgcaaacttaagaggaaaataatgacatgtatagtatactcttgccttcctaaattatgactgctgaatcatcatatctactatatatgactggaagaagtggttcttcaagtcaaccctcttacaagacttagtggaatttgctttatctactttaggccaaatccatcacacattggcttatgtgaaactttatcatctttcacttttggttttcctctgtttttaaacatcttaggtataacagcacaatttcaccttgaaaaagcaccaaaattatggtgttcctgaaaagatcctattaaaagacagtagtttatttgaactggttatggaaggtgactttgggatgtaagagtgttcaactgtgagtttcatcatgtgtgtccgttgagcttgcttttaagagcaatgttttgctttgctctctggtccatgaactcatttccatttgagtgagttcccttagtgaattttgtctcctgcttggaaagtctctcttctgaacctggagcctgaatacattttcagagccaaattacaagtgggtgaagacatgctacaactactatttttagcaatgtttttaaatttgtgtctattggggtgggaaggggagtgaggccctaaagataggaattcactgatagctgaaatagatacaagcctaggagccccagcccccttttcttgaccatatcacaagtgattgaagcccagtgaattagtcggttagaattcgttctacaacatgatagaacttttcttactagcttcagaaatgcacattgatttgtgctatgatgggtggtgtttgtaacaatcactgttctataggcttatgatctgagcaaaatgtgaacttcagtatgtttactattgctcttacttgaaaactttttttcaaaaaaagcacaaattaaagtagtaaattcatatccatagatagttcattcattcaacaaatatttaccaagttcctaatataagtgaaggaccacttctcatattagattactaagtcatttgtatgaatatgtgtggcagtgaagagaacaggtctttcaaaaagcatttgattattttttttaaatacactctcttatttttctacttgtttttttgttaatcatagcaggatatgacaactcttatttgaattgattttttcatctaatgtaataatggaagccaaagtattcatatttcttaagatagccctaaatgtactcttgaacttcttactggaacaatgtttgatactctagtatgtaagctgtatttatgtaatatttagaacgacatgttaataaacaaagtaacattaaaacaggaaaaaaaaa

SEQ ID NO: 4616 - DNA, 3961 bp, Homo Sapiens
  NM_018196
ggggcctacaggctctccgctgggcccgagcgggctgggggaggggagcgtggggccgacagttttgggggtgaaaaggcaaaaggcgggtgaaaggctgcctcccgagactctccttgcttggaattctgcccactctgcggagttagcagtcacgacctccagcacaggatgtggtaccacagattgtcccacctacacagcaggcttcaggacttgctgaagggaggagtcatatatccggcccttccacagcccaacttcaaaagcttacttcctttagctgtccattggcaccatacagcctccaagtctctgacttgtgcttggcagcaacatgaagatcattttgagctgaaatatgctaataccgtgatgcgctttgattacgtctggcttcgagaccactgccgctcagcatcgtgctacaactctaagactcaccagcgcagcctggatactgccagtgtggatttatgtatcaagccaaagaccattcgtctggatgagaccacactctttttcacttggccagatggtcatgtgactaaatatgatttgaattggctggtgaaaaacagctatgaagggcagaaacaaaaagtcatccagcctagaatactatggaatgctgaaatctaccagcaagcccaagttccatcggtagattgccagagcttcttagaaaccaacgagggactgaagaagtttctgcaaaactttctgctctatggaattgcattcgtagaaaatgtccctcccactcaagagcacacagagaagttggcagaaaggatcagcttaatcagagaaaccatttatgggaggatgtggtatttcacttcagacttctccagaggtgacactgcgtacaccaagctagctctggatcggcacactgacactacctattttcaagagccctgtggcattcaagtgtttcattgtcttaaacatgaaggaactggtggcaggacactgctagtagatggattctatgcagcagaacaggtacttcaaaaggcacctgaggaatttgaactcctcagtaaagtgccattgaagcatgaatatattgaagatgttggagaatgtcacaaccacatgattgggattgggccagtcttaaatatctacccatggaataaagagctgtatttgatcaggtacaacaactatgaccgggctgtcatcaataccgttccttatgatgtcgtccatcgctggtatacagcacaccggactctaacgatagagttgaggagacctgagaatgagttttgggtcaaactaaagcctggcagggtcctatttatagacaactggcgtgtcctacatggcagggaatgcttcactggctaccgccaactgtgtggctgctatttaacaagagatgatgtattaaacactgctcgcctcttggggcttcaggcttaaaattgacagcatctggattatgaatacacctggcaccctggctaccagaatttcatatgggcagaataatattgtgtcaaactctacttcagattgtctccttatcccatcccacaaaacagaatctgtccgtttctctagtaagggagacttgttggagaggcgggactctgagttatctaatgtcagacatctagtggggcagctctcttcctcatgttataacatggatccacttgtttgatttaaaccttttaatataattttggtcagtctccttcagaaatataatctccatattgataggaaagcaataattgccatgaggtaacgatttttttcccaagtagatcagttagaaagaaatgcattctagaaataacaaaaatcctgataaagcaacaatttgcaaaatgtttggtcttaggacaccttaacactcttaaaagttattgaaggccccaaggagttcttgggtgtgggttctatctattgatactaattattttaggtattaagactgagaaatatttaaagctcaagaagaacacagaagcacacatccctcagctatgagagagatgacataaccatatgtcatgtagcctctggaaaagtcctctgtatcctcatgagataacgagagggggaaaaaaagctactactgcctttgtaacttccacttagcctactacagggctatgcacatcttagtttccaaaagtctgcttaatttcaaaagaaaaatgcctaattgaatgtaactcatcttggtgttattatacaaaataatttttaatctgcagacccacgaaaagggtctcagggactcctccaggggtcttcagaccatactttgagaacccatgggctagcgactaccttgagacagtcctttacctaggcctgtggattaaagggtttagctgaaaccctagattcttctctgtagtctaatagaactccaaacattgtaagaattgcttggtagcataagctcagggataaggtgggaattgagttcaaatatagtgttttatcttccacacaaatcatctctataggagttaaattaggaagtcacaacagcgcctgttgaacaaactcatcagtgtggtaatcctatgagggataattgcagaaaggttttagagacttgtgaggttccatatgataattctttacacctccccccccaagagaaagtacacagggctattctgtaatattgttcagggaaatcagcatgatagatgctgtgcctccagagagttctctggagattactacccaaatgtgtattttggcaatttggtggtatttaggatgtaatatgttttcctccatttctgctaattttctctctctctctctcataacatactatacatgctaattgccaagatttgaatgagtcaaatttagtagcttgctgcttttattttttaaatggcttcttttacgtattggcgggggcgggtggggggcagggtatgaggcttcttttccctcagctttcattgaaagtgaagctgtacaataaccacattgaccactgtagaatgatgaaagagaatataggctaggatgcacacaagaggggggaaaaggcattattagtgaagataggagttacaaagcaaagcaaagtcagtattcagatagagaatagagcctaatctgatgtttgcagggagttcctagatcacatttggcaatttacacattattttattgacctatccagtgctccaaaatgtgttccaaaatattttggcattttatttgtactacataggaatctttaggggagtccctgaaatttgttttcctcttaggtcaaaggactgataattaactttggttcttaaggagtatgccctttagcaataagaacagcaataacattttaccctgcagttttttctctatacctactattatgcactcctaaaatatgtcatcattagtcttcatgaggatgtttaccatttctgaagttttgcgtaaattagccttgaagattacactataactgaggtcatcagcattgacttatggccagcaaaggacatgctcatggccctggagagatgaggacacaaaacaaatcaatttccccacttactgaaggactccccttaccttctgtctctcctgagaccttgactcattaattattttactctcctttttggaaatttgcaaccggtccttctcaacaatgtgctccctttagtacactgaagaaaaagagaaggggattatttgagtcctgatcacgatgcattgaaaacttcctatgtgagatgtttctgtttttatatctcttccaggtgtccctgagtatataagcatgggtctatgtctaccaagctcactgtagagtcacttttaccttttgctatggtggaatgggatctgtagggtcaggaacacagcacctaacacagtgccttatggatagtagttttataatacagatgtgttggaagaataaatgaatgggtccttttcaaacaaa

SEQ ID NO: 4617 - DNA, 3316 bp, Homo Sapiens
  NM_018198
ggggccgctgtggcgcagccgggctggcccgcgctgtccctgacgcggatcactggcccctcttgagcacggccttgccggtttggcggggtgaaaggttgcgaagatggcgacggccttgagcgaggaggagctggacaatgaagactattactcgttgctgaacgtgcgcagggaggcctcttctgaagagctgaaagctgcctaccggaggctctgtatgctctaccatccagacaagcacagagacccagagctcaagtcacaggcggaacgactgtttaaccttgttcaccaggcttatgaagtgcttagtgacccccaaaccagggccatctatgatatatatgggaagagaggactggaaatggaaggatgggaggttgtggaaaggaggagaacccctgctgaaattcgagaggagtttgagcggctgcagagagagagagaagagaggagattgcagcagcgaaccaatcccaagggaacgatcagcgttggagtagatgccaccgacctttttgatcgctatgatgaggagtatgaagatgtgtccggcagtagctttccgcagattgaaattaataaaatgcacatatcccagtccattgaggcacccttgacagcgacagacacagccatcctctctggaagcctctcaacccagaatggaaatggaggaggttccattaactttgcgctcagacgagtaacttcggcaaagggatggggagagttggaatttggagctggagacctacaggggcctttgttcggtctcaagctgttccgtaatctcacaccaagatgctttgtgacaacaaactgtgctctgcagttttcatcccgtggaatccgacccggcctgaccactgtcctagctcggaacctagacaagaacaccgtgggctacctgcagtggcgatggggtatccagtcagccatgaacactagcatcgtccgagacactaaaaccagccacttcactgtggccctgcagctgggaatccctcactcctttgcactgatcagctatcagcacaaattccaagatgacgatcagactcgtgtgaaaggatccctcaaagcaggcttctttgggacggtggtggagtacggagctgagaggaagatctccaggcacagcgttttgggtgcagctgtcagcgttggagttccacagggtgtttctctcaaagtcaagctcaacagggccagtcagacatacttcttccctattcacttgacggaccagcttctgcccagcgccatgttctatgccaccgtggggcctctagtggtctactttgccatgcaccgtctgatcatcaaaccatacctcagggctcagaaagagaaggaattggagaagcagagggaaagcgccgccaccgatgtgctgcagaagaagcaagaggcggagtccgctgtccggctgatgcaggaatctgtccgaaggataattgaggcagaagagtccagaatgggcctcatcatcgtcaatgcctggtacgggaagtttgtcaatgacaagagcaggaagagcgagaaggtgaaggtgattgacgtgactgtgcccctgcagtgcctggtgaaggactcgaagctcatcctcacggaggcctccaaggctgggctgcctggcttttatgacccgtgtgtgggggaagagaagaacctgaaagtgctctatcagttccggggcgtcctgcatcaggtgatggtgctggacagtgaggccctccggataccaaagcagtcccacaggatcgatacagatggataaactgccaagaaccagatttttaaaaggccgcaaaaaatcttttcctgggagtctacaaatttggaaatgaaaaaacccagacatcagatgtttttattttatattattattatagaaggtggtaccattatcaattatgtgaagggacatgcagacaccccagcttttgagggtgctgggggtaggactgaggcagccccactgggaaccagactgcagcctggcccatggctgttttcccaaggatcagttcctggagggaagggctctggccctgactccgctgtgtcccgagcacacgtgctgaccgcagcccgccgccctgtagttcttggctgggtctggaggtgtctgtggagcaccctgccctcaccacaggagcgtgagccacttctgcagtccacgctgaacatgggaaacaacctgaaaagcaggcaggcctcccggtcagggagcctctgctgtgctggcttcccatgaccacctcctcttgctgaaatattactgcttgaatctggagcagattgcgggtttataaaactgctttttatctgagaacaaacgggtttggaaattagtcgtcttttttccccactcccagagctgctcaagtcattccaccggccccctcggcttgggacagggtagtgtaactcccgatcccagggcctagccctgacacaggtggcttcccgtatcccggtgggaaaacgccctgccaccagcgggcttgagctggcctgtgtccctccaccgcctgcaccacccacctccagagtgcagtgctgggcaagggcagctcaagaggacaggaccaggcgcttggcaagacatcagacacacccaacccaaaggcgtggaccccaggcccggcccgtggtacccagcaggtggcactgcagctccccgctcctgcaggtccagcgtcctcacaggaacaccagggcctgtgctccggagccttccttcagacccttcctccacgtgcccacttgggatgcagaatgcagcggagctaggaccccctccacggcctggacctcggctgcagtaaagttacgtgaggcctgtctctcggggcctggaagtggcagccatcagttgctcttgctgacccctcggagcaagcgccgcacaggtggtggctgagacagctggcgcggggggccccaagctgcgccggcctccagcccacccacagctgttgctgaagtcaggcctccctccccagcactggtatctgagtaacggctaagaacctccttcctctggttttgaaaagcagttcgggttgtccaattctgtaacattcatctccattttttaaaaaggtttctctgacggccccacggcccgagccgcggtgagcgtcgtgttgcatgagcctgggccccgggcttcccgtgcgcctctgccgcaggtgcttctgggcacccatcctctgcgtttcatttgcagtcgactgtacagaaggcactcaccacaataaacctttcctgaaagcagaaaaaaaaaaaaaaaaaaaaaaaa

SEQ ID NO: 4618 - DNA, 4568 bp, Homo Sapiens
  NM_018199
aacggaagtggttacggccctagtgaatccgggtgggtgcgcgcaggcggccgcacaggttccaggtctttaacgtgagcccgctgcaggtgtgcggcccagtccgagacagcaggtaaatttggaaggcaaagccagccctctgtcacttctacaaatggcctccccaagtggcctgtgtgtcttggttcgcctgcccaagctaatctgtggaggaaaaacactaccaagaacgttattggatattttggcagatggcaccattttgaaagttggagtgggatgctcagaagatgccagcaagcttctgcaggattatggcctcgttgttagggggtgcctggacctccgatacctagccatgcggcagagaaacaatttgctctgtaatgggcttagcctgaagtccctcgctgagactgttttgaactttccccttgacaagtcccttctacttcgttgcagcaactgggatgctgagactctcacagaggaccaggtaatttatgctgccagggatgcccagatttcagtggctctctttcttcatcttcttggataccctttctctaggaattcacctggagaaaaaaacgatgaccacagtagctggagaaaagtcttggaaaaatgccagggtgtggtcgacatcccatttcgaagcaaaggaatgagcagattgggagaagaggttaatggggaagcaacagaatctcagcagaagccaagaaataagaagtctaagatggatgggatggtgccaggcaaccaccaagggagagaccccagaaaacataaaagaaagcctctgggggtgggctattctgccagaaaatcacctctttatgataactgctttctccatgctcctgatggacagcccctctgcacttgtgatagaagaaaagctcagtggtacctggacaaaggcattggtgagctggtgagtgaagagccctttgtggtgaagctacggtttgaacctgcaggaaggcccgaatctcctggagactattacttgatggttaaagagaacctgtgtgtagtgtgtggcaagagagactcctacattcggaagaacgtgattccacatgagtaccggaagcacttccccatcgagatgaaggaccacaactcccacgatgtgctgctgctctgcacctcctgccatgccatttccaactactatgacaaccatctgaagcagcagctggccaaggagttccaggcccccatcggctctgaggagggcttgcgcctgctggaagatcctgagcgccggcaggtgcgttctggggccagggccctgctcaacgcggagagcctgcctactcagcgaaaggaggagctgctgcaagcactcagagagttttataacacagacgtggtcacagaggagatgcttcaagaggctgccagcctggagaccagaatctccaatgaaaactatgttcctcacgggctgaaggtggtgcagtgtcacagccagggtggcctgcgctccctcatgcagctggagagccgctggcgtcagcacttcctggactccatgcagcccaagcacctgccccagcagtggtcagtggaccacaaccatcagaagctgctccggaaattcggggaagatcttcccatccagctgtcttgatagctgctttcctcccagttaggacaagtgggaagctggagccaaggttgaagagtcacctcttcccattttagtacatcattaattgtcaaagcctgtgtgacacaactcagaatactaacctagactaatcccaggatgcttctgctggagcaaagatattgtttgaaggagagtttatggttttggattttaaacgggcagggtcttttttcctctcatttttgtggacaagagaggccttcgcctttatttttactctccctcttctgctgtccctgtgcagaggaaaaatgaagaattctcccagaagtgacttgtcaagacttaaaaaaaatgtttttaatgcatttcttccttgtctagtgcctcggtttatctctaacaggggctgtccagtatatcggtcctgttaggaggggagaaaaagttcttccaaaggctggagaagtgaacaaggagtcaaatttattttcccaattcaacttcataattatcatttctttggcttcatgctctcccgtaactcatgtggttgggatccatcccatctgggtcacttcagtctacttcacgtacttgaaaaggctttcctttacacttccaggaccaaacagcaacttcctgccacacacttccaccctatcactgggagaaatccttttctggacatgagcctttgacctgggtggggcagaaagaaccacaaactccatctcccaatagaactttgaaattcactcagcttttcctttcatgctgtttgttgcctgcttgttgcactcctcctgccccagaactgcaagatttttagcttcacccctttctgagagtaatgttatcttttatcagaatcagtatcagttcccctgtattctgtgcttcatcgaatttgcaagactgacctcttttaagcatttaattcactcccagagtcatctggtcaggttgcaatatgaggacttctctgtctcctctgaagcctgggacactgagcttacttaatacattagatgttcaaaagaggagcgttgtttcatctttcaaaatgttaggccattactttgagtataaaatcgacttattaatgattagtaatttttctaaagtattgggaaaactttcttattttataagatcttaacaagcttaaaaaagaattttatgaccagaatccaacaagagctctattttggaattgtgcccaagttggtgatgtttactctaaaattaataataaaactacttgtaagcacaaggctcactggatgtaaatgtaaaacttcgcgactttataaaactggcattcctaggggaggggctatttatcctacaggtccctgcctcctggcagtgccatggtatgtgtgcatggatataccagacacagtcaccatcggccatcagtagcagcccatgaacccacgtgcacatcctgcatcttgctcttctgacccttcattcccacttgtcttcaggcaggcatttctgggatctaaactagaaatccttgaaaacaaatagtaccagccactttgaggaatgtgcattcactgtagtgggttattatggggtctctgcctcctggctgtgttatgcggagcccaggagtggaggagagccgtggaaatagacagggagaggctggtacttgggttgtggtaatagtcaggcttgccacaagagggcactcatagatttgtttttatattcattcttgagaaaaaagcaactggttactgaacgtaactcatgacttatgtttcaaattttgcatagctgattttaagtcattttgatagctttgcaagaaaaatttttcctttgaaacaagggagtagggctgtttcattttctttccttctaatcctcatgccaagaggtgagaaacacttaaggtcatttaaggtgctagggaaagggttttcccatggagctttctgtgaggcgcagtaaaatagagccagcagcaaagtagaggaaaaagccagactgcgtcacacaagatttctcatccttttcaggagagagtcactgtgtagatttgaatcttttttctttgagtctgctttgaactttagcaggcttttcctaagactgacaattgtcgtcttaaatcagagatttgagggtagacttattttatggcaaatgtctatttttctgatataaaagtaacaatgctcattacagaagaatctaaacaaagaataaaaattagccatcttctctccatctaaaacagagctaaactttgctgatatgtttatgaatttcctttcagtattaaaaagtgcatataaggtgtatatttacacaaaattgaaggtcatacatagatacaggttggtatcctaactttaccctctcactgattaacatggtatcacgagtaacttcctatgtttttaaatctttgaaaatagatttctagtggttctaccttatccatccccacactgttgaaaattttggttgtttcagatacttttattatcaatgatgatgtgataaagtttcttgtatatatctctttggctctatctttggtaatttcttaagaatggaatcttagaattggactgtgaagagggggattcacattgctggggctaagtacaaattgacatcaccttttaggaatgaaatgcttctctttgaccctttagctccagtgtcccagcatagtcactgggcttcataggagtagcagtgagaggacagtgtcacagcaagggcctctctgcatgctccctgatcattgtgtttgcaggttcagcatttcttcttgagtccttcccttcttccaaccttattgcctcatttcccccttgtagtcaatgttttttggaaacactgtttattttaaaataaaaatgtaaaaaaaaggtaaaaaaataaaattttaaattttaaaata

SEQ ID NO: 4619 - DNA, 3898 bp, Homo Sapiens
  NM_018200
cgagtgcgtgaagtgaaggcgattgagaggggctgagggaattgtcctctgtggaagggactttcttttggccctaggccccttcctgcccctgtcgtcagcagagtctctacaaggaagataacggactgtaaaattctataaagcaaagctacacatcacttgacaccatacaccatcttggttacataatgaagagagatggaaaacttgatgactagctccaccctaccgcccctttttgcagatgaagacggttccaaggagagtaatgatctggctaccactgggttaaatcacccagaggttccatacagtagtggcgccacatcatccaccaacaatccagaatttgtggaggatctctctcaaggtcagttgcttcagagtgagtcttcaaatgcagcagaaggcaatgaacagaggcatgaagatgagcaacgaagtaaacgaggaggttggtccaaaggaagaaagaggaagaaacctcttcgagacagcaatgcacccaaatccccccttacaggatatgttcggttcatgaatgagcgtcgagaacaacttcgagcaaagagaccagaagtcccatttccagaaatcacaaggatgttaggcaatgaatggagtaaactgcctcctgaggaaaaacagcgctaccttgatgaagcagacagagataaggagcgttacatgaaggaactggaacagtatcagaaaacagaggcctacaaggtcttcagtaggaaaacccaggaccgtcagaaaggcaaatctcataggcaagatgcagcccggcaggccactcatgatcatgagaaagaaacagaggtaaaggaacggtctgtttttgacatccctatatttacagaggaattcttgaaccatagcaaagctcgggaagcagagctccgccagcttcgcaaatccaacatggagtttgaggagaggaatgcagccctgcaaaagcacgtggagagcatgcgcacagcagtggagaagctggaggtggatgtgatccaggagcggagccgcaacacagtcttacagcagcacctggagaccctgcggcaggtgctgaccagcagctttgccagcatgcccttgcctggaagtggagagacacctacagtggacaccattgactcatatatgaacagactgcacagtattattttagctaatccccaagacaatgaaaacttcatagctacagttcgagaagttgtgaacagactcgatcgttagggaatggtcttagaactccaagatgttccataagtgtttttacttgtgaggaatgagaagccatccatggaaatttgaactgagtgggggcagagaaagagtgcagatccctttgcttgtgaaagaattatcagtgagtgaaaggccatcaccccaggaagccaaatgagggagcagcaacatgtatatgagcttcctatggaattgtccttatgtgaagctttgaaggtgtacagccactctcccgggtcttcaggttcctaccatttccatttctgttaaagtggatctgcatatcttcagcttactaggtgacccggatgctgacatctgctgctgcagaaaggaagacttttcattgtaatttcgcttagacccttttatcagtggagctccagttttcttacctagctgtcacttttttaaatgcctctgggggttatttttgctttccttggcccccaccaatttatacatctccattttctgacctctggactaactggttgctcagcaaggttctgaaggagagtttcttgcattggacaggcccagtcttctcccatcattgccctgctgtgactccaaagaaaggagcttcttgctgacagtgccctgtggagcaaggctgtgtttcctaccccacacggtgctcagtgggtgccagccctcagtgtggctttgtgattgctgccctaaaggagaatgctctttccttcctcactggtactgcctgctgttttctaagcattgctcctgcacagacatggagtcccagccccagcaaggctcttctgttcccatctgttgacaatgtcttgtggagcatttttgctgaggaaaaggtcacttgtaaacagaggagaaagggaaagagtacaaagccctaagtttattgtaagtgaaaactgagggaattcctgtcttctttaggagtaatgattcatagatctagataggtggaaatatcattcaaaatagtcacttgagctcacaaaaaaagcaaggaagaattctcatgtcctttgtcttccttctgtagccattaactgctgaatccatgtgaggaagacaggcttcccttccttccccctccttagtgattttttctttaacagcataagtaaagaggactttctggttcatttttgtttgttttgttttgttttgttttgtttacagatgaggtcttgctgtgttgcccaggctggagtgcggtggctattcacagatgctatcatagcacactacagcctccaactcttgggctcaagcatcacgcctagcagtttctggttcctttaacagcaaaaggaaagagaggttctgattcttacctcagggttttttggttgttcattgtttttgtttttgtttttgttttgacactgcagagcacaaggctaaaggttacagctgagatctttggaaccaaaggcagagcaagcagagcccgttgtctgggccccacaccactgcaggcaggtggatagaagtgcggcccctctcatagtatgcccataagtcagggcatagggcagaactacctgtcatgttgctacaccatcctgtcttctcagcatctccttgcctgttttctttattagtccaaaggaaaacaacagcaacaaaatctgtttttaaaatgtcttatatgaacatatatcaaatatccatgcgctgaaacccacataccatcacttggcaattttttagaataagaccccattattatctattgctataaacctagccagttctcttgctcttctgtattttcctatttccctgccatcatctgctatttctgccacttctcttagactccttgtctgcaaagcccaagctagaactcactgtctatggcagaaggacatccagagcccattctggagttttgttttttccttctgccagatgctttgtgtcctgtcttccttcctcctcatatttctgtttctcatttgtgttcagttttgtgcagcattgctagcactgcttttgtgaccagaaaaggccataacatggtccaggatcatcattcttctgactctagatgggacacttgacagtgacttgaaacatttgcatattcaggaatgcatgagatttcaagagagcctacagtatgaaatcattttcacaaaataagcagcttgcttctgaaatgctgtctttcccagtagctactcacctgcctctggtggctgggattcagatgccacaaaactgtcagtatctatagaccaggtctgtgccacctcctctctcctctgtgctcagtgaggaggcagtaaatgaagttacaggctagcacaatacctaattcatgtttcccagtacacctgtagatattactgtacttttatgttctcaagaaataagttgttgcctattcagtgttacagatttctttgtttctttttaattaaaatacaagaagcagctgaggaaagggagacaaggtattttatttctgactgattttagaaaaaacttgtgtacatgtgtttggaactgttgaaatgccaagttttctgtataagtgtttttgtaattaaactttcagattttctttgttttttaagaagttgatgtgcttgtttgacatttgtctcattaaaacttttctacgttgaaaaaaaaaaaaaaa

SEQ ID NO: 4620 - DNA, 2500 bp, Homo Sapiens
  NM_018203
ctttgcagctgagactgggtggagggagaggcgcggagacactggggctctgacgagctggctgaggccctctcagtaggggggtcacgcctcctggaactcagggaccccaagtttctgtgcattcagggcggggctggccccatgccctgtgcataggggcctggctgcatcccagtcgatcagccagaggcagcagcagtggactcatcaattgtggaggaagccctggggaccctggggaccttgccgactctattcccagccagctcctaggacaagcctcagagccaacacccgctcgaccctctcccggcccctccccttctttgtcttttgcagatgatcgccgggtgtcgatccttttccctccagtcagggccaggcgtggacgccgccggaccgctgagactcggggcacggtgaagcactggccggggtctggctgggtctggcgctcgggagccagatggaggtggcgataggggccatgggagccggcgccaagtagccggtggacccccgcgctcgcacctctcccggcgcccgggcgctccccaaggctgccatggaggtgcctaacgtcaaggacttccagtggaagcgcctggcgccactgcccagccgccgggtctactgctccctgctggagaccgggggccaggtctatgccatcgggggatgtgacgacaacggcgtccccatggactgcttcgaggtctactccccggaggccgaccagtggaccgccttgccccggctgcccacagcccgggcgggggtggccgtcaccgccctggggaagcggatcatggtgattgggggcgtgggcaccaatcagctgcccctgaaggtcgtggagatgtacaacatcgatgagggcaagtggaagaagaggagcatgctgcgtgaggccgccatgggcatttctgtcacggccaaagattaccgagtatatgcggcaggcgggatgggcctggacctacgtccacacaaccacctccaacactatgacatgctgaaggacatgtgggtgtccctagcacccatgcccaccccgagatatgctgccacctccttcctccgaggctccaagatctacgtgctggggggacgacagtccaagtacgcggtcaacgccttcgaggtctttgacatcgagactcgctcctggaccaagtttcccaacattccctataagcgggccttctccagctttgtgaccctggacaaccacttgtacagcctaggaggcctgcggcaaggtcgcctctaccggcagcccaagttcctgcggacgatggacgtgttcgacatggaacaggggggatggctgaagatggaacgatcgttcttcctcaagaagcggcgggcagattttgtggctggctctctgagtggacgggtcatagtggctgggggacttgggaatcaacccactgtcctggagacggcggaagcattccacccagggaagaacaaatgggagatcctccctgccatgcccacaccccgctgtgcctgctccagcatagtcgtcaagaactgcctcctcgccgtgggaggtgtcaaccagggtctgagtgacgcagtggaggccctgtgtgtctctgactcctagctgtctctgggctcagtacctttgccctggaccatatcacttcactcttaacatgaggaatgatcttgtccaagcagtcggggctacttccaagaatgtcagctcctgttagcaaccagtggagtctggccttggggctctaagttgacctctctatagctccaaatcctaccaatctcagaaaactgtaagaggcacagatgactccaccagctgcagagctgactctgaagagagtcttcacttactgcacaggcaaagaaaggcacaggaatatttcctacctctccctcctgtgagtcccacctccccccacccccatctccaggaggcaggtagagcagttctgaccgagaggatagactgctgttgctgtctttccccagctctgaactagttttaaggtagcttaggatgaaaaatggagaatgattgggggttccaaaccactttcttctcccttggcttatatctcttcaccatttggtggtcaactgtgggcctaccctggacctcatctactcagcgagaattggacatgaagctagaggcagctgccttggaagggaagtcaggctcacttggacagcccaggccatggcaggaagaatcccttcctcttggggtccttgatgggcatgtgtgatggggaaggagcagtctcccagccctgggtctgctccccacatctctcctaattccacttcaccttttgccaccccctccccaccagaggcctagcccttttgtcaccgaaggcccccagagtgtttctgtgtgaaaccctctcatttacactgtggcatcaaaatccacaaaagatggattaattgcactctggttaatagcagcagcacaatgattaaaatctatattcct

SEQ ID NO: 4621 - DNA, 3250 bp, Homo Sapiens
  NM_018209
ggaagctggtggcggctggtgggcgaccgggcgcatcctcattgcagtgcggcggccctacctcggccctggcctgaccccggcggccctgcccgcccctccctccagcatcatggccagcccaagaaccaggaaggttcttaaagaagtcagggtgcaggatgagaacaacgtttgttttgagtgtggcgcgttcaatcctcagtgggtcagtgtgacctacggcatctggatctgcctggagtgctcggggagacaccgcgggcttggggttcacctcagctttgtgcgctctgttactatggacaagtggaaggacattgagcttgagaagatgaaagctggtgggaatgctaagttccgagagttcctggagtctcaggaggattacgatccttgctggtccttgcaggagaagtacaacagcagagccgcggccctctttagggataaggtggtcgctctggccgaaggcagagagtggtctctggagtcatcacctgcccagaactggaccccacctcagcccaggacgctgccgtccatggtgcaccgagtctctggccagccgcagagtgtgaccgcctcctcggacaaggcttttgaagactggctgaatgatgacctcggctcctatcaaggggcccaggggaatcgctacgtggggtttgggaacacgccaccgcctcagaagaaagaagatgacttcctcaacaacgccatgtcctccctgtactcgggctggagcagcttcaccactggagccagccggtttgcctcggcagccaaggagggcgctacaaagtttggatcccaagcgagtcagaaggcgtccgagctgggccacagcctgaacgagaacgtcctcaagcctgcgcaggagaaggtgaaggagggaaagatttttgatgatgtctccagtggggtctctcagttggcgtccaaggtccagggagtcggtagtaagggatggcgggacgtcaccacctttttttcggggaaagcagagggccccttggacagcccctcggagggccacagttatcagaacagcggtctggaccacttccaaaacagcaacatagaccagagcttctgggagacctttggaagtgctgagcccaccaagacccgcaagtccccgagcagcgacagctggacgtgcgcggacacctccaccgagaggaggagctcggacagctgggaggtgtggggctcggcctccaccaacaggaacagcaacagcgacggcggggagggcggggagggcaccaagaaggcagtgccgccggccgtgcccactgatgatggctgggacaaccagaactggtagggcccactgcgcccccgtccccagcgcccccgggcgacttcgtgtttgcactctgccctcgtcgttcctcctccttccatttgacccaagaatcagcaactgcagtgtgaggacagcgtctcgggaggcaggaccctagggagacccgggtgtgcgccgcctgcgcgtggggagtcttcggtgcgtgggggcggcttgctgtccagcctgtgtgggggccgtcccgtcccacactcccctgggcattcttggactcaaggccggggctctgcgtggcttgctgggaggtgggctgcagcacagaggcctgtgactgcgttccagcggccagttcactacgcagtatctctggggcctgggaccagccacgtgccgagctgtcagcgacgtgaggtgtcccttctcgttgagatatttaactttggttttgctctagttctttctttttgaagagagtgactggagtggtaaagatggaaatgctggaaatgatactggcgctcacgctgccatccgaccaccctcggctcccgagtccacgcctgcctgggcctgtgctgtcagacccgcgtcggtcgtaaccctctgtggctcccctgcatcagcaccgtcccaccaccaagttcaccaggttcaccagacacggcctccacaatagccacacccacacctgagctgttctcagtgctggaacttgaccatcctggaacaccctggaagaaaaaggagcgcagggtgggccctcggccctgatgcaggagggtgcgatagcggacgtggccaggcaggaggggccgggttcaggagctgagcaggggatgcctgtgcgtggtgcctgggtctagggaagctccagccccaggatggggctgccctgcacaccggtgcccgccacatgccaaccctcacctccccgaggactggatgatgtgctgccacgtgtgactcgtctcccttgtctgccctgtgtgaccctcagtcttggccagccatgcatgcgcccgaagctcgtgcagtttgtacgtgaggtgctctcctccctgccaccatgctcatcactctggccttggccatgctccctggtcaccccacttcccggtcgccgtctgcagcactcctggagcagcctgggcccttcagcccctgtgctcgtcccaccctagggactcagccacttgcagaacaggatgggaccgagatttcagcgagccctcctggcgcccggtcctccctgtgggcaccagccctcttggtagctggtgtggagggccggtgtccttggctgccacggagggatttgatcaccgaagcagccacctgctgtagttggacctgaggtcagaggcggggcatcagaggctcaaggtgctgagaagccaccgggaaagcagccagcacaaagggcccaggaagccagcccccgagagctgagcgtgggggtctttgagtgtctttctccaagctgagacgtgggcggccgcgtggtatctcccgagggctgcttggaccctggtgggctgagtgctccgaggaggggtggactccaccttggacagtgggatgtggtgttccacatgtgcctgtttccacgccagcaccttgacttggcagcatggagccaaggtctgtccccgcccaggagggtgccttcctcgggggtagggggacggcccactctgccccagggagtcccttttgatgggaagtgcagtcagcagcgtggaggtgtctgggccaccttcagaaggtggatgtggtggccgagaccccgtccacggagggtgatggcctttcccttctgcaggtgcgggcaggtgggcctgggaccggtgctggggcctctccttgctgtgtgtgagggcccaggtggaaggcgcggacctgacagcattccaataaagcatacgggaacatgca

SEQ ID NO: 4622 - DNA, 2677 bp, Homo Sapiens
  NM_018210
catttggcccggggatggtcacacgcgcgggggccggaactgccgtcgccggcgcggtcgttgtcgcattgctctcggccgcactcgcgctgtacgggccgccactggacgcagttttagaaagagcgttttcgctacgtaaagcacattcgataaaggatatggaaaatactttgcagctggtgagaaatatcatacctcctctgtcttccacaaagcacaaagggcaagatggaagaataggcgtagttggaggctgtcaggagtacactggagccccatattttgcagcaatctcagctctcaaagtgggcgcagacttgtcccacgtgttctgtgccagtgcggccgcacctgtgattaaggcctacagcccggagctgatcgtccacccagttcttgacagccccaatgctgttcatgaggtggagaagtggctgccccggctgcatgctcttgtcgtaggacctggcttgggtagagatgatgcgcttctcagaaatgtccagggcattttggaagtgtcaaaggccagggacatccctgttgtcatcgacgcggatggcctgtggctggtcgctcagcagccggccctcatccatggctaccggaaggctgtgctcactcccaaccacgtggagttcagcagactgtatgacgctgtgctcagaggccctatggacagcgatgacagccatggatctgtgctaagactcagccaagccctgggcaacgtgacggtggtccagaaaggagagcgcgacatcctctccaacggccagcaggtgcttgtgtgcagccaggaaggcagcagccgcaggtgtggagggcaaggggacctcctgtcgggctccctgggcgtcctggtacactgggcgctccttgctggaccacagaaaacaaatgggggcatatcagacttgaaattgacaatttggggtcctgagattgaaacaggagtcaaaaccagagcccagggtagctgcggcccccggaccacgacgcccacttccccacacctcctgctgtccccctctccgcaggtccagccctctcctggtggccgcgtttggcgcctgctctctcaccaggcagtgcaaccaccaagccttccagaagcacggtcgctccaccaccacctccgacatgatcgccgaggtgggggccgccttcagcaagctctttgaaacctgagcccgcgcagaccagaagtaaacaggcaccttggacgggggagagcgtgtgtgtgatgggaaaatccggacccacgcgtgtgctgaaggcgtacggtgcttgccagattttcaacttgagcataaattggttgccattgagaatttaagaatctggaatattgcagcttttggttaaacttaatgcatggttggagatgttatggcgacactaaacaaagtattcctgaactttccttagctccttggtagtaactgggaagacagaaatgaagaaaatcacatgagaatgaagaattctttagcagctcaacagagtttctcggcctgctcccagatcggcgaagtttctacttgttactctctctgccggcgcccttcgttcctcctctgcttcccttccctagtctttcctccggcagggagctgggcaggggtccccgggtgtctccctgagtcccgactgcactgactgggtccatcagagggctgcttcgttctccagctcatcttcttttaaagtggtgactagcttggtggtatctggctgctggtgtttggcttattgacatactccagggtaatcaatgatgactttgtttggaaacccttttggaggcaccatgggaacagaaggaaacatgagtgacgctgacccttgagtgtgtgggtggggagctctgagacgcctcctgtcccacgctctccggtgtccgtgtctacacaggggtccccatgatacccaccggccccagcagggcagaccggaccggggacgggcacggtgaagggctgcagcctggggtctgacgtggcccctagtgctgtctcaggagaaggctctggaggacttgaggcatgctgggcctggtgcagtgatggcgctaaggagacccggggaaagacagtatcgtggtcacgtatgcttaggaagcagcacagccgtgtccttagggatgttcgcgtccagtaaagacactggtaactgcggtttcagccaacactcttcatggcagtgtcgacctcgggttagcttctgttgtctttgtggatggttttcctggagcggcctgacgttgacgtgttctctggtcccatgtcttagcggggcatggtacggtttcgtgcctgacgcgtgcattagggtgttctcttatactttcagtagcatctttccacagcaagggccaaaccctcctggttcccttcagagtctttttggcctgatgatgactcttgagtgataccctgtgatgcagacatgccccagatggattctactttctttaaaactagggactttcaagattaaaaaaaagattgtcactactaatttgacgcctaacttcagaagcttcactgtctacatgtgaacttttccagaaaaactgtgccatggacatttttcctctggggaattaacatctaaattctggtaactattaaaagacagatctggttaatttaaaaaaaaaaaaaaaaaa

SEQ ID NO: 4623 - DNA, 3180 bp, Homo Sapiens
  NM_018214
ggaagctccgcgcggcggcgggggcggcgacggcgactggcgggtgggagtggaggcaccggctggcgggcgggggtacagggacggggcaggggctcccgctccaggttccttgaagcacttccgaccgcgaagcccggcgcgagaagcgagctaacccaagagccaacaacgagcgcggagagggcagcggactgagcggagccgccggccagagcgggctcggagcccgggtctccgccgctcgggacccggctaggcggcggcgggggcggcgatgttccactgcatccccctgtggcggtgcaaccgtcatgtggagagcatcgacaagcgccactgctcgctggtctacgtccccgaggagatctaccgctatgcccggagcctggaggagctgctgctggacgccaaccagctccgcgagctgcccgagcaatttttccagctagtcaaattacgaaagcttggacttagtgataatgaaattcagcggctccctccagaaatagcaaacttcatgcagctggtggaactagatgtgtctcgaaatgagattcctgaaattccagaaagcatttcattctgtaaagcactgcaggtagctgacttcagcggaaacccactgactaggttgccagaaagctttcctgaattacagaatttaacatgtctttctgtaaatgacatctcactacagtctctacctgaaaatattggcaatctttataacctggcttcactggaactgagagagaatcttcttacatatcttcctgactctcttacccagctgcgaagactagaagaacttgatttaggaaacaatgaaatatataatttgccagaatcaattggagccctcttacatctaaaagatctctggttggatggaaatcaactgtcagaattacctcaggaaataggaaatctgaagaacctgctgtgtttagatgtctctgaaaacaggttggaaagacttcctgaagaaatcagtggcctgacttcattaacggatttagtcatttcccagaacttattagaaacgattccggatggcattggaaaactaaagaaactgtcaatcttgaaggtggatcagaatagactcacacagttgcctgaagcagttggggaatgtgaaagtctcactgagttagttcttacagaaaatcagctcctgaccctgcctaaaagcattggaaaactaaagaagttgagcaacttgaatgcagacagaaataaattagtgtccttaccaaaagagatcggcgggtgctgcagcctcactgtgttctgtgtacgtgacaacagactaactcggatacctgcagaggtgtcacaggcaacagaacttcatgtcctggatgtggcagggaacaggttgctgcatctacctttatccctgactgccttgaagttgaaggctctgtggctatctgacaaccagtcccagcccctgcttacattccagacagacacagactacaccacaggagagaagattttaacctgtgtcttacttcctcagctgccttctgaacctacttgtcaagagaatctgcctcgctgtggtgcactggagaacttggtaaatgatgtctctgatgaagcctggaacgagcgtgctgtcaacagagtcagtgcgatccgatttgtggaggatgagaaagatgaagaagacaatgagacgagaacacttctaaggcgagccactccacacccaggggagttaaagcacatgaaaaagacagtggagaatttacggaatgacatgaatgctgctaaaggactggactcaaacaaaaacgaggtcaatcatgccattgaccgagtgaccacttctgtgtagagtttcacctccaagttttacctcctgtgtcttcctctgctgtcgagacgttcctgtctgcttcccgggagcctcacgtgctccttgtcctaaccagcccccgcgcgccatcttcccgtggagtgtggggaagctgctgtctcccaggaagtgccttactcatcccgcaaccagtcagcgcaccagtggtctcccggtgtgattttttttttttttaatttcagttgtttgtaataagtagaatacactactgtaaacatacgacctttgtttttgtcttatgttggggtaaaggaaagcaggaaggggaatttttatcctcctcccttccgtaaagtgctgggatattttgaatcccccaagttcccttggacctactgatgagagatagttttatgtatggggaaaaatggatactttttaaaccttttttggcagctcagatggtgtaaattttaaaattttgtataggtatttcataacaaaaatatgtatttcttttttgttattttatcttgaaaacggtacatattttagtatttgtgcagaaaaacaagtcctaaagtatttgtttttatttgtaccatccacttgtgccttactgtatcctgtgtcatgtccaatcagttgtaaacaatggcatctttgaacagtgtgatgagaataggaatgtggtgttttaaagcagtgttgcattttaatcagtaatctacctggtggatttgtttttaaccaaaaagatgaattatcaatgatttgtaattatatcagttgattttttttgaaaagatgaaccaaaggatttgactgctaatattttattccttacactttttttctgaataagtctctcataatgagtgcagtgtcagactgtgcctactctgatggtatgtgccatttgtaaaataaaatagagcagaaaaacacaaaaagagaacactggttcagacattcagtgggcaagtaaattatggactgcaaaataatgatttttattcaagaaagctttaaaagttttatatccagatatacaaccacaataaagcaaaataacctactatcaaaatagaaatgttgctatctttataagtgcaatttaatttgtaaatagagtttgaatcaaagtatcacaaaatactgcttcaagatttaattttaaatctgctaatttaagggatattgggaaaagttttggtgtgtttctgttgatttcttttttgtatgctgtgataaaagagaaatgaaaagtgccagtcactgtgtggtgtctaggaaaatcatatatatttttttctccaagaaataaattcatcctggacattggc

SEQ ID NO: 4624 - DNA, 2642 bp, Homo Sapiens
  NM_018216
actttcaaaatggcggagtgtggagcgagcggcagcgggagcagcggggacagtctggacaagagcatcacgctgccccccgacgagatcttccgcaacctggagaacgccaagcgcttcgccatcgacataggcgggtcgttaaccaagctggcctactattcaacggtacagcacaaagtcgccaaggtgcggtctttcgaccactccggaaaggacacagaacgtgaacatgagccgccctatgagatttcagttcaagaagagatcactgctcgactgcacttcattaagtttgagaatacctacatcgaagcctgcctggacttcatcaaagaccatctcgtcaacacagagaccaaggtcatccaggcgaccgggggcggggcctacaagttcaaggacctcatcgaagagaagctgcggctgaaagtcgacaaggaggacgtgatgacgtgcctgattaaggggtgcaacttcgtgctcaagaacatcccccatgaggccttcgtgtaccagaaggattccgaccctgagttccggttccagaccaaccacccccacattttcccctatcttcttgtcaatatcggctctggagtctccatcgtgaaggtggagacggaggacaggttcgagtgggtcggcggcagctccattggaggcggcaccttctgggggcttggcgctctgctcaccaaaacgaagaagtttgacgagctcctgcacctggcctcgaggggccagcacagcaatgtggacatgctggtgcgggacgtctacggcggcgcccaccagactctcgggctgagcgggaacctcatcgccagcagcttcgggaagtcggccaccgccgaccaagagttctccaaagaagacatggcgaagagcctgctgcacatgatcagcaacgacattgggcagctggcctgcctccacgcacggctgcacagcctggaccgcgtgtactttggaggcttctttatccggggccaccccgtgaccatgcgcaccatcacctatagcatcaacttcttctccaagggggaagtgcaggcgctgtttctgaggcacgaaggctacctgggagccatcggagcgttcctgaaaggagctgagcaggacaatcctaaccagtacagctggggagagaactatgcaggcagctccgggctgatgagtgcatcacccgagctcggcccggcgcagcgggcgcggagtggcacttttgacttgctggaaatggaccggctggagaggccactggttgacctgccgctcctcctggacccgccctcctacgtgcccgacacggtggacctcaccgatgacgctctggcccgaaaatactggctcacctgctttgaggaggccctggacggggtagtgaagcgcgcagtggcgagccagccagactctgtggatgcagccgagagggcggagaagttccggcagaagtactggaacaagcttcagaccctgaggcagcagcccttcgcctatgggaccctgaccgtgcgcagcctgctggacaccagggagcactgtctgaacgagttcaacttcccggatccctactccaaagtgaagcagcgggagaatggcgtggcgctgaggtgcttccccggggtcgtgcgctccctggacgcgctgggctgggaggaacggcagctggcgctggtgaaaggcctcctggcggggaatgtcttcgactggggggccaaagccgtgtctgctgtccttgaatccgacccctactttgggtttgaagaagcaaagaggaagttacaagaaagaccctggctcgtggattcctacagcgagtggcttcagagattaaaggggccccctcataaatgtgccttaattttcgcagataacagtggaatagacatcattttgggagtcttcccctttgtcagggagctactccttagagggacagaggtcatcctggcgtgcaactcaggccccgccctgaacgacgtgacccacagcgagtccctcatcgtggcagagcgtattgcgggcatggaccctgtcgtgcactctgcgctccaggaagagaggctgctgctggtgcagacgggctccagctccccgtgcctcgacctcagccgcctggataaggggctggccgcactggtgcgggagcgtggcgcggatctggtggtcatcgagggcatgggccgtgctgtccacacaaactaccacgcagccctgcgctgcgagagcctcaagctggccgtcatcaagaacgcgtggctggccgagcggctgggcggccggctcttcagcgtcatcttcaagtacgaggtcccagccgagtgaggcgctgcagctgccggactcttctgcttgtcacttgtcaggaatgtgtttttaccaccacagggaaactgcgttcaaatcaacgtatttatatggtactgctgtgacgcggcacatacaccccagccgcacagatgcgtgtgacccagaggcgagacgcagctttgtcctgggagacgttcatattggaatctatttaactgctaaagaaccttttatatatatatatatataaatagagagatctatacaggtatgtctgacgggacgcagcaccgtgggcacgcaccaaatagagtttttaaaagagg

SEQ ID NO: 4625 - DNA, 1918 bp, Homo Sapiens
  NM_018217
gcagtggcgcggattcccggaagaacccgcagcagctcccaggatgaactggttgcagtggctgctgctgctgcgggggcgctgagaggacacgagctctatgcctttccggctgctcatcccgctcggcctcctgtgcgcgctgctgcctcagcaccatggtgcgccaggtcccgacggctccgcgccagatcccgcccactacagggagcgagtcaaggccatgttctaccacgcctacgacagctacctggagaatgcctttcccttcgatgagctgcgacctctcacctgtgacgggcacgacacctggggcagtttttctctgactctaattgatgcactggacaccttgctgattttggggaatgtctcagaattccaaagagtggttgaagtgctccaggacagcgtggactttgatattgatgtgaacgcctctgtgtttgaaacaaacattcgagtggtaggaggactcctgtctgctcatctgctctccaagaaggctggggtggaagtagaggctggatggccctgttccgggcctctcctgagaatggctgaggaggcggcccgaaaactcctcccagcctttcagacccccactggcatgccatatggaacagtgaacttacttcatggcgtgaacccaggagagacccctgtcacctgtacggcagggattgggaccttcattgttgaatttgccaccctgagcagcctcactggtgacccggtgttcgaagatgtggccagagtggctttgatgcgcctctgggagagccggtcagatatcgggctggtcggcaaccacattgatgtgctcactggcaagtgggtggcccaggacgcaggcatcggggctggcgtggactcctactttgagtacttggtgaaaggagccatcctgcttcaggataagaagctcatggccatgttcctagagtataacaaagccatccggaactacacccgcttcgatgactggtacctgtgggttcagatgtacaaggggactgtgtccatgccagtcttccagtccttggaggcctactggcctggtcttcagagcctcattggagacattgacaatgccatgaggaccttcctcaactactacactgtatggaagcagtttggggggctcccggaattctacaacattcctcagggatacacagtggagaagcgagagggctacccacttcggccagaacttattgaaagcgcaatgtacctctaccgtgccacgggggatcccaccctcctagaactcggaagagatgctgtggaatccattgaaaaaatcagcaaggtggagtgcggatttgcaacaatcaaagatctgcgagaccacaagctggacaaccgcatggagtcgttcttcctggccgagactgtgaaatacctctacctcctgtttgacccaaccaacttcatccacaacaatgggtccaccttcgacgcggtgatcaccccctatggggagtgcatcctgggggctggggggtacatcttcaacacagaagctcaccccatcgaccctgccgccctgcactgctgccagaggctgaaggaagagcagtgggaggtggaggacttgatgagggaattctactctctcaaacggagcaggtcgaaatttcagaaaaacactgttagttcggggccatgggaacctccagcaaggccaggaacactcttctcaccagaaaaccatgaccaggcaagggagaggaagcctgccaaacagaaggtcccacttctcagctgccccagtcagcccttcacctccaagttggcattactgggacaggttttcctagactcctcataaccactggataatttttttatttttatttttttgaggctaaactataataaattgcttttggctatcatattttggtaaaaa

SEQ ID NO: 4626 - DNA, 857 bp, Homo Sapiens
  NM_018224
caagcctggaagaactcgtcatgctctttgtagcgtggtgcttctgttgctcacaggacaacttgcctttgatgattttcaagagagttgtgctatgatgtggcaaaagtatgcaggaagcaggcggtcaatgcctctgggagcaaggatccttttccacggtgtgttctatgccgggggctttgccattgtgtattacctcattcaaaagtttcattccagggctttatattacaagttggcagtggagcagctgcagagccatcccgaggcacaggaagctctgggccctcctctcaacatccattatctcaagctcatcgacagggaaaacttcgtggacattgttgatgccaagttgaagattcctgtctctggatccaaatcagagggccttctctacgtccactcatccagaggtggcccctttcagaggtggcaccttgacgaggtctttttagagctcaaggatggtcagcagattcctgtgttcaagctcagtggggaaaacggtgatgaagtgaaaaaggagtagagacgacccagaagacccagcttgcttctagtccatccttccctcatctctaccatatggccactggggtggtggcccatctcagtgacagacactcctgcaacccagttttccagccaccagtgggatgatggtatgtgccagcacatggtaattttggtgtaattctaacttgggcacaacaaatgctatttgtcatttttaaactgaatccgaaagaaactcctattataaatttaagataatgtaatgtatttgaaagtgctttgtataaaaaagcacatgataaaaggaatcagaattaataaaatgtttgttgatc

SEQ ID NO: 4627 - DNA, 6462 bp, Homo Sapiens
  NM_018227
ggtcccgccccttcctaccttccagtagccggcggcggtgtctcaggcggcaatggaaggatccgagcctgtggccgcccatcagggggaagaggcgtcctgttcttcctgggggactggcagcacaaataaaaatttgcccattatgtcaacagcatctgtggaaatcgatgatgcattgtatagtcgacagaggtacgttcttggagacacagcaatgcagaagatggccaagtcccatgttttcttaagtgggatgggtggtcttggtttggaaattgcaaagaatcttgttcttgcagggattaaggcagttacaattcatgatacagaaaaatgccaagcatgggatctaggaaccaacttctttctcagtgaagatgatgttgttaataagagaaacagggctgaagctgtacttaaacatattgcagaactaaatccatacgttcatgtcacatcatcttctgttcctttcaatgagaccacagatctctcctttttagataaataccagtgtgtagtattgactgagatgaaacttccattgcagaagaagatcaatgacttttgccgttctcagtgccctccaattaagtttatcagtgcagatgtacatggaatttggtcaaggttattttgtgatttcggtgatgaatttgaagttttagatacaacaggagaagaaccaaaagaaattttcatttcaaacataacgcaagcaaatcctggcattgttacttgccttgaaaatcatcctcacaaactggagacaggacaattcctaacatttcgagaaattaatggaatgacaggtttaaatggatctatacaacaaataacggtgatatcgccattttcttttagtattggtgacaccacagaactggaaccatatttacatggaggcatagctgtccaagttaagactcctaaaacagttttttttgaatcactggagaggcagttaaaacatccaaagtgccttattgtggattttagcaaccctgaggcacctttagagattcacacagctatgcttgccttggaccagtttcaggagaaatacagtcgcaagccaaatgttggatgccaacaagattcagaagaactgttgaaactagcaacatctataagtgaaaccttggaagagaagcctgatgtaaatgctgacattgtgcattggctctcttggactgcccaaggctttttatctccacttgctgcagcagtaggaggtgttgccagccaagaagtattgaaagctgtaacaggaaaattttctcctttgtgccagtggttatatcttgaagcagcagatattgttgaatcactaggcaaacctgaatgtgaagaatttctcccacgaggagatagatatgatgccttaagagcttgcattggagacactttgtgtcagaaactgcaaaatttaaacatcttcttagtagggtgtggagccataggctgtgaaatgttgaaaaattttgctttacttggtgttggcacaagcaaagagaaaggaatgattacagttacagatcctgacttgatagagaaatccaacttaaatagacagttcctatttcgtcctcatcacatacagaaacctaaaagctacactgctgctgatgctactctgaaaataaattctcaaataaagatagatgcacacctgaacaaagtatgtccaaccactgagaccatttacaatgatgagttctatactaaacaagatgtaattattacagcattagataatgtggaagccaggagatacgtagacagtcgttgcttagcaaatctaaggcctcttttagattctggaacaatgggcactaagggacacactgaagttattgtaccgcatttgactgagtcttacaatagtcatcgggatcccccagaagaggaaataccattttgtactctaaaatcctttccagctgctattgaacataccatacagtgggcaagagataagtttgaaagttccttttcccacaaaccttcattgtttaacaaattttggcaaacctattcatctgcagaagaagtcttacagaagatacagagtggacacagtttagaaggctgttttcaagttataaagttacttagcagaagacctagaaattggtcccagtgtgtagaattagcaagattaaagtttgaaaaatattttaaccataaggctcttcagcttcttcactgtttccctctggacatacgattaaaagatggcagtttattttggcagtcaccaaagaggccaccctctccaataaaatttgatttaaatgagcctttgcacctcagtttccttcagaatgctgcaaaactatatgctacagtatattgtattccatttgcagaagaggacttatcagcagatgccctcttgaatattctttcagaagtaaagattcaggaattcaagccttccaataaggttgttcaaacagatgaaactgcaaggaaaccagaccatgttcctattagcagtgaagatgagaggaatgcaattttccaactagaaaaggctattttatctaatgaagccaccaaaagtgaccttcagatggcagtgctttcatttgaaaaagatgatgatcataatggacacatagatttcatcacagctgcatcaaatcttcgtgccaaaatgtacagcattgaaccagctgaccgtttcaaaacaaagcgcatagctggtaaaattatacctgctatagcaacaaccactgctacagtttctggcttggttgccttggagatgatcaaagtaactggtggctatccatttgaagcttacaaaaattgttttcttaacttagccattccaattgtagtatttacagagacaactgaagtaaggaaaactaaaatcagaaatggaatatcatttacaatttgggatcgatggaccgtacatggaaaagaagatttcaccctcttggatttcataaatgcagtcaaagagaagtatggaattgagccaacaatggtggtacagggagtcaaaatgctttatgttcctgtaatgcctggtcatgcaaaaagattgaagttaacaatgcataaacttgtaaaacctactactgaaaagaaatatgtggatcttactgtgtcatttgctccagacattgatggagatgaagatttgccgggacctccagtaagatactacttcagtcatgacactgattaatacaagttgtcttaacgttactccaggaccacttgattttggaaagagtgcacttaattcagaagctaaagaaaatcagttcataatactatggatttctctttcattaagccttaattttaagggaaacatcagtaagaaactgcactgaagaattataaaacattttggggcatagcatacacttgtctaacggttcacacgtggctatgatcacaagcaactttgaactggaatgctatttacaaaagttttgtgtattaatctgtgtattaatctctctggataaaaagaaggaaaaaatatgtatgaccagaacagatatggatgaagaaattgaaagcaacgaatgcaactattcaaaaagtttaattttatgaatttcttttttgtttagtcttgaagactgattttctatgcaaatagtgtttggcatcctgcacctctgatatgatttggctttgagaatttaataccactgggaagaagtatggtagtggtggatgaagggtggatattttaaattgtgcagttacagtttactgtcctattacctctgctcgtttaaccagtttgttatatcactgtgtccccaaaatcaggatttttgttgatagcatcagtgttgtaggagcaataggtcagatgagacatattaacttagactaaacgtgaacagtattatatggactctcacaacgctcttagagaatccgtgaatgtgaacagacaaatgtggctaaccatttgattcttcagtatgccttctaatgtggctattttatttatgtgagactctaaacctgattgtcctaatatataaaactaaaagattttgtaaagggagtgtctttagaaatagatgaaatgtagaatgttaaaaattattgctagggtagtcttttttttttccagaaacctaattagggtattaaattttgtgttttttttgttttttttttttaaacagaagcatgttatttcattcccattcccagaaagggagttaatgaagataaaaatttattttttaaggtctttattgagagaaactttgttttctgatatgaactattgcagatgtttttataaatactttcattaaaatgatgtaaacagtagtacccaacactgtaaactcagtgaaaatagtaaatgattcttttattactaagactgtcatgcattctgaagcagttggcttttttttaaccataggaagtaatttccctctagctcctttccttctactctcctgctcagaccattagtaggtactttgttaaataaaaaactagattaacatcaatattactccaatttggtatcttttacactatgtattatacctactttctttttatttcatttacaaatagtttaaattactttatcaaccagctgtattgtttccctcttgtaaaagtaccatcaagtggggaaaatgtatgtggaagtggagagtgaatttgtatgactaaaggataatctgtacatggggaagtgggcaaaagtggataggatgaatttaaagaaaatgactacctttggaaaaaagaaattaaattttgttcacatatcctaccctttcccattgtgcatatcccaagtgtcatatttaaaactaaggttacttaaaacagaatccaggaatatcaaggctctgtggcttggaattttagaggataggactaataaaaggacttttgcaaagaaggcttttttccacgttcactttgttttgtgttctttgaaagtaactgatacttttcgggtagttaattcagcagtccataaatatgatccagtaacttgcttatattttattgaagtctcgacagctcttcagaagtaaatttagaacgatgctgtcagttcatatttatagatattagtgttttagcagataaaacaaaatcaacaaaaattaagttcattttgtgattaaacctgcaaccatttttccattactttttttctatagttaatggttattgccatgatttcttctgtttggttctactaagctagaaagccagggtgaagttaatgataattcccattattttatttctgtaccatgagattgctgttgatgactgaaataccaggtgcaaaaattaatgatttgatttttgtacagtttcaatgagtattttttacttattaaaaataaattaagaaatgtaagaatatctttgtaaatcatgtttcataagttgactccagagattctgattttgctgtttattttgtgagtaatgttgctttggtgtttcctgattttcaagtttgcaatcatggagatacagcagttattaggtgtggaaggacattacctcaaatgtcctcagatggctccaggaaattcttttaaaacagttggagagaaatagtcgtgaccatgtaaaacctagaggatctggtaaatcccatactactggttagggatttgtaaagtccatttctttttagagttcaaagcagttctgttacttgtccataagttcctcataaattgtcccaaaggtaggacatggaaataaatgtatatctttattttttaatctactatgtcacactctggtgatattcatggaacattaaaaaagcaactatgtttattttataattagtaaaatgaagatagaaaattgttcttttgaaatttttagggaaaaaaaaaatctcgtgacctaaatctttccactataatgaatattcattgtgattgcaaatatctaattttatataatcactgtgtatggatttagcgattttacttttcatagattcaaaaacatataatctgaatgctttctctgaaaaaaaaaaaatcagagttgagctcttgaggatcagagttaagtatccattgataatatgtgttcattttgctctatgtcataactttgtttttttattgagaaatatatatttttcaaaaacacatatatattcaaaaatacataaaatataaatatgcagttcaaggaataattttaaagcaactatataactagcactcagcttagtagaatatattgacagcagttcagaaattacacatgtagttccttcccagtcacaaccagctccctgccacgtaccctttggtaattaccactatcctaccttgtatgataattgtctctttgtttttatagtgttaccacctatgtgtgtaaacttaaacaatacagtttgcttgtttttgagttttatttaaaatcataaaaaaaaaaaaaaaa

SEQ ID NO: 4628 - DNA, 3110 bp, Homo Sapiens
  NM_018229
tacgccggaagtggaactgcgcgcgccagggaggttgtcgggaggggccggcgaataaaacgagcggcgaaagaaccgaaaaaaggctcgacgctaccgtgtatgaggaactttgatccttgcgggccaccattccggaagtagaatttagaggaagaaaataccggagttgcagggtataggtaaatttctcaaggttataggttggggttcttagaactttttgtggtgtgtgttggcctagagcgactcagaagcgttagtgacttcacctaaaaaagctaacctctctgctgagcgcgaccggtatgcggcgcaggatgagcctcagggcttctgttaagagtctgtctgagaaagccggtctgcgctgttcctcggtggcgaccttaattatgagatgagctaatgctttactgacttaaccatggcgcagcgggcagtgtggctcataagccacgaaccgggaactccactttgtggcaccgtgagattctccagacggtatccaactgttgaaaaacgagccagagtcttcaatggagcaagttatgtgcctgttcctgaagatggtccctttcttaaagcactgctctttgaacttagattattggatgatgataaagacttcgttgagagtcgtgatagctgttcacgcatcaataaaacatccatttatggactcctgataggaggtgaagaactctggccagttgttgcttttctgaagaatgacatgatatatgcttgtgttccactagttgaacaaactctgtcccctcgtccgccactaattagtgtcagtggagtttcacaaggctttgaatttctttttgggatacaggattttctttattcaggtcaaaaaaatgactctgagctgaatacaaaattgagccagttgcctgacttgcttctgcaggcttgtccatttggtactttattagatgccaacttacagaattcattagataataccaattttgcatctgtgactcagccacagaaacagccagcttggaaaactgggacgtacaaaggaaaaccacaagtttctatttctatcactgaaaaggtaaaatccatgcaatatgataaacagggtatagcagatacatggcaagttgttggaacagtgacttgcaagtgtgatttggaaggaatcatgccaaatgttaccatcagcttgagtctccccaccaatggatctccacttcaggatattctagttcacccttgtgtaacttctcttgactctgcaattctgacttctagtagtattgatgcaatggatgactctgcatttagtgggccttacaaatttccattcactccacctttagagtcattcaacttatgcttctacacttcccaggtccctgtcccaccaattttgggtttttatcaaatgaaggaggaagaagtacaactaagaataaccattaatttaaaacttcatgaaagtgtgaaaaataattttgaattctgtgaagcccatatacctttttacaatagaggtccaattacacatttggaatacaaaactagttttggccagcttgaagtatttcgagagaaaagcttattgatctggattattggccagaagttcccaaaatcaatggaaattagtctttctggaactgtaacttttggagccaagagccatgagaagcagccatttgacccaatttgtactggagaaacagcatatttaaagcttcattttaggatcttagattacacacttactggatgttatgcagatcagcattcagttcaagtttttgcatcaggaaaaccaaaaataagtgcacaccggaaactaatttcttctgattattacatctggaattctaaagcccctgctccagtaacatatggatcattattattgtaatagtctcatgtttaaatgggattatataatgataacagtttaaagaaaatcataatcttatatttttaatgtggatgcatataacctgtgagtgaaaaatcactgaatgatttaattgtaaaagtagtcttatgtggtgtttgtagtctgatagagcttgaaaggacattttaaaagctaatgtctccaattttgttaaccttcgattttatgccagtataattcagaacatagaaaagtaatgattcacttgggctcattttagactggtcctgggtcaccctgccacacttgtttcctagtgtttctgtggcagacattgctaatcaattacagcccttttctgtactgagccttggataaagggtcaggctcctttttagttcagagattcaggcagccactcccagtgggttgtagataatgtgcaagataaaaactattttctcttccaaatctaagtactaagctcctagtataaggtgttgttacagaataccagagaccatgttagagacaactacatctcttcaaaaaacagccaacagagacaaaggaaaagtgtttaaatagtaagctgttcttcttaatcagaactatcctattgactaataaataatctgcataattctacttaaggtgtgtaatctctgttctagagttagtttttaagtaagcttgttaatctgccactttgacattttgcttaggatgtcagtagccatattaagatgtgtagaataccttcagaagatgatcatagtgttttgtaatcatttaatgtctgcagccaaatttttaaaggtaatttagacctaatactgctcttgctgtgtcttattaagttaaaattaatgaatgaattctggtaaaaattcaaaaggcactctgtgagtagagagtatcatttaagcttattttagtcacatgtagtatatatctccttaaagctgtcactctcactttcttaccattctcttgatttcttcagaaaccatctagtcatcatctttatactctacctgcttctgcaattatatatcatattatgttttcagagcagttcattgtcaagttggactttaagtgaccattcaagaaaagatgaaatctcacgaacctcaaaacttcattcatgtctttttacaaatgagaaaaaaaaatgcattaaagattaatactcaatttgattataaaaaaaaaaaaaaaa

SEQ ID NO: 4629 - DNA, 4170 bp, Homo Sapiens
  NM_018230
ctcttcccttaggtgtttaagttccgcgcgcaggccaggctgcaacctgacggccagatccctcgctgtcctagtcgctgctccttggagtcatgttcccagccgccccttctccgcggaccccgggtaccgggtcccgaaggggcccgctggccggactcgggcccggctccacgccccggacggctagcaggaagggtctgcccctggggtctgcagtcagctccccagtgctcttctcgccggtcggccggcgtagctcgctaagctcgcggggaacaccaacacgaatgttcccacaccactccataactgagtctgtgaactatgatgtgaaaacgtttggatcttctcttcctgttaaagtcatggaagccctaacattggctgaagtcgatgaccagctgaccattaacatagatgaaggtggatgggcttgtctggtgtgcaaagagaagctcattatttggaagattgctctgtcacctattactaagttatccgtttgcaaagaacttcagctgccacctagtgatttccactggagtgccgacttagtggctctttcttactcttctccctcaggtgaagcacattctactcaggctgttgctgtcatggttgccaccagagaaggatctatccgctattggccaagccttgctggtgaagatacctacacagaggcttttgtagattcgggaggtgataagacttacagtttcctaacagcagtgcagggaggaagttttattttgtcttcatcaggaagccaactaattcggttgatacctgagagctcaggaaagattcatcagcatatcctgcctcaggggcaaggcatgctttcaggaattggtcgaaaagtttcttctctttttggaattttatctcctagtagtgatctcacactttcaagtgttctctgggatagagagagatcaagcttttatagcctgacgagttcaaacatcagtaaatgggaattagatgattcttcagaaaagcatgcatacagttgggatataaatagagccctgaaggaaaacattaccgatgctatttggggatctgaaagtaactatgaagctattaaagaaggagtcaacattcgatatttggacttgaagcaaaactgtgatgggctggtgattttggcagcagcatggcactcagcagacaatccatgtctcatctattactctctgataacaatagaagataatggttgccaaatgtcagatgcagttactgtagaagtcactcaatataatccaccttttcagtctgaagacctgattttgtgtcagttgacggtcccaaacttttcaaaccagactgcctatctgtataacgaaagtgctgtctatgtgtgctccacaggaactgggaaattttctcttccccaggagaaaattgtctttaatgcacaaggagatagtgttttaggtgctggtgcctgtggtggtgttcctatcattttttctagaaacagtggactggtgtctattacttcaagggaaaatgtgtctatattggcagaagacttggaagggtctttagcatcttcagttgctggaccaaacagtgagagtatgatttttgagaccactacaaagaatgaaactatagcccaggaagataaaatcaagttgctgaaagctgcctttctgcaatactgcagaaaagatttaggtcatgctcaaatggtggttgatgagctcttttcctctcactctgatttggattctgattctgaactagacagggcagttacccaaatcagtgtagacctgatggatgactacccagcatctgacccacggtgggctgagtctgtccctgaggaagcacctgggttcagcaatacgtcactgattatccttcaccagctagaagacaagatgaaagctcactcttttcttatggactttattcatcaagttggcttatttggacgtctaggcagttttccagttagagggacaccgatggccactcgactgttgctctgtgagcatgccgaaaagctgtcagccgccattgttctcaagaaccaccactcccggctttctgaccttgtcaacacagccatattgattgctttgaacaagagggagtatgaaatcccatccaacctgactcctgcagatgtctttttcagggaggtatcccaagtagataccatctgtgagtgcttactggagcatgaggagcaagtcttgagggatgcacctatggattccattgaatgggctgaagtggtgatcaatgtgaacaatattctcaaggatatgctgcaggctgctagtcattatcgccaaaatagaaactctttgtatagaagagaagaatcactagaaaaagaacctgaatatgttccatggacggcaacaagtggtcctggtggcatccgaacggtaataatacgccagcatgagattgtcctgaaggtggcttatccacaggcagacagcaacctccgaaacatcgtgaccgagcagctggtagccctgatcgattgcttcctggatggttatgtttctcagcttaagtctgtggataaatccagtaatcgggaaagatatgacaatctggagatggaatacctacagaaaagatcagatctcttatctcctcttctttcactaggccagtacctgtgggctgcttctctagcagagaaatactgtgactttgatatattggtacaaatgtgtgagcagactgacaaccagagccgactccagcgctacatgacccagtttgctgatcagaatttttcagactttctcttccgttggtatctggagaaaggaaagcgaggcaaattattatctcagcccatttctcagcatggacagttggcaaattttttgcaagctcatgaacatctcagctggttacatgaaattaatagccaagaattagaaaaggctcatgcaacacttctgggtttggcaaatatggaaactcgttactttgcaaagaagaaaacccttcttggcttgagtaaattggctgcattagcttcagacttttcagaggatatgctacaagaaaaaattgaagaaatggctgagcaggagcgctttctactgcatcaggagaccctacctgaacagctgctggcggagaaacagctaaatctcagtgcgatgccagtattgactgcaccacaactcattggtctatatatctgtgaagaaaatagaagagctaatgaatatgatttcaagaaagctttggacttgttggaatatattgatgaggaagaagatataaatataaatgatctaaaactggaaatcctttgcaaagctcttcagagagataactggtccagttctgatggcaaagatgatccaattgaagtatctaaagacagtatatttgtgaagatcttacagaaacttttaaaagatggcattcagctcagtgagtacttaccggaggtgaaagacctgctacaagcggatcagcttggaagcttaaagtccaatccttacttcgagtttgttttgaaagcaaattatgaatattatgttcagggacaaatataactttttctaaaaatggccattgtttatgaaatctgtataagtgtgtccttatacaaattttaggccataaacaagtgtaagtttgtacaatttcataacatgtatagctgagtttttatactttatatgtaggaagctaatataaaatagttatgtaactgtgattttggttttcagttatgtgacttgttttttccacctgaaatgtgtcagttgttgttcctgtactcggtgccctttctttttactctcacgtggtcccaggttctggagttcttgtcctggttctagctgctcacatgtacaaatcacttctaggcctcagtttctgcgactatgaaaattactagattgcactagcttgtctctaaaattgctgtgactccagatactttgcactgaagagaatctagggtgtttgatatctgtttcagttagggctaatgggaaatgtctagtaagataaatgtcaacttttgctgacttattatgagatgaaaaaccaaaggagagtgggcctaactcatgtgagcttgataactgatgaactcattgggagcattttaaacttttctacataaataataaatgagcactaatgaaagta

SEQ ID NO: 4630 - DNA, 2773 bp, Homo Sapiens
  NM_018231
atgtgatgcatgctcacgtgtctccgcagccggctcgggaaagaatcccccaagctccatttcatgagtaagcgtgagagccgctcagtttcctccagctctgctgaagccagcacagaagtagcccaaactcttccctctgctgacagcaaattttaggcaaagtcttgagaaagaagaaattgggtccagaaagggaagtgaggagaatcagatcccagacctttggggagaaggagcaaccgcctctggcacagcccatcagggagaaagagcaggttgagaagagtcctaagctaacagccccaaacaggtgggtgttgctcagctccctgaggcatgtggttgtaaggcagaacccacagaccttgcaggaagaaggctctcggggccatggcccaggtcagcatcaacaatgactacagcgagtgggacttgagcacggatgccggggagcgggctcggctgctgcagagtccctgtgtggacacagcccccaagagtgagtgggaagcctctcctgggggtctggacagaggcaccacttccacacttggggccatcttcatcgtcgtcaacgcgtgcctgggtgcagggttactcaacttcccagcagccttcagcactgcggggggcgtggcagcaggcatcgcactgcagatgggtatgctggttttcatcatcagtggccttgtcatcctggcctactgctcccaggccagcaatgagaggacctaccaggaggtggtatgggctgtgtgtggcaagctgacaggtgtgctatgtgaggtggccatcgctgtctacacctttggcacctgcattgccttcctaatcatcattggcgaccagcaggacaagattatagctgtgatggcgaaagagccggagggggccagcggcccttggtacacagaccgcaagttcaccatcagcctcactgccttcctcttcatcctgcccctctccatccccagggagattggtttccagaaatatgccagcttcctgagcgtcgtgggtacctggtacgtcacagccatcgttatcatcaagtacatctggccagataaagagatgaccccagggaacatcctgaccaggccggcttcctggatggctgtgttcaatgccatgcccaccatctgcttcggatttcagtgccacgtcagcagtgtgcccgtcttcaacagcatgcagcagcctgaagtgaagacctggggtggagtggtgacagctgccatggtcatagccctcgctgtctacatggggacaggcatctgtggcttcctgacctttggagctgctgtggatcctgacgtgctcctgtcctatccctcggaggacatggccgtggccgttgcccgagccttcatcatcctgagcgtgctcacctcctaccctatcctgcacttctgtgggcgggcggtggtggaaggcctgtggctgcgctaccagggggtgccagtggaggaggacgtggggcgggagcggcggcggcgagtgctgcagacgctggtctggttcctgctcaccctgctgctggcgctcttcatccctgacatcggcaaggtgatctcagtcattggaggcctggccgcctgcttcatcttcgtcttcccagggctgtgcctcattcaagccaaactctctgagatggaagaggtcaaaccagccagctggtgggtgctggtcagctacggagtcctcttggtcaccctgggagccttcatcttcggccagaccacagccaacgccatctttgtggatctcttggcataaccactgcctcccagggaacacaaggcctttgccattggtcgcaggaacccatctcttagagctatggggccattcttagtccacgatcattccaactggtgggatgacatccggacatcctcttccagggactggggcaaactcaggccccacacctctggacagctcaaatccagtccccttcctgctccccagtcctggcagtgccgtggatggcggcaggaagtctcacatcatagaggacccctcctcctctcccagttctcaacttctccatgcctggaatccacgggtgaagagagtcggtagatctcataagaaagaatccagtctgacttccctctggagaatgactatggacagaaggccaccatcctccacagagcaccctgtcctgagtaggggttgtgctcattaccccaggccagtggtagcttcctcaggagcctggccacttccaaaggtagcactgaagtcgtgcaaatacatagtcaggtagattcagaccttgtccacaccttcctgggcaacccccaccatgaacctgtcagcctctttcccatagctaatagacatttcccaggccttgaggggccccaccctgtctctttcatcaaacctgatggtccaggctgggcatccctctcctcctccatccccagacatcaccaggtctaatgtttacaaacggtgccagcccggctctgaagccaagggccgtcccgtgccacggtgctgtgagtattcctccgttagctttccccataaggttgggagtatctgcttttgtgtctgagatgggcccctcttttcagaggccgcagggtgggtgatggagaaggctgagaacctttcagaccctctgtgtgggctgggctggtcagaatcagggtgtacctccccgacaccttctttttcagtgatgttttctcttctccctgcctttcctctgcctcctcccctgccagccctagcgtgactacccagagac

SEQ ID NO: 4631 - DNA, 3020 bp, Homo Sapiens
  NM_018233
agggccgggaaacacgataaaggggacatgccgggagttgcagtaccctcaggaaggtagcgtcttgatctgcgtggcgtggttctgtgccttgggaagagatgaatgggaagcggccagcggagcccggcccagcccgggtgggaaaaaagggaaagaaggaggtgatggcggagttttcggacgctgttacggaagaaaccttgaaaaagcaggtggctgaggcctggagccgcaggacgccgttcagtcacgaagtcattgtcatggacatggacccttttcttcactgtgtgatcccaaacttcatccaaagccaagacttcttagaagggcttcagaaggaactgatgaacttggacttccatgagaagtataatgatttatataagttccagcagtctgatgatttgaagaagagaagagagcctcacatctccactttaaggaaaattctgtttgaagatttccggtcctggctttctgatatttctaaaattgacctggaatcaaccattgacatgtcctgtgctaaatatgaattcactgatgccctgctgtgccatgatgatgagctggaagggcgccggattgccttcatcctgtacctggttcctccctgggacaggagcatgggtggtaccctggacctgtacagcattgatgaacactttcagccgaagcagattgtcaagtctcttatcccttcgtggaacaaactggttttctttgaagtatctcctgtgtcctttcaccaggtgtctgaagtgctgtctgaagaaaagtcacgtttgtctataagtggctggtttcatggtccatcattgactcggcctcccaactactttgaaccccccatacctcggagccctcacatcccacaagatcatgagattttgtatgattggatcaaccctacttatctggacatggattaccaagttcaaattcaagaagagtttgaagaaagttctgaaattctcctgaaggagtttcttaagcctgagaaattcacgaaagtctgtgaggccttggagcatggacatgtggaatggagcagccgaggtccccctaacaaaaggttttatgagaaagctgaggagagtaagcttcctgagatattgaaggagtgcatgaagttatttcgctctgaggcactattcttgctgctctccaacttcacaggcctgaagcttcatttcttggccccttcggaagaagatgagatgaatgataaaaaagaggcagaaaccactgatatcactgaagaagggactagccatagtcctcctgagccagagaataatcagatggccatcagcaacaacagccaacagagcaatgagcagacagacccagagccagaggaaaatgaaacaaagaaagaatcaagtgttcccatgtgccaaggggaactgaggcattggaagaccggtcactacactttaattcatgaccatagcaaggctgaatttgccctagacttaattctgtactgtggctgtgaaggctgggagccagaatatggcggttttacttcttacattgccaaaggtgaagatgaagagctgctaacagtgaatccagaaagcaattctttggcattggtctacagagacagagagactctgaaatttgtcaagcatattaaccaccgaagcctggaacaaaagaaaaccttcccaaacagaacaggtttctgggacttttcattcatctattatgaatgacagcactgggcaaagctgaacaaaaatgtgacccttcgtaattactgggaagtctgaaagagctaagcatggagtcaaggagaactacatggtagcttgcctgacagtgttcttaaaactggttgtcttttactaggactcataatgattgtcctcaaccgagaccttgagcttgcagctaagtacttatctcttgattaaaaaaaaaaagttggcttttttttttttaacatttagtcctttttccatattggcttcttcagtgaatttttaagttcaatttgtttttattgaggtaaaatatttataacataaaactgaccagcttacccatttttaaatatgcaattcagtggattaagtacattctcattgttgtccagccatcaccatcatccatctccagaagttttccatcttcccaaattctgtgcccattgaacaataactccccacctccccttcccctagcaacagccataccttttgtctctatcatcaacttcactactcatatttctcatgtaagtggaatcatacagtatttgtccttttgtgactggtttcacttagcataaagtctttaagatgcatccatgtttccagtgtttcggtttttttagaaaaactcatacgtgattgcagccgggcatggtggctcacgcctgtaatcccagcacttgggaggccaaggcaggcggatcacctgaggtcaggagttaaagaccagcctgacaaacatggagaaaccccatctctactaaaaatacaaaattagctgggcgtggtggcacatgcctgtaatcccagctactcaggaggctggggcaggagaattggttgaacccaggaggcggaggttgcagtgagccgagattgtgccactgcactccagcctgggcaacaagagtgaaactctgtctcaaaaaaaaaaaagaagaaaaaaacataagtgattgcagaattttgttcttctcataatttctggtttagaaaattatggagccttacatcctgatcatgctgggccttagaattctgacacagtgagtcatcacatttcctcccactgcctgtggccttgttccaccatgactctcacagtacagtgtaggcttagtgtagtattattcccttggaaagggtctggcctaccatcacatgccccaagaaacttctggttggtaaagaagataggctgcttattgccatgtgtagtcacttccaagtgcccactgcctttccatcctgcaattgtggcctgtgtataattaaatgattttagcctca

SEQ ID NO: 4632 - DNA, 3938 bp, Homo Sapiens
  NM_018234
gaggaggagcctcgggccgagccaccgccttcgccgcggaccttcagctgccgcggtcgctccgagcggcgggccgcagaggttcaagcgattctcctgcttcagcctccggagtagctgggattacaggcacgtgccaacacacccagccaccaaaatgccagaagagatggacaagccactgatcagcctccacctggtggacagcgatagtagccttgccaaggtccccgatgaggcccccaaagtgggcatcctgggtagcggggactttgcccgctccctggccacacgcctggtgggctctggcttcaaagtggtggtggggagccgcaaccccaaacgcacagccaggctgtttccctcagcggcccaagtgactttccaagaggaggcagtgagctccccggaggtcatctttgtggctgtgttccgggagcactactcttcactgtgcagtctcagtgaccagctggcgggcaagatcctggtggatgtgagcaaccctacagagcaagagcaccttcagcatcgtgagtccaatgctgagtacctggcctccctcttccccacttgcacagtggtcaaggccttcaatgtcatctctgcctggaccctgcaggctggcccaagggatggtaacaggcaggtgcccatctgcggtgaccagccagaagccaagcgtgctgtctcggagatggcgctcgccatgggcttcatgcccgtggacatgggatccctggcgtcagcctgggaggtggaggccatgcccctgcgcctcctcccggcctggaaggtgcccaccctgctggccctggggctcttcgtctgcttctatgcctacaacttcgtccgggacgttctgcagccctatgtgcaggaaagccagaacaagttcttcaagctgcccgtgtccgtggtcaacaccacactgccgtgcgtggcctacgtgctgctgtcactcgtgtacttgcccggcgtgctggcggctgccctgcagctgcggcgcggcaccaagtaccagcgcttccccgactggctggaccactggctacagcaccgcaagcagatcgggctgctcagcttcttctgcgccgccctgcacgccctctacagcttctgcttgccgctgcgccgcgcccaccgctacgacctggtcaacctggcagtcaagcaggtcttggccaacaagagccacctctgggtggaggaggaggtctggcggatggagatctacctctccctgggagtgctggccctcggcacgttgtccctgctggccgtgacctcactgccgtccattgcaaactcgctcaactggagggagttcagcttcgttcagtcctcactgggctttgtggccctcgtgctgagcacactgcacacgctcacctacggctggacccgcgccttcgaggagagccgctacaagttctacctgcctcccaccttcacgctcacgctgctggtgccctgcgtcgtcatcctggccaaagccctgtttctcctgccctgcatcagccgcagactcgccaggatccggagaggctgggagagggagagcaccatcaagttcacgctgcccacagaccacgccctggccgagaagacgagccacgtatgaggtgcctgccctgggctctggaccccgggcacacgagggacggtgccctgagcccgttaggttttcttttcttggtggtgcaaagtggtataactgtgtgcaaataggaggtttgaggtccaaattcctgggactcaaatgtatgcagtactattcagaatgatatacacacatatgtgtatatgtatttacatatattccacatatataacaggatttgcaattatacatagctagctaaaaagttgggtctctgagatttcaacttgtagatttaaaaacaagtgccgtacgttaagagaagagcagatcatgctattgtgacatttgcagagatatacacacactttttgtacagaagaggcttgtgctgtggtgggttcgatttatccctgcccaccccacccccacaacttcccttttgctacttccccaaggctcttgcagagctagggctctgaaggggagggaaggcaacggctctgcccagagccatccctggagcatgtgagcagcggctggtctcttccctccacctggggcagcagcaggaggcctggggaggaggaaaatcaggcagtcggcctggagtctgtgcctggtcctttgcccggtggtgggaggatggagggattgggctgaagctgctccacctcatccttgctgagtgggggagacattttccctgaaagtcagaagtcaccatagagcctgcaaatggatcctcctgtgagagtgacgtcacctcctttccagagccattagtgagcctggcttgggaacaagtgtaatttccttccctcctttaacctggcgatgagcgtcctttaaaccactgtgccttctcaccctttccatcttcagtttgaatgactcccaggaaggcctagagcagaccctttagaaatcagcccaagggggagagcaagagaaaacactctagggagtaaagctccccgggcgtcagagttgagccctgcctgggctgaaggactgtcttcacgaagtcagtcctgaggaaaaatattggggactccaaatgtcctctggcagaggacccagaaaaccacactggctccaacttcctcctcatggggcattacacttcaaaacagtggggagcaacttttccaccaaagctacaaacctaaaatgctgctgccccaaagcacaagagggaagagcaccgccggggccacaggacgtctgtcctccagtcacaggccatccttgctgctccctactgactctagcttacttcccctgtgaagaaacaggtgttctcggctgagcccccaaccctctgcagaaccaggttgatctgccacagaaaaagcatctttgaagacaaagagggtgaggtcttcatgagtctcctgggcccaaagccatcttctgatggaaggaagagagtagggccagtgaaggctgcccagagagaatgtcacagatgaggctgcccctgccccccccccgccagggaggtttcatgagctcatgtctatgcagcacataagggttcttcagtgaaaagcaggagaagagcccactgcaaggatagctcattaggcacatgaccgatgcagggaaggccatgccggggaagctcttcctgcaggtattttccatctgctgtgccaaggctgagcggcagaaacttgtctcataaattggcactgatggagcatcagctgtggcccacagagagccttgctgagaagggggcaggtaaagcagagattttagcattgccttggcataacaagggcccatcgattccctactaatgagaggcagggagagcatgggcaatggagacccaccaatgatccccaaccccggtgggtactggctgcctgccctgggccagggaatggctccttataccaaagatgctggcacatagcagaacccagtgcacgtcctccccttcccacccacctctggctgaaggtgctcaagagggaagcaattataaggtgggtggcaggagggaacaggtgccacctgctggacaatcacacgaaaggcaggcgggctgtgtactgggccctgactgtgcgtccactgctgtcttccctacctcaccaggctactggcagcagcatcccgagagcacatcatctccacagcctggtaaattccatgtgcctctgggtacaaaagtgcctcaacgacatgctctggaaatcccaaatgccacagtctgaggttgatatctaaaatctatgccttcaaaagagtctctgttttttttttttaacctggtagacagtataaaagcagtgcaaataaacacctaaccttctgcaaa

SEQ ID NO: 4633 - DNA, 5089 bp, Homo Sapiens
  NM_018235
gtggcgggggcgtggcgatgcctgccctccggacaaggcggggttggtggccagggcgaccgcggggcgggccagcgccgggggtcgtggccgggacacgtggtacggaaccggcgccgcgcttgctgctggtaacagggccttgcctagtgggccttccttcccaggtcgcccctcagtctccactagagacaggactgaccagttgctcttccttccaagaaccttcgagatctgcggtctggggtctggttgaaagatggcggccctcactaccctgtttaagtacatagatgaaaatcaggatcgctacattaagaaactcgcaaaatgggtggctatccagagtgtgtctgcgtggccggagaagagaggcgaaatcaggaggatgatggaagttgctgctgcagatgttaagcagttggggggctctgtggaactggtggatatcggaaaacaaaagctccctgatggctcggagatcccgctccctcctattctgctcggcaggctgggctccgacccacagaagaagaccgtgtgcatttacgggcacctggatgtgcagcctgcagccctggaggacggctgggacagcgagcccttcaccctggtggagcgagacggcaagctgtatgggagaggttcgactgatgataagggcccggtggccggctggataaacgccctggaagcgtatcagaaaacaggccaggagattcctgtcaacgtccgattctgcctcgaaggcatggaggagtcaggctctgagggcctagacgagctgatttttgcccggaaagacacattctttaaggatgtggactatgtctgcatttctgacaattactggctgggaaagaagaagccctgcatcacctacggcctcaggggcatttgctactttttcatcgaggtggagtgcagcaacaaagacctccattctggggtgtacgggggctcggtgcatgaggccatgactgatctcattttgctgatgggctctttggtggacaagagggggaacatcctgatccccggcattaacgaggccgtggccgccgtcacggaagaggagcacaagctgtacgacgacatcgactttgacatagaggagtttgccaaggatgtgggggcgcagatcctcctgcacagccacaagaaagacatcctcatgcaccgatggcggtacccgtctctgtccctccatggcatcgaaggcgccttctctgggtctggggccaagaccgtgattcccaggaaggtggttggcaagttctccatcaggctcgtgccgaacatgactcctgaagtcgtcggcgagcaggtcacaagctacctaactaagaagtttgctgaactacgcagccccaatgagttcaaggtgtacatgggccacggtgggaagccctgggtctccgacttcagtcaccctcattacctggctgggagaagagccatgaagacagtttttggtgttgagccagacttgaccagggaaggcggcagtattcccgtgaccttgacctttcaggaggccacgggcaagaacgtcatgctgctgcctgtggggtcagcggatgacggagcccactcccagaatgaaaagctcaacaggtataactacatagagggaaccaagatgctggccgcgtacctgtatgaggtctcccagctgaaggactaggccaagccctctgtgtgccatctccaatgagaaggaatcctgccctcacctcacccttttccaacttgcccagggaagtggaggttccctctttcctttccctcttgtcaggtcatccatgactttagagaacagacacaagtgtatccagctgtccacgggtggagctacccgttgggcttatgagtgacctggagtgacagctgagtcaccctgggtaagttctcagagtggtcaggatggcttgacctgcagaagatacccaaggtccaaaagcacaaggtctgcggaaagttctggttgtcggccgggcaccacggctcacacctataatcgagcactttgggaggccaagacaggaggatcacttgaggccaggagtctgagacaagcctaggcaacaaaacaagactctgtctctacaaaaagtttaagaaatgagccagacatggtggtgtatgcctgtagtcccagccactcagaaggctgaggcaggaggatcgcttgagaccaagagtttgagcctgcggtgagctgtgaatgcaccacggcactcaagcctgggcaatgtagcaagatcctgtctctacaagaaattttttaaaaatgagccaagtgtggtggtgcatgcctgtagttccagctactcaggacactgacgtaggagggttgcttgagactgagagttggaggctgcgatgagccatgaatgccccactgcactccagcctgggcgacagaacgagaccccatctcaaaaaaaataagttctggttgtcattgaattgggataaacagagagcttgatgctttctgccttctgtctcaggtgatgcattgcacatttgggatatttggaaaggaaatgaggaaagaaattagggcctcctctgatctctcgctatctgcgggtcctgtccttttctcaagaccttcaccattactggcattttcctgtcttctctttagtatgatccctcaaaacctcactaactggaaggatgattttgtctcagtttgtactcctaaataaaaagtaaacatgacacctctaaaagaatcgctccatctcagttgctcgtcgcgtgcacaccatgcttattgagtggtgtctggttggtggtgtcagctcagggcaggggacagcaggcaggacccggaaaacagaacccaggtcttcccaggcgagcactccctccctcgtccacacaagtggaggctcactcgtggccccctgcatgttccgagaagtgtccctgtctctgctccttaacggctgtggggccacaggaagtccagctggcttaaacaaagaattgattggcccacttgacataaaagaacagagtaaactcaatgaaaggaaaaggctccttgaagtggttggttccagggctgggcagggaagatgcaagatgagtctggaccctctcacatcggaacgtaaggatgcgctcctgagggcgtggggctgcgtccaaggacacaggagccagcctggaagagtttgcaggggcccaggggagcaattggagtgagaaaatagcagtagtgttggatttttaccatggaataaacaacaatccatgagtccatactaatataaataaagtgacaaagtgggtgagaaggaccagtgcccctggatgaagaatctctgctcatgtgggaggaaggtgggagatcaaagctggagcacttgctgctgcaggtgagacccctgacacactctcaaattggtaggcaaaggtttaaagaacgggatatttgcttagcttaaaagcacctcccaaggggaaaacagtaacttcacagtggagagacctggcaggcaccaccctcagatcaaaatgaacctcagcagtaatgacacgtccacatcagcacccccaacaccactccctgaggaggacatgccagttctgggaacatcacactcatcgtgacaaaacatcagacaaacccaaacggatgaaatgtgaggaaaatctgtagttggttttacgtggatgttaatctcttagttttgatcattgtgctgtagctgcataagaggttagctgggtgaagtgtatctggggaccctctatggcttttgcatcttttctctaagtctcctgtcatttcaaagtaaaaacaaaaaaagaagacaagggtagcggcttcaggtacagctggacccagcactcagtgctatctgggcttgtggctccaactcaactcctccatcagaactgtgagaaatgcattctttcagcttctaatcctgcaaaaagaactgcatggtcttcccccagaaatcctaagagtagctgctggtgtctcatgcatgcgagctgcatatgggcccccgttagtcaggaacccatgctgagaggtgctatgctttgaatgtttggctcctcccaaactcgtgttgaaacttaatagccattgtaacagtattaagaggcagggccttcaagagctggtcaggccatgagggccctgtcctcctgactgagtgaatgctgttattgtaggagtgggcttgtttggcctcctcttgctctctctacccctctctgagcccttgtgttgtgggatgacacagccagaaggcccttgccaggttccggtccctccaccttggacctcccagcctcccgaacgttgagccaatacatctctgctcattgtaaattacctagtcttgggcattgtgttacagcagcaaaaagcagcctacggcagtcaccgtgctaacacctgcagcagcctgcggcggtcaccgtgctaacacgtgcagcagcctgtgtggctcaggccagtcagcttcccctggaagcaagtgtgaggtcgtcgcctctggaagtgctagcggagggtgatctcccggaggaaatcagagtggtgttctactagaaggccgatgactcctgggtaaagtgccaatgctcacctccatctctgcaagctcagtccctcgtggaatttccaggagcacaagggcaatctcgacagctccacgttcccagtgcccgacccaagcctggcccatgatcagataaatgcctaagtggggtggcatggacatttgcacacgtccagactgctttatgttagaagctgagctggcatgccactagctggttttgatgtaaacaacaattttgtaaaaccctggactgaatgggtctgactaacggctggttctgtgaacttgagcctcagcgtcctgtgtcagaagagcacaaaccactttcccagagaggttatgaagacagaaatgaccctgtgacccctttgcaaagtatgaagaacggttcccactcatgcatggagctggatcttctcaagtgggaaacaggcgtggtaaataaatactgttgtttcagctggtgtaaaaaaaaaaaaaaaaaa

SEQ ID NO: 4634 - DNA, 2925 bp, Homo Sapiens
  NM_018238
atccgagccggttcccgcccccggcccgaactggcccgcgcgcgctcgcagccccgcggcggaacccgagggcggcggcagcggtttcccttgaacgagccggggaatctggagggagcacacaggaaaggcagagccgcgagctggaccagccgtgcaaatctctagaagatgacggtgttctttaaaacgcttcgaaatcactggaagaaaactacagctgggctctgcctgctgacctggggaggccattggctctatggaaaacactgtgataacctcctaaggagagcagcctgtcaagaagctcaggtgtttggcaatcaactcattcctcccaatgcacaagtgaagaaggccactgtttttctcaatcctgcagcttgcaaaggaaaagccaggactctatttgaaaaaaatgctgccccgattttacatttatctggcatggatgtgactattgttaagacagattatgagggacaagccaagaaactcctggaactgatggaaaacacggatgtgatcattgttgcaggaggagatgggacactgcaggaggttgttactggtgttcttcgacgaacagatgaggctaccttcagtaagattcccattggatttatcccactgggagagaccagtagtttgagtcataccctctttgccgaaagtggaaacaaagtccaacatattactgatgccacacttgccattgtgaaaggagagacagttccacttgatgtcttgcagatcaagggtgaaaaggaacagcctgtatttgcaatgaccggccttcgatggggatctttcagagatgctggcgtcaaagttagcaagtactggtatcttgggcctctaaaaatcaaagcagcccactttttcagcactcttaaggagtggcctcagactcatcaagcctctatctcatacacgggacctacagagagacctcccaatgaaccagaggagacccctgtacaaaggccttctttgtacaggagaatattacgaaggcttgcgtcctactgggcacaaccacaggatgccctttcccaagaggtgagcccggaggtctggaaagatgtgcagctgtccaccattgaactgtccatcacaacacggaataatcagcttgacccgacaagcaaagaagattttctgaatatctgcattgaacctgacaccatcagcaaaggagactttataactataggaagtcgaaaggtgagaaaccccaagctgcacgtggagggcacggagtgtctccaagccagccagtgcactttgcttatcccggagggagcagggggctcttttagcattgacagtgaggagtatgaagcgatgcctgtggaggtgaaactgctccccaggaagctgcagttcttctgtgatcctaggaagagagaacagatgctcacaagccccacccagtgagcagcagaagacaagcactctgagaccacactttaggccaccggtgggaccaaaagggaacaggtgcctcagccatcccaacagtgtcgtcagagggtccccagggcattttcatggcaagtacccctctgcccccactccagcagtgcttcccaaagtgtgctctgtcacctgctttgcaatcggcttccattagcgcatgttttattttggtgtgacggttggccctcctaaacacggactttcctcaggctggttcaagacggaaaaggactttcttctgttttcttccaaagtgcaaccacagtggagagcccacggtgggcttagcctgcctaggcccttccatttctcttctttgaccgtgctaggaattccaggaaagtgcattcctgccctggtgaccttttcctatgtctaggctcctccacaggtgctgctattttgtgagctccggctcctgtttagcttttatttcagttctaacctcagtccagaaacatatgtgaggttgtttccctcttcagccacggctacaataccggaaaatgctagtttttatttatttttttaagtagtgcttcctaaatggtttgcatgagagccacctggggtacatgttgaaaacttatttggggtctaccccaaacctaataacccaaatttggggatggggcccaggaatatgcatttttaaaaagtcatctgcccttcccaggtgattctgtaagttgtccctcaactgtacttggagaaatcgtgttttaaagcagtagtccacaaagtattctgctcatgtgcccccaaaagtattttgaaaaatcatgtataccctcacccatctaagttgatatctaaaattttatctaagttggtatctaaaatttttcatgggaagttaaatagttgacaaagtatgtatttgctggtgtcgtgtaaatattggtattttaaaataaaaactgttacatcactattttaaacatatccagtacaatttaaatatcacaacaatttgacacccttcattcatttataaaaataaatgagctagttctttagtagttaaacatttcaaattggcttttctccttctgtatttccataccacttttcagccaagaatcctatcataatgtaatctattatgcccgacatcttttaatcattcaccccattacttcttgtcaacaaaaaatataaatggaaattttttttttagctcttgctttaagtgtttgtttgttatctcagtccagaaccaatattatcgtaattaattattggtatataatgaaaacggtattaattcttggatgattaaaagtttttttattagaatgttctttatcctaattagttcatttatccaagaatacatgaatgtgatttacagctgagatggggttcaacctcagctgtattccttgtttctgtatagatgtaagcacataaattcgatggaatagaattacgttaacaatg

SEQ ID NO: 4635 - DNA, 2945 bp, Homo Sapiens
  NM_018239
tcggaactcgcctggggcgccgccggcggcggagggagcgtgactgcgctgcgcagggcgctaggaggcattgtcgccgctcaggcccttttgtgagaagcagaccagcctgggggctggcggcaggacacctgtgtctgcatgctgaagaagatgggtgaggccgtggccagagtagcaaggaaggtcaacgagacggtggagagcggctctgacactctggagctccacctggaggggaacttcctacaccgcctccccagcgaggtcagtgccctgcagcacctcaaggccattgacctgtcccggaaccagttccaggacttccctgagcagcttaccgccctgccggcgctggagaccatcaacctggaggagaacgagatcgtagatgtgcccgtggagaagctggccgccatgccagccttgcgcagcatcaacctccgcttcaacccactcaacgccgaggtgcgcgtgatcgccccgccgctcatcaagtttgacatgctcatgtctccggaaggcgcaagagcccccctaccttaggccaccctcctcatgcccacccagcaaggggcagaggccacaggcctggaaccctggaagggagggaggcccatgggaggccaagcctgggggctgggggcgggtgggccgagcagcacgtggtgggtggggtgcagctggtctggatagatagcttacagcagtagtgggctctggaatgcccaagggaagaggcaaggtggggcctgcagcctggactcggcactcacagctgctgtgcaaactcaggcagatctcctgccctctctgagccttgtcacttgaaaaaaacaggaccctttccctcctttgggctccctggaggtttttaagcagtacgtgcctccaagttacctccagatcagcaggcacaggtgggcattgccaggtattttctgagcccctgcgggtttgaggccttgtttttagtgctgagagccagttgctgccctgagaagagaagacaacctccatctatttattgcttcctgagaactgacctggatgcggccctctgcagggcccagtcttcagtcctgtggtccctggactggtgggaacctgaactaggagtcctgggagagctgtggtgggaatatgggctggcactgctgcagggcaagaacattcatgtaggagcccgaggaccagcaggctgggaatggggagcaagtcacgtcagctctgtcattccccacagttaacaaattggcggggtgggaagtcctgagtgctccgtccctctagcatcactcctgagctgcgggagaggtggcccagagaacagcagagtcagttacacctgcagctcttgtctaaagtgattagatggccaccctcaccactgtccagtccagcagcagcctggctgccttgtcatggcctcctgggggcagaaggcgatgtggaccacgggatttgtagccagccagctcccaggccaacgcccaaagccctgatgacctggttcttctgaggccctcaacctggcatcttagggtatggtcaggcaacagggtgaccagctgtcctggtttcccaggacatggaactttcaatgctaaaactgggacagtacccagcaagtggggatggttggtcccctaccaggagagggcctggggctcttgcttcccgagaacgcctgtggcttgaagaaccttgactgcttggtcctcaggtatctacctcccaccttctcctcatctgtggagcaagccaactcagtgccccagaccccacctgatctgcatctttgtttgcatctccagagacacctgaggccccagagcttgaggcaaagccaggccgtccaaatcctgtgtgccgtggacgagtggccactttactactcctaaggctaagatgttgagagctcagaccactgctcagagcagtaatccctgctcagaatgctcccagttccctcgtccctgcccaggtctcttgtctcttgggaaggaactgataggtcgggccattgttgggccatcactgagcgctcagtatctcaagagactctgttcattctgctcgtatcccaaggcctggttggtcaaactctgggcaaagggttttcaggatgaggaggtcaagacaggatctccagagctaccgagttcatctgtgggtgttgggggcaagtgggggctgaagtcctgtgcaggctgcgctggccccacctgccttgtgccctggagtggggtttctccttgttgaagaagaggcatccttctctgatgtgcacaaacacaatgtatgaccagagccttgcaactcaaagtgtggtctgtggaccagcagcggcagtgacacctgggagcttgttaggaatgcagagtctaggcctcaccctatacctcccgactcagaccctgcattttagcaagacccccagctgattcctataagcactttagagtttgagaagcaaggacctaggctggggatgtcctccgagcagagggtgaagtttctctcagttctctccctgccacttccagggatctgagcctgtgctcagcctcctccctaacccaccctgggagacacttggcctgttagattgttccagagtctgcatggcactcctgaagaagggagtgtgacctgcagtcaccaggagatgagggttaggtgtgcccagccctccagacccggcctttctggttaacccctgcatgccaagctgcctgctgccccaggtcctcacctcaggcctttgaaggggcagcttctggaagttgttttctcctctgcttggagagtttgcccttgtctgtcttggaaagtgtgggcagccacagatgcccccaaatcagagctcacagtgagtgagcccctaagcttcagtctgcaataaagaatgcattggtttcatcaaaaaaaaaaaaaaaaaa

SEQ ID NO: 4636 - DNA, 2461 bp, Homo Sapiens
  NM_018244
gcagggagagcgtgcccgggcacgacagcctggtgcacagccgagaaaacaacagcgcgtgcgcgtagcgacctctttgcgcctgcgccccccttgccagtctttcgccggcaaaaggaggacgtagaaaaggggacaccggaaactcactcttcacccggaaatggttattgaggaacatggcgttgctggtgcgagtccttaggaaccagactagcatttctcagtgggttccagtatgcagccgattgatacctgtgtctcctacccaaggacagggggacagggctctgtctcgcacttcccagtggccccagatgagccagtcccgagcatgtggtggatcagaacagattcctggaatagacatacagctgaataggaagtatcacaccacacgtaagctttctactaccaaagattccccacagcctgttgaggagaaggttggtgctttcacaaagataatagaagccatgggattcacgggacctttgaaatacagtaaatggaagattaagattgcggccctgcgcatgtatactagctgtgtggagaaaactgacttcgaggaattctttctaaggtgtcagatgcctgatacattcaattcatggtttcttataaccctactccacgtctggatgtgtctagtccgaatgaagcaggaaggccggagtgggaagtacatgtgtcgtatcatagttcattttatgtgggaggatgttcagcagcgcggcagagtcatgggggttaatccctatatcctgaagaagaacatgatcctcatgacaaatcatttctatgcagcgatcttgggatatgatgaggggatcctttcagatgatcatgggctggccgctgccctctggagaaccttcttcaaccggaaatgtgaagaccctcgacatcttgaattgctggtagagtatgtgaggaaacagatacagtacctggactccatgaacggggaggatctgcttctgacaggggaggtgagctggcgccctctagtggagaagaatcctcagagcatcctgaagccccattctccgacttacaacgacgagggactttgatgggctgggccctccgcacggcccgccagctggcttcgaggaacctccaggagagaagtgcctgttggtccaggaccctgcagaaagtggcctgaactgacctctgaacagcatctgtcaaatacctggccccatttgtgttgagtttcctcttagtgtgcccaggagtctgatctgctggggtacagggctgggagaacccctagctctcccggggtgtcctctcccttaggggaagccccgagtgagagtcccccagcacacactccccaaccccctccagcaactacatgtgactgatagcttttcccaaaggccaaggaagggatggtgtaggttcaaaagggaaaccccccagggcctgctgtggcctaggagcagattgtaatgctgccgagtccggtcggtgaccacgcgttgtccctcggctttcagccatggggttgagttggccattaaaagaaacagagacttctctctgccatggcccttctttattccagggacttagaaacttgcctgagatggtggacgcagtaatgagggcaccgcgcagctcagttagagacggagaaagggaagaggctgggatggtctctgctgctcttgcctctagttcatggagatgtgtctctgttcaggccaagatacagccagccaggcctgtcgtctgggacccaggaggcctctgatgaccaagggctttcacatcctaagtcatttggaaggaggccttgagaacaaagtcacctttgtcactcccagtgaactgaatgaggaacatgctgtctcctgtcttggcctcccctttcatgagatactggggagaagagaacattcctcctggcttagttgtagcagacccagacctgtgcccagctttggtcccccttcccaacttctgaagcacgtgctgcagagccaccttggtctgagcacctgaggaccagcccctcctccctcagtgcgggtcatctcttgggggattttcttaaagtgaagaaagggggtggggaaccatattgcccctccctcccccatcaaacttccttcatttaacttgctataaaatgagtcatataaagaaactctatatgggtgaggtatatcccacttctgtgaaaacattacaaatcaaaccgcttctctcagtttatttaagatgcttttgttgcgagcggagctctagagtgaagcctcctgtgtgtgtgtgagataataacaccttgtaactcattacagctgggcactatttacataaaccagagctgagccaggcaggaatttgctgattaatttatttttaatggagtgaagtataccatgcaccaaaataaactttactgtgtgtacctaactgctcctggaaaaaaaaaaaaaaa

SEQ ID NO: 4637 - DNA, 3653 bp, Homo Sapiens
  NM_018246
aagtgcacggaggagttccgggggccaggcggccgccgcgagtctggtatcctgagcttcgtgagttgagcgctgctgctccgcggtggagtcaccgcaccgctcccgggatcatggtgttctacttcaccagcagcagcgttaattcatctgcctacactatttacatgggaaaagataaatatgaaaatgaagatctgatcaagcatggctggcctgaagatatctggtttcatgtggacaaactctcttcggctcatgtataccttcgattacataagggagagaatatagaagacatcccaaaggaagtgctgatggactgtgcccaccttgtgaaggccaatagcattcaaggctgcaagatgaacaacgttaatgtggtatatacgccgtggtctaacctgaagaaaacagctgacatggatgtggggcagataggctttcacaggcagaaggatgtaaaaattgtgacagtggagaagaaagtaaatgagatcctgaaccgattagaaaagaccaaagtcgagcggttcccagacctagcagcagagaaagaatgcagagatcgtgaagagaggaatgagaaaaaagcccaaattcaggaaatgaaaaagagagaaaaagaagaaatgaagaagaagagggaaatggatgaacttaggagctattcatcactaatgaaagttgaaaatatgtcttcaaatcaggatggcaatgattcagatgaattcatgtaaaaggagaaaaggagaaaaggacctttgaaagatgtgaatgtagagacaattgcagaccttttggtttcatctgtgttctgaaatataaaatacaaccaaaattctaccttcatcctacccagaaattattgattttcaagttttaaaaaaattgtaccttttttgctgacagaaaaggatcagatatgtataaaatagttgaacttgacagcatataacttaaagtgaaaatgtttttgccagaacatgtcttggtaccttgtgaaagcaggctgcccttgttcttgagatagactttaaaatgaaccagctctgaaaagtacttctgctgctctggtctatccctgaaaacagatgtcttgaaacacttttcatattcttaaaataatcttcacttctgttaagaagaacatgttggtgggtaattatgcgaatgtttccctgtccctgatttctcgattaggcgtatgggttttgaaaaagagatttttcagaagattgtcagcttcagtattcatgttccatcgtgtcatctgggtctgttagtgtagtgaccctcagtgcagtctgtcccagcgtttacgtccttgcttcctctgagcagaggcctccatcttagtatcaacatatttaaagaaattgatggtgttcatcaagctggggcctgtggcagttgttgcctgagcaccaagtaacccaagccacctatgtgacaacttctgggcccaggagtaatttctcagcattgagggtaaaataggatggagtgctctgttgatcatttgggagatgtaggttacctgatttgtgccttaggatgcagcgtgaagcagaagtccatattgcaattatgattttagaaggaactaagcattttactcacacccacagcagcaagaatgacctcctgcagcagatattccacctgtaatagcactttggaactgtgggcaaaaccaaaaggctagtgtttccatttattccatgttggtgtatggggttgaactggaaaattccctgaggcaaaactcactggccaaattttgagagggtatagaaaatgactttagagatgagtggttttgtgtatgtgtctgatgatattcagtctgatgttccgcaattttaaaagttataataaaataccatttttttaatctggaaggacattgatatatgaattcttagaatttgctattaaaaagggtagcccccattccacaagctggttttgagggtgatcttgctctaaaaaacctcattcatcataggctcagtctgacaggttctgtacggggctatcatctttctcctcctctgctaaatgcctctttcttccagctgctcactgggtcaaagggatgtcctttctcagatgtattcttgatacatctcagatgtattcgtagctgtgctccttccatacttccaaggagtccggcttctacagaattcctctgtacctcacactgcaacacatgtagatagcgcttttgaaaaatacatatatttttactatagtatgagaggtcctggggctcaaactttaaacatttcctaactcagcttacactggtttaaaatgtccaggtctctgctgaattctcttgttgaattcatagctctgtgttgattcctatgcccctaaccctgcagcctctttgttttatttttttccccatctctgttggtcccagggaaagcaaggaaattttcttttgaggacttataggttgattgcccacaggtcaaactgttggcattgaactcctctcatttcttgccattggattgtttcctaaacgttggataggagaattcgaaattgttgctatttttatgagctgtgcccttgatcaaatctgtgctgtgggtctgagtcactttgccaatgtcgtcttcagtttcaacactctgatcagcatgcaggcgaggggcatgtttaatttacttcactaactgctatattctatagctttagacttcatatttcttatccacctttgtctaggctcacgatctttgggcaagggagctttgtcaccgtggttgggctagaacaaatattgagaagtttaccaacacagatgttgagaagtttattgaaaggcactgacattagcagaataagtgatggacattagttgaaccccttcagtgtctatgtgttttattgtattgtctttaactcgttcttgaagcacagatttcagcgagcctttcagctattcagtgccagcggttttccccactcaggaaagatggtgtgagccatacacacagcaggattagacggggagagtttcagctgcagcttctagtttaagaccaaagcccttcctcccgctgctgcatctgtctgagaggggaagctcttgttttccaagctggaaccgtttatgaggaaaactgagcagggtggcaaaatggaaaaggaacaattttctagtttttcctacgcgtgatattgacgcgtgctttttctttgatttgaggtacagcatgtaaataacaaatttccatattcaaaatgatcatattagagtgactgagtgaccttttgattttgaagcagactaaaatctgaccagaccacaatgaaaagtataaaattagaaacttaaattccaagctaaatttcagctttgacccacctaactccagtgaataggtggcagctcagaaacaaggacagcactgctgctgccagagcaagctcacatccagctggcacttcgtgagagctccttcctgccgggcacgtgtgagttcagcgtgggcaagagacttttatgcacattctgtcattcaaaagggaaatgatgccaaccccagatgcagcatgtcctgaatgaatgatctgtaaaatacaataataaaagcttatagtttgagtagaaaaaaaaaaaaaaa

SEQ ID NO: 4638 - DNA, 6230 bp, Homo Sapiens
  NM_018249
aggaagaagcgccgggaaagatggcggcgtctgtggtttgaattccagcggcgccgccagagtctgaacaagagctggggtggagggggcggggacctggggagcccggcgggtcgctatcgcggggggtactagtggcgccgccgccacagacaccaacgctgtcgccacctctgtagccatgatggacttggtgttggaagaggacgtcaccgtccctgggacgctcagcggctgcagtggccttgttcccagtgtaccagatgacctggatggcatcaaccccaatgctgggttgggaaatggtctgctcccaaatgtgtcagaagaaacagtgtctcccaccagagcacggaacatgaaggactttgaaaatcaaatcactgaattgaagaaagaaaactttaacctaaagctccgcatctatttccttgaggaaagaatgcaacaggaatttcatggccccactgaacatatctacaaaactaacattgagctcaaggtggaagtagaaagtctgaagcgggaactccaggagagagagcagctgctcatcaaagcctccaaagcagttgagagcttagctgaagcaggtggctctgaaatccagcgggtgaaagaagatgctcgaaagaaggtgcagcaggtggaagatctcctaactaaaagaatactccttttggaaaaggatgtgacagccgcccaggcagaactggaaaaggcctttgcagggacagagacggagaaggctcttcggttgcgtttggaaagcaagctttcagagatgaagaagatgcacgagggggacttggcgatggctctggtcctggatgagaaagacagactgattgaggagttgaagctgtctttgaagagcaaagaagctttaattcagtgccttaaagaggagaaatctcagatggcatgtcctgatgagaatgtgtcatctggagagctccgaggactttgtgctgctccaagggaagaaaaggagagagaaactgaggctgcacaaatggagcatcagaaggagagaaacagctttgaagagaggatccaggcacttgaagaggacctgagagagaaggaaagagaaattgctacagagaagaaaaatagtctaaagagggataaagccattcagggtttaaccatggcattaaaatcaaaggaaaaaaaggttgaagaacttaactctgaaattgaaaagctcagtgctgcctttgctaaagccagagaggccctacagaaagcacagacccaggaatttcaggggtctgaagactatgagactgctctatcaggaaaggaagccctttcggctgcgctgcgctcacaaaacctcaccaagagtacagagaaccacagactgcgtagaagcattaagaagatcacccaggagctgagtgacttgcagcaggagagggagagactggagaaggacctggaggaagcccatcgagagaagagcaaaggagactgcaccatccgtgatcttagaaatgaagttgaaaaattacgcaatgaagtgaatgaaagagagaaagcaatggaaaatcgttacaagagtcttctgagtgaaagcaataaaaaattgcacaatcaagagcaagtgatcaaacatctaacagaaagtaccaatcagaaggacgtgttgcttcagaaattcaatgaaaaagatttggaagtaatacagcagaactgctatttaatggctgcagaggatcttgagctcaggagtgaaggcttaataacagaaaagtgctcttctcaacagccaccaggcagcaaaaccatcttctctaaggaaaagaaacaatcatcagactatgaagagctgattcaggtcttaaagaaagagcaggacatctatacccatctggtcaaatctctgcaggaatcagacagtatcaacaacctgcaggctgagttaaacaagatttttgccctgcggaagcaactggagcaggatgtgctttcatatcagaatttgcggaagaccttggaggagcagatcagcgaaattcggaggcgggaagaagaatcattttcactttatagtgatcaaacatcttatctaagtatttgccttgaagaaaacaatcggtttcaagtggaacatttttctcaagaagaacttaagaaaaaggtcagtgaccttatacagctagtgaaggagctgtatacagacaaccagcacctgaagaaaaccatttttgatctctcctgcatgggtttccagggaaatgggtttccagatagacttgcgtctacagaacaaacagagcttctggctagcaaggaggacgaggacacgatcaaaattggggaggatgacgagattaatttcctgagtgaccagcatttgcagcagagtaatgagattatgaaagacctttccaaaggaggctgcaaaaatggatacttaaggcacacggagtctaagatttcagattgtgatggggcccacgcacctggctgcctagaagaaggtgcattcataaacctgcttgcccctttgttcaatgagaaggccacattattactggaatccaggccagaccttctgaaagtggtacgggaactgcttctgggacaactattcttgacagagcaggaagtttctggagaacaccttgatggtaaaactgagaagacacctaagcaaaaaggtgaacttgtacattttgtccaaaccaactcattttccaagccacatgatgaactgaagttgtcttgtgaggcccagctagtaaaggcaggcgaagtgcccaaggtaggactgaaagatgcctcagtgcagactgtggccacggagggcgacctgctgagattcaagcatgaagcaacaagagaggcttgggaagagaaaccgatcaacactgcactcagcgcagagcatcggccagagaacctgcacggggtgcctgggtggcaggctgccctcctttccctccctggtattaccaacagagaggctaagaagtcccgcttgccaatcctaataaaaccatcccggtcattaggaaatatgtatcgtctccctgccacccaggaggtggtgacgcagctgcagagccagatcttggagctgcagggggagctgaaggagtttaaaacttgtaataagcaacttcaccaaaagttaattctggctgaagcagtgatggaggggaggccaacgcccgacaaaacgttgctgaatgctcagccccctgtgggagcagcctaccaggacagcccaggagagcagaaaggaattaaaaccacatcttctgtctggagagacaaggaaatggacagtgatcagcaaagaagctacgagattgactctgagatttgcccacctgatgaccttgccagcttgccatcatgcaaagaaaatcctgaagatgttctgagcccaacttcagtagctacttacctgagttccaagagtcagccttctgctaaagtcagtgtgatggggactgatcagtcagagagcattaatacctcaaatgagacagaatacttaaaacagaaaatccatgacttggaaactgagctggaaggctaccagaatttcatatttcagcttcaaaagcactcccagtgcagtgaggccataattacagttttgtgtgggacagaaggggcccaggatggcttgagcaagcccaagaatggttctgatggggaagaaatgaccttttcaagtttgcaccaagtgcgatacgtgaaacacgtgaaaatcctcggtccgctggccccagagatgattgacagcagggtgctggagaacctcaaacagcagctggaggaacaggaatacaagctgcagaaggagcagaatttgaacatgcaacttttcagtgagatccataatctgcagaataagttcagagatctctcacctcccagatacgattcattagttcagtcccaagccagggagctctcccttcaacggcagcagattaaggatggccatggcatctgtgtcatctcccgtcaacacatgaacaccatgattaaggcatttgaggagttgctgcaggccagtgatgtggattactgtgtggccgagggtttccaggaacagctgaatcaatgtgctgagctgctggagaaattggaaaagctatttctcaacggaaaatcagttggagtggaaatgaacacccagaatgaactgatggagaggattgaggaagacaacttaacctaccaacatcttctgcctgaatctcctgagccttcagcctctcatgcgctctctgattatgaaacatctgaaaagtccttcttctcacgagaccagaagcaagataatgagacagagaagacttcagttatggtgaacagtttttctcaagacttactaatggaacacatacaggaaattcgaactttgagaaagcgtttagaagaatctattaaaacaaatgagaagctacggaaacagttggaacggcaaggatctgaatttgttcaaggttctacaagcatttttgcttctggttcagagcttcatagttctctaacatcagaaattcatttcttgaggaagcagaaccaggccctcaatgcaatgctcattaaaggatccagagataaacagaaggagaatgacaaattacgagagtccctctccaggaagaccgtgagcctggagcaccttcagcgggagtatgccagcgtgaaggaagaaaatgaaaggctgcagaaagaaggcagcgagaaggagagacacaaccagcagctgatccaggaggtccgctgcagcggccaggagctgagcagggtgcaggaggaggtgaagttgaggcagcagctgctctcacagaatgacaagctattgcagtctctccgagtggagctgaaggcgtatgagaagctggatgaagagcacaggagactgagagaggcgtcgggagaaggctggaaggggcaggatcctttcagggacctgcacagcctcctgatggagatccaggctctgcgcttgcaactagaaaggagcatcgaaaccagcagcactctgcagagcaggctcaaggaacagctggcaaggggggcagagaaggcacaggaaggagccctcactctggctgtccaagccgtgtccatccctgaggtgccccttcagcctgacaaacacgatggtgacaaatatcccatggaaagtgataattcatttgatctgtttgattcctcccaggcagtgacaccaaaatcagtttcagagactcctccactctctgggaatgacacggactccctctcctgcgacagtggcagttcggcaactagcactccgtgtgtgtcccgcctggtcactggccaccacctgtgggccagcaagaatggccgccatgtcctgggcctgattgaggactatgaggccctgctcaaacagatcagccagggacagaggctccttgctgaaatggacattcaaacccaagaggctcccagctccacaagtcaagagctgggaacaaagggtccacacccagcaccactgagcaagtttgtgagcagtgtgagcacggccaagctgaccctggaagaggcctacaggcggctgaagcttctctggagagtctcactccccgaggatggccagtgcccccttcactgtgagcagattggagaaatgaaggcagaggtcaccaaactacataaaaaattgtttgaacaagaaaagaagttgcaaaacaccatgaagcttttgcagctgagcaagcgccaggaaaaagtcatctttgatcaattggtcgtaacccacaaaatccttcggaaggccagaggaaacctggagcttaggcctgggggagcccatccaggaacatgcagtcccagcagaccaggctcctgagaagaactttcagccaataaagcttgtgcttcccccaccgagctcacgctgtctctttgttccaagtgtggttcctatttattgaggaagaaagagctgtctggccaaaggaaatctattttttcccttcatgttttctctctgaaagttggcttgagagttgttgtcagaaaggtgcaggtgctccacaaacgggtggtaaaaaggcctcgagctcttggatgttgtatttcagatcaggggcaggcaccggagttgaggctgtgcgccttggtgggcttcacgtcttcccctggatttgcttagtactcagccagtgccacagtttgaagattctcattaaatgattcatttcatttcaccttga

SEQ ID NO: 4639 - DNA, 2764 bp, Homo Sapiens
  NM_018250
aaggaagacatgatatcatgctggggtggagagggaggatgcattggcggctgggatgaatttgagctgacggaaggaggcgttcggagaggaaagggaggaaaaggaaaggcgaccacagttcccatgatgcctggaggggagactacatttcccattattcccctggaagggacgtgaggatgaaagactgcaagtcccgcgatgctctcggctggcaggtggcggagattgcaccggaagacgcttcctgggtttgaggagttcagtgactgctattgaaccaccaaaagtccattatgaaactgtattgcctgtcagggcacccaaccttaccatgcaatgtgctcaaattcaaatcaaccaccattatgttggactgcggactggacatgacttctaccctcaatttccttcctttgccacttgttcaaagtcccaggctgtccaatcttcctggctggtccctgaaggatggaaatgctttcttggacaaggagctaaaggagtgctcgggtcatgtatttgtggattctgtgccggaattctgtttaccagagacggagctaatagatctgtctacagtagatgtgattctcatctctaactatcactgtatgatggcgctgccatacatcaccgagcacaccggcttcacaggcacagtgtatgccacggaacccaccgtccagatcggcaggcttctcatggaagagctggtgaatttcattgaaagagtgccaaaggctcagtctgcctccttgtggaagaataaggacattcagaggctgttaccttctcctctcaaggatgcagtggaagtctcaacctggagaagatgctatacaatgcaagaggtgaactctgcccttagtaaaatccagctggtgggatattctcagaaaattgagctttttggtgcggtccaggtgactcctctgagctctggctatgcccttgggagctccaactggatcatccagtctcattacgagaaagtgtcttatgtctctggatcctccttgcttaccacacacccccagcccatggaccaagcttctctcaaaaacagcgatgttcttgttctgacagggcttacccagatccccactgcaaacccagatggaatggtgggagagttctgcagcaacctagctctgacagtccggaatggaggaaacgtgttggttccctgctacccttctggagtgatctatgacctcctggagtgcctatatcagtacatcgactcagccgggctttccagcgtccccctctacttcatctcccctgtggccaacagttcactggagttttcccagatctttgctgagtggctttgtcacaacaaacagagtaaggtgtatcttccagaaccaccttttcctcatgcagagctcattcagaccaataagctgaagcactaccccagcatccacggagacttcagcaacgactttagacagccctgtgtggtgttcaccgggcacccttccctccgcttcggggacgtggtccacttcatggagctctggggaaaatctagtctcaataccgtcatattcacggaaccagacttctcctacctggaagccctggctccttaccagccgctggccatgaaatgcatctactgccccatcgacacccggctgaacttcatccaggtgtcaaagctgcttaaagaagtgcagcccctgcacgtggtgtgtcctgagcagtacactcagccgcccccagcccagtcccacaggatggacctcatgatcgactgccagccccccgccatgtcctatcggcgggctgaggttctcgccctgcccttcaaacgtcggtacgagaagatcgagatcatgccagagctcgcagattcactggtgcccatggagatcaagcctggcatctccttggcaactgtctcggccgtgctgcacaccaaagataacaagcacttgcttcagccccctcctcggcccgcccagcccacgagcgggaagaagagaaagcgggtgagcgatgacgtaccagactgcaaagtcctgaagcctttgttgagcggttccatccctgtggagcagttcgtgcagaccctggagaagcatggcttcagtgatattaaggtggaggacacagccaagggccatatcgtcctgctccaggaggctgagacgctcatccagattgaagaagactcgacccatatcatctgcgacaatgacgagatgctcagagtgcgactgcgggaccttgtcctcaaattcttacagaagttctgagtgggccatctgagctacttccctgaaatcctgcagtccctcactggctgccctcacaagccacctgaggagtggcatgagaggccattaactgtgtctttgtggtgtcctctggcttaaggagtgaagaggtggctcttgagggaaatggtctggacttattcccagcactgtttcaggcaagaactttccctttcaacttcaggctcattttcttctcaactctggctctctcaaggagctggagggtggcagaagtgggacaggagaagttttccaagaggttcatgggaggcggaggtgactggctggctgtcttgcatcagtcccaggcctcggccaggggagccagcctttggtttcgtttacttgcctacagtgctgtacgcaataagatgatgatcccaaaatatggtaaagtgaacccatctgtctgcattttctactctgagcccatttgttaataaacacttatttttatataatta

SEQ ID NO: 4640 - DNA, 4274 bp, Homo Sapiens
  NM_018254
aatccgctgccatctcccggagtgccccgagttgatatcttcccatccacccgccgcttctttcctccatctagcgatttttattttttaagtgtctcttcctttttctttcttttcttcttttttattttttatatatattttttggcattgctttgcagatgttgggatgagagtcggagccgaataccaagctcggatccctgaatttgatccaggtgctacaaagtacacagataaagacaatggagggatgcttgtatggtctccatatcacagtatcccagatgccaaattggatgaatacattgcaattgcaaaggaaaagcatggctacaatgtggaacaggcacttggcatgttgttctggcataaacataacattgagaagtcccttgctgatctccctaatttcactccctttccggatgagtggacagtggaagataaagtcctatttgaacaagcctttagttttcatggaaagagctttcacaggattcagcaaatgcttccagataagacaattgcaagccttgtaaaatattactattcttggaaaaaaactcgctctaggacaagtttgatggatcgccaggctcgtaaactagctaatagacataatcagggtgacagtgatgatgatgtagaagaaacacatccaatggatgggaatgatagtgattatgatcccaaaaaagaagccaaaaaagagggtaatactgaacaacctgtccaaactagcaagattggacttggaagaagagagtatcagagtttacaacatcgccatcattctcagcgttctaagtgccgtccacctaagggcatgtatttaacccaggaagatgtggtagcagtttcctgtagtcccaatgcagccaacaccatcctgaggcaactggacatggagttgatctctctaaaacgtcaggttcagaatgctaagcaagtaaacagtgcacttaaacagaaaatggaaggtggaattgaagaattcaaacctcctgagtcaaatcagaaaattaatgcccgttggaccacagaggagcagcttctagcagtgcaaggtgtccgcaaatatggtaaagattttcaagctattgcagatgtaattggcaacaagactgttggccaagtgaagaacttctttgtaaactacaggcgtcggtttaacttagaggaggtattgcaggagtgggaagcagaacaaggaacccaggcttctaatggtgatgcttctactttaggggaggagacaaaaagtgcttctaatgtgccatcagggaagagcactgatgaagaagaggaggcacagaccccacaggctcctcggacactgggtccatcacctcctgccccatcatccactccaacaccaacagcccctattgccactctgaaccagcctccaccacttcttcgtccaacactgcctgctgccccggctcttcaccggcagcctcctccactccagcagcaggctcggttcatccagccccggccaactttaaatcagcctccaccacctcttattcgccctgctaattccatgccaccccgtctaaacccaagaccggtgttgtccacggttggtggtcaacagccaccatcacttattggaattcagacagattcacagtcctcactgcactaaaaattaaattggacacagctgcagtaacttttcaccccatcattataccagtgctcatctgactgatgaaaaagaggaaagaataatcatttctagatactgaggctgcgaactagttctgtggcagtggactagcataagtggatgtctaagaaatttttcagttcactagactaaaatgttttacaacaaaaagcctccagttagcctcctttctagagtatatgttcagcaatgttgatctcataaaaggaaaaacaaaagatttaagtattctatataccaagtttttgttttgtttttactgtatttattttattgaggttctttatattcctgcctcttcatagtcaaggctcttagtacaggaatattgacttaggaattgtgaaaactccttaagtttcttaagttaaggatgtttggcttttttctttaattttttaaaaaccattttcctatgttaggagtgcaagaatagccagcatttccgattttgacatatgttcattttatgcatatttaagaaattatagctgcatatcccttctttcaaaaaatgttgcttttttttttaaaggaattttaatatattcctttaaaagaaagcaatttaatcaattgcaaagcaattatataaaaccacaaagaatgtactgaacctactaaccctttaacatacagtttagggtcctagcgcagagtccttgtttaaaggtcattgactcatcatctgtcagtaatgagaggattggaagaataattttgcatacaaatgaggacttaatttgttgaaatataatctctttaagttccttgaaaatggagttggttttttttgtttctaaatgctatctgcttttaactagtagttgcctacatctggggacttcagagaagaattatattttgttagttaagtagacacagtggttatggaagcatttctttacagtaccctttacatgtttggtttctgaacttaaaattgccctcatacttaataatatggtctgcatttaatatgaaaggtgttttattgataaatctattgtactatttggatacatttgtgtattccttgcagccaacctgtattcgtgggattggtgtagggttaaatcatcaacattatttcataaaataagaatttgttctgtgttatctaaagatgtatcagtatattgtcacagttgtgctgttaactaaaaatgctgagacccctttttatagaaaaacaaaaagacatcaagtcttcttaattcaacccataatcattaagtacttaacaaagaatattttacaagtgatagtatttcaacaatgtgtaattaatatttttgatacagtgatttcatattggaatcattatttgtgcaaagggacagacagatcacttagattgctatactagtggacataggctacatgtttgcacattcacattcttatcacgtgtagaatacttcacaaaatagtcaacatctaaggccctaatttatgttttgaaagatcatgtgttcccaaagtattccctattgttggctccacagccttaaagtgctatagatttaaattcattgattagttttaatttttaattttagactgtgtatttccataaataccctacgtactggcatatttgaaactctttttccaggttaggtccttttctttctcattgaatcatcttaaatagttcttggccctgaatttagctgatttaaaattcttaatattcaagaatttatacttattttttccttaaaagccacaggggacagttaaatatcttaaaatatctaaaacattttttaaagcacttagattgtcttacgtatgtgcatactatacctttacagcgtttattgtcttgtctcttgtcagtagaccttcagtacacagtatgtgggatatgtcagtcaagttggtcagcaccagcatctgtccagctgttcagtatattgtgattcattaaaaaatctcttctatcccagacatgggccaaggtgctgtatctgagggatgtgctgtaatttgatttacatgcattagagcacacagtagaaaaactttagcttcattagtaatatgacacatgtatatagtgagatgtctttattgtgtgctttgcatattttgtaaatattttgcacgtcattatttttcttttttgtttaagcagtgtttggcctggaagagtgatatgcttgctgcttaatcaaaggattaaagatttaaagatgtctatgtcttctatttttatataatttcatgttctatgaggaatttagtacctcttcactgtgaaattcgaaataatgatttttataaaagcaaaactagaaatcttttaatgacaattttcattaatttcagggttatcatttttgagaaatctacaccaaagtggttttttaaaattacataactaaaaataaaccacactgtggatacatcttataaaactaatggaaacaatgtttttctatatgatttaattctagtgtaatatggatgaggtaagagtaagttatgatcaaactttttatgttcttaataagcttgcaattgagtaaaatagaatataaaataaaggtgaaataatataaaa

SEQ ID NO: 4641 - DNA, 2494 bp, Homo Sapiens
  NM_018255
agttggcgacatggtggcacccgtgctggagacttctcacgtgttttgctgcccaaaccgggtgcggggagtcctgaactggagctctgggcccagaggacttctggcctttggcacgtcctgctccgtggtgctctatgaccccctgaaaagggttgttgttaccaacttgaatggtcacaccgcccgagtcaattgcatacagtggatttgtaaacaggatggctccccttctactgaattagtttctggaggatctgataatcaagtgattcactgggaaatagaggataatcagcttttaaaagcagtgcatcttcaaggccatgaaggacctgtttatgcggtgcatgctgtttaccagaggaggacatcagatcctgcattatgtacactgatcgtttctgcagctgcagattctgctgttcgactctggtctaaaaagggtccagaagtaatgtgccttcagactttaaactttggaaatggatttgctttggctctctgcttatcttttttgccaaatactgatgtaccaatattagcatgtggcaatgatgattgcagaattcacatatttgctcaacaaaatgatcagtttcagaaagtgctttctctctgtggacatgaggattggattagaggagtggaatgggcagcctttggtagagatcttttcctagcaagctgttcacaagattgcctgataagaatatggaagctgtatataaagtcaacatctttagaaactcaggatgacgataacataagactgaaagaaaatacttttaccatagaaaatgaaagtgttaaaatagcatttgctgttactctggagacagtgctagccggtcatgaaaactgggtaaatgcagttcactggcaacctgtgttttacaaagatggtgtcctacagcagccagtgagattattatctgcttccatggataaaaccatgattctctgggctccagatgaagagtcaggagtttggctagaacaggttcgagtaggtgaagtaggtgggaatactttgggattttatgattgccagttcaatgaagatggctccatgatcattgctcatgctttccacggagcgttgcacctttggaaacagaatacagttaacccaagagagtggactccagagattgtcatttcaggacactttgatggtgtccaagacctagtctgggatccagaaggagaatttattatcactgttggtactgatcagacaactagactttttgctccatggaagagaaaagaccaatcacaggtgacttggcatgaaattgcaaggcctcagatacatgggtatgacctgaaatgtttggcaatgattaatcggtttcagtttgtatctggagcagatgaaaaagttcttcgggttttttctgcacctcggaattttgtggaaaatttttgtgccattacaggacaatcactgaatcatgtgctctgtaatcaagatagtgatcttccagaaggagccactgtccctgcattgggattatcaaataaagctgtctttcagggagatatagcttctcagccttctgatgaagaggagctgttaactagtactggttttgagtatcagcaggtggcctttcagccctccatacttactgagcctcccactgaggatcatcttctgcagaatactttgtggcctgaagttcaaaaactatatgggcacggttatgaaatattttgtgttacttgtaacagttcaaagactctgcttgcctcagcttgtaaggcagctaagaaagagcatgcagctatcattctttggaacactacatcttggaaacaggtgcagaatttagttttccacagtttgacagtcacgcagatggccttctcacctaatgagaagttcttactagctgtttccagagatcgaacctggtcattgtggaaaaagcaggatacaatctcacctgagttcgagccagtttttagtctttttgccttcaccaacaaaattacttctgtgcacagtagaattatttggtcttgtgattggagtcctgacagcaagtatttcttcactgggagtcgagacaaaaaggtggttgtctggggtgagtgcgactccactgatgactgtattgagcacaacattggcccctgctcctcagtcctggacgtgggtggggctgtgacagctgtcagcgtctgcccagtgctccacccttctcaacgatacgtggttgcagtaggattggagtgtggaaagatttgcttatatacctggaaaaagactgatcaagttccagaaataaatgactggacccactgtgtagaaacaagtcaaagccaaagtcatacactggctatcagaaaattatgctggaagaattgcagtggaaaaactgaacagaaggaagcagaaggtgctgagtggttacactttgcaagctgtggtgaagatcacactgtgaagatacacagagtcaataaatgtgcactgtaatgg

SEQ ID NO: 4642 - DNA, 2299 bp, Homo Sapiens
  NM_018256
atcggccaccgtcgaccgtttcctctctcatccgttcttttctttgtatttccgcctctcgcctctctctaaaagccgcagttagaggcgagatttaggaaaaacctctgccgagtgagcctctggttgggaatatgtatgagaaaaaaaaactggcaaggcgttagtcaagcaaagctgaaggcagaggaaatttgatatctggctggagtctagaggatttaatgcaaataagatactctgagggcagcgtggcaaaaaaagactacaattcccggtggtcacagcgtttgagaagcgatgctttctgagacttgtagtaactaggagctgtgtttgaactatccaggctcaggacagcctcttgaaaaaaaattttttattaataaagcggatttgagtgggatctttttcctaatcgattacgggcccacacgtatgggaagaattctaacaatgattaaagggacatgctacctttacgactatccttttctaatcgatgactcctaaatctaggagtaggtagtcgatgtttgtggtctgggcgtctgtagaagggcaacctcgtgctttctgcagaggagaccggagggcagaaggcagagtccaggcttagactgcagttcctcgcttacctgtgcagtctaattttgagctgcctctttgtagtcttaaaaggcaggagcttcgtgttgtgggtctgctaacccgtacgtttccgtgggcaagtcgtgtgtactcctcgccatggctcagctccaaacacgcttctacactgataacaagaaatatgccgtagatgatgttcccttctcaatccctgctgcctctgaaattgccgaccttagtaacatcatcaataaactactaaaggacaaaaatgagttccacaaacatgtggagtttgatttccttattaagggccagtttctgcgaatgcccttggacaaacacatggaaatggagaacatctcatcagaagaagttgtggaaatagaatacgtggagaagtatactgcaccccagccagagcaatgcatgttccatgatgactggatcagttcaattaaaggggcagaggaatggatcttgactggttcttatgataagacttctcggatctggtccttggaaggaaagtcaataatgacaattgtgggacatacggatgttgtaaaagatgtggcctgggtgaaaaaagatagtttgtcctgcttattattgagtgcttctatggatcagactattctcttatgggagtggaatgtagagagaaacaaagtgaaagccctacactgctgtagaggtcatgctggaagtgtagattctatagctgttgatggctcaggaactaaattttgcagtggctcctgggataagatgctaaagatctggtctacagtccctacagatgaagaagatgaaatggaggagtccacaaatcgaccaagaaagaaacagaagacagaacagttgggactaacaaggactcccatagtgaccctctctggccacatggaggcagtttcctcagttctgtggtcagatgctgaagaaatctgcagtgcatcttgggaccatacaattagagtgtgggatgttgagtctggcagtcttaagtcaactttgacaggaaataaagtgtttaattgtatttcctattctccactttgtaaacgtttagcatctggaagcacagataggcatatcagactgtgggatccccgaactaaagatggttctttggtgtcgctgtccctaacgtcacatactggttgggtgacatcagtaaaatggtctcctacccatgaacagcagctgatttcaggatctttagataacattgttaagctgtgggatacaagaagttgtaaggctcctctctatgatctggctgctcatgaagacaaagttctgagtgtagactggacagacacagggctacttctgagtggaggagcagacaataaattgtattcctacagatattcacctaccacttcccatgttggggcatgaaagtgaacaataatttgactatagagattatttctgtaaatgaaattggtagagaaccatgaaattacatagatgcagatgcagaaagcagccttttgaagtttatataatgttttcacccttcataacagctaacgtatcactttttcttattttgtatttataataagataggttgtgtttataaaatacaaactgtggcatacattctctatacaaacttgaaattaaactgagttttacatttctctttaaaggtaaaaaaaaaaaaaaaaaa

SEQ ID NO: 4643 - DNA, 4525 bp, Homo Sapiens
  NM_018259
ctcttcaagatggcgggcgccggagactagcttccgcttccggtgtgagcggcccggccgggggggcaagatggcggcggcagtaggggttcgtggccggtacgagctgccgccttgctccggcccaggctggctcctcagcctttccgccttgctgagtgtggcggcacgaggggccttcgccaccacgcactgggtcgtcacggaggacgggaaaatccagcagcaggtggattcaccaatgaacttgaagcatcctcatgacctagtcatattaatgagacaagaagcaacagttaactacctcaaagaattagagaaacaattagttgctcaaaaaattcacatagaagagaatgaggacagagacacaggactggaacagagacataataaagaagacccagactgcatcaaagccaaggtgcccttaggggacctggatctatatgatggcacatacataactttggagagcaaagacatcagtcctgaagattatatagacacagaatctcctgtccctccagacccagagcaacctgattgtactaaaattctagaacttccatatagtatacatgcttttcagcacttgagaggtgtacaggagagagttaatctttctgcacctctgctacctaaagaagacccaatcttcacatatttatctaaacggttaggaaggagtatagatgacataggtcacctcattcatgaaggcctacagaagaacacttcctcgtgggtactgtataacatggcttcattttactggagaattaagaatgagccatatcaggtagtagaatgtgccatgcgagcacttcacttctcttccaggcacaataaagacattgccctggtcaacctggcaaacgttctacacagagcacacttctctgctgatgctgctgtcgtggtccatgcagctctggatgacagtgacttcttcaccagctattacactttggggaatatatatgcaatgcttggggaatataaccactcagtgctctgttatgaccacgctttgcaggccagacctgggtttgagcaagctataaagaggaagcatgctgtcctatgtcagcaaaaactggagcagaaattggaggctcagcatagatctctccagcgaacactgaatgagttaaaagagtatcaaaagcagcatgaccactacctgagacagcaggaaatcctagaaaaacataaactgattcaggaggagcaaatcttaagaaatatcattcatgagactcagatggcaaaagaggcacaattaggaaatcatcagatatgccgactggtcaaccagcagcatagtttacattgccagtgggaccagcctgtacgctatcatcgtggagatatctttgaaaatgtggactatgttcagtttggtgaggattcatcaacctccagtatgatgtctgtgaactttgatgttcaatcaaatcagagtgatatcaatgattcggtcaagtcttctcccgtagcccattctattctctggatttggggcagggactctgatgcatatagggacaaacagcatattctatggcctaaaagagcagattgtacagaaagctaccctagagtccctgttggtggggaattgccaacgtattttctgcctccggaaaacaaaggactcaggatccacgaactcagcagtgatgattattctacagaagaagaggcccaaacccctgactgttccataactgacttcagaaaaagccacactctgtcctacttagtcaaagaattagaggttcgcatggatctgaaagccaaaatgccagatgaccatgcacgaaaaattttgctttcccgtattaataactatactatcccagaagaagaaattgggtctttcttatttcatgctattaataagccaaatgctcctatctggctcatactcaatgaagctggactatactggagagcagtaggaaatagcacttttgctattgcctgtcttcagagggctttgaatttagctccacttcaataccaagatgttcctcttgtcaacttggccaaccttttgattcattacggccttcatcttgatgccactaagctgctacttcaagctttggccatcaatagctctgagcctctgacctttttgagcctgggaaatgcttaccttgctctgaagaatatcagtggggcacttgaggcctttagacaggccttgaaattaaccaccaaatgtccagagtgtgaaaacagcctgaagttgatccgctgtatgcagttttatccttttctgtacaacatcacttcttctgtttgcagtggtacggtggttgaggagagcaatggttctgatgagatggagaattcagatgaaaccaaaatgtcagaagaaatactggctttggtggatgaatttcaacaggcatggcctttggaaggctttgggggtgcactagagatgaaagggcggcgtctagacttacaaggaatacgggtgctgaagaaaggtccccaggatggagtggccagaagctcttgctatggagactgcagaagtgaagatgatgaagcaacagaatggattacattccaggtcaaacgtgtaaagaaacccaaaggagatcataagaaaactcctgggaaaaaagtagaaacaggtcagatagaaaatggacatcgttaccaagcaaacctagagatcactggccccaaggtggcatctcctgggccacaaggaaaaaaacgtgactaccagcgtctgggatggcccagcccggacgaatgcctcaaactccgctgggtagagctgactgccatcgtgagtacctggcttgcagtttcttcaaaaaacattgacatcacagaacacatagattttgccacccctatacagcagccagcaatggagcctctttgcaatggcaatctccccacgagtatgcataccctggaccacttgcatggggtttccaaccgagccagcctgcactacacaggggagagtcagttaacagaggtattacaaaatctcggcaaagaccaatatccacaacagtcgcttgaacagattggcacccgaattgccaaagttttggaaaagaaccagacgtcctgggtcctctccagcatggcagccctctactggagggtgaaaggccaaggaaagaaggcaatcgactgcctccgccaggctctgcactatgcgccacaccagatgaaggatgtgcccctgattagcctggccaacatcttgcacaatgccaagctctggaatgacgccgtcatagtagccaccatggcagtagagatcgcaccacactttgctgtgaaccacttcactctgggcaatgtctacgtggcaatggaagaatttgaaaaagcactggtgtggtatgaatccacattgaagcttcagcccgagtttgtcccagccaagaaccgaatccagaccatccagtgtcacttaatgctgaagaagggacggcgctctccttagtgcacttcttccttctctctttctctttactcatgctctaaaaaaaaagaataagaaaagaaaccaatcattgtcagtatctactattaatgatgtgtgtgaaaataactaagacttataacaggacttttacatatgtgggaattggtttgtttttgtttttacgtttctcctttcccccaaccaacctcagaagaggcaccttcagaaacacacatttcttaaaaggaaagtgcagcttcaagatattgtgtaaatactgagccaagacatttctggagctgtgctctgtctccaaaaacctcaatgcctttagggcttttctcagtggtccagctagccttctctttggaggaggatgaagccgcattgcacattctctgcttcctgtcgtagcctctgttgtcaatggaaatgcggaagcccatctggtgcccgtcagtgagaagcaacgttctgcgctctctccgttagacctccatgctgtccccagtcttgtccattccatgctgctgtgttacaaactctcagaggtagtttgcaggggaggaaggggaatatgattttaaaaacaaaatatttacaacaacaaaaattcttaggatcacctgacctttgtaatgttatttatgttggggagggaggggggctgagaaggggaaatcagcagtgtgcaacatctttataatttgtactttaattacaaatcacaaggaaaccaataagttgaaatcctatataacaggtttatatatatagaatatgtatatttgaagccctctacagactgagtctatgttttactaattctttgttcactgtgttacccatcttggaataagttgtgaatgtcagctccctctctctgaggcctccagacttagctcctcaggagggtaatgagccaaggttgagtgtttccatacaatgcttttacctttgatcccaggagaatcagaaactccaacattttggaatcttcaagggcacatactgagaaaaaaaataaaattgtttatgagcaaaata

SEQ ID NO: 4644 - DNA, 3344 bp, Homo Sapiens
  NM_018264
ggcctggcagtgtcatggctgcccacaggtctgcaggcactcggtacgccgctaacgcggcgaggtagctcggtgcgtctcgcggtaccagtgcgaatcatcgggctatccaggtccgagatcctagtctcctgtcggctctgaggaggatggatccttctgcggatacatgggacctcttctcacctttaatatcattatggataaacaggttttacatttatttgggctttgctgttagcattagcctttggatttgtgtccagattgtcatcaagacgcagggcaagaacttacaggaaaaatctgttccaaaagcagctcaggatttgatgacaaatggttatgtctcccttcaagagaaagacatctttgtgtctggagtgaagattttttatggttctcagactggaacagcgaagggattcgcaacagttcttgctgaagcagttacatccctggatctgcctgtggccattattaatctaaaagaatatgatccagatgatcatctgatagaagaggtgactagtaaaaatgtctgtgtcttcctggttgcgacatacactgacggcctaccaactgaaagtgcagagtggttctgcaaatggttagaggaagcatccattgattttcgatttggcaaaacttacctgaagggtatgagatatgcggtatttggcctgggaaattctgcctatgctagccacttcaacaaggttggcaaaaatgttgacaagtggctctggatgcttggcgcgcatcgtgtgatgagtcgaggggagggcgactgcgacgtggttaaaagcaagcacggcagcattgaggccgacttcagagcatggaagaccaagttcatctcccagctgcaggcacttcagaaaggggagagaaagaagtcctgtggcggccactgcaagaaaggcaaatgtgaatctcaccaacatggctcagaggagagggaggaaggatctcatgagcaggatgaattgcatcatagagacaccgaggaggaagaaccctttgagagctccagtgaagaagagtttggtggtgaggaccatcagagcctaaattccattgttgatgttgaagatttgggcaaaattatggatcatgtgaagaaagaaaagagagaaaaggaacagcaggaagagaagtctggtttgttcaggaacatggggaggaatgaagatggtgaaagaagagctatgataactcctgctctccgagaagcccttactaaacaaggttatcagttgattgggagccactcgggggtgaagctttgcaggtggacaaagtccatgctccgagggagaggaggttgttacaaacacacattctatggaattgagagccatcgctgcatggaaaccaccccgagcttggcgtgtgctaataaatgtgtcttctgttggcggcaccacaccaaccccgtgggcactgagtggcggtggaagatggaccagcctgaaatgatcttgaaggaagccattgaaaaccatcagaacatgattaagcagtttaaaggagtaccgggcgtcaaagcagaacgctttgaagaaggaatgacggtaaagcactgtgcattgtccctcgtgggagaaccaataatgtacccagagatcaacaggtttttgaagctactccaccagtgtaaaatttccagcttcctggtcacaaacgcacaatttcctgcggaaatcaggaacctcgagccggttactcagctgtatgtcagtgtggatgccagtaccaaagacagcctgaagaaaatcgaccgcccactcttcaaggatttctggcagagattccttgacagtttaaaagccttggcagtcaagcaacaacgaactgtctacagactgacgctcgtgaaagcatggaacgtggacgagctccaggcctacgcgcagctcgtgtccctggggaatcctgacttcatcgaagtgaagggcgttacctactgcggagaaagttcagcaagcagtcttaccatggcccacgtgccctggcatgaggaagtggtacagtttgtccacgagttggtggatctgatccccgaatatgaaattgcatgtgaacacgaacactctaattgcctcctgatagcacacagaaagtttaaaattggtggtgaatggtggacatggatcgattataaccgcttccaggagctcatccaggaatatgaagatagtggtggatcaaaaacgttcagcgcaaaggattatatggccagaactcctcactgggcattatttggtgccagtgaaagaggctttgatcccaaggacacaagacatcagagaaagaacaaatcaaaggctatttctggatgttgagattatctgatttcaaggtactgaaggacaaaaacttggatggcctcaaaaggttcttgaacaccactgtgattctccaaggacgaattacgtaaattatactttcatacaaaggagacgataaggcagtaaacatggagacacgggggacagcgtccacactcagagggcctgggccacagccccgatgtttcttttcagaactcagcccctttcctgattttacttctaagaggaaaattattttggggaggaactacacagtcgtgattagaatttatctgatggttttgtattataacttgtaagacctgccagaatgctagtcccgagagtgtcagacaaggaagaagtccctgggcctcttccccttacccggcccttagatttcatggagcagccacttagcattgaattgcactaccctgagctaaacgtgtctgtgctttctaagataagagcttgatccctttcttctatcttaagacagcacctcctgaaaagaatcgaagttgtcacaactctcaattattttttaaatactgcatagattgagttttggtttattaccaacccttcccagaattgcgttggatctaaaactactagatctcatcccattcccatgtaaattaccacagaccgcagtaccggggctggagcggagtgaagctgtctgctgtaagaggagtggccatgtgagggcatggagtcattagtctcacaaacacactttggactgaagaggatcatttctttttgttcgtgaggtcactgtccaggcctctcatatcatgaccagacggcgggtctccatcttctttcactcctgtggccctggctgctttacacaatctgttctataaggttcaggtgttttcaagttggaaagatcataaatactcaaaattgttttcaagttagcaagttcttttaacagtcttttatgcaaaaattgaattaataaaataatcttttgtaaaaaaaaaaaaaaaa

SEQ ID NO: 4645 - DNA, 4149 bp, Homo Sapiens
  NM_018265
acagatgtcttgggatctttaacatttgggatgctgcaaatgccgaagttaaatgaaatacctccggggagggcaggccgcagggaggctcggggggagggaagatggcctggacaaacaggtcctgaagctgcgaggctggagtggagggcgcaggggcaggcgggcggcgccagagctccatgggacagctggggaagctccaggctacctacacaacctggcccaggctggtcacggtgtcccccctccctgctctgtgccctctccttccagaaatccaccatggagagtaaggatgaggtcagcgacaccgacagtggcatcatcctgcagtctggccccgacagcccggtctccccaatgaaggagctgacccatgcagtgcacaagcagcagagggccctggaagcgaggctggaggcctgcctggaggagctgaggagactctgccttcgggaagcggagctgacgggcaccttgccagcggagtatcccctcaaaccaggggaaaaggcccccaaggttcgccgcaggatcggagcggcttacaaactggatgactgggccttgcacagagaggaccccctaagcagcctggagcgccagctggccctgcagctgcagatcacagaggcagcccgtcggctgtgcctggaggagaacctcagcaggcaggctcggcggcagcggaagcactccatgctgcaggaggagaagaagctgcaggagctccagcgctgcctggtcgagcggcggcgcaatagcgagccacctccggctgctgctctccccctgggccgagagctcagtgcctctgatgacagctccctgtcagatgggctcctcctggaggaagaggaatcccaagtgccaaaacctcctccagagtctccagccccaccttctcggcctctcccaccccaaacccttgagggtctgcagccaacaggacctgaggctgggagcccagaacgggctccagtccagaacagcccctggaaggaaaccagcctggaccacccctatgagaagcccaggaagtcttctgagccctggagcgagtccagcagcccagccaccacaccacaggatgggcccagtgcctccagcctgtggcttctggagcctgcctcctaccacgtggttcccatccgtggtgttcctggccagtggcagggccgcaccagtgccccagccacccctgagatacaggggaggaggggccagtcgcagtctctgagggtggattccttccgggcgggtcctgagggccgaggtcgcagcgcctttccccgccgccgccccactcactacacggtgacagtgccagattcctgctttcccgcgaccaagcccccgctgccccacgccgcctgccactcctgctcagaagacagtggctctgacgtctccagcatctcccaccccacttcgccgggcagcagcagccccgacatctcctttctgcagcctctctcccctcccaagacccatcgtcaccgcggggcctgggtcccagccggcagcagagagctggtcgcccaccaccccaagctactgctgccgcctggctatttcccggcggggcggtacgtggtggtggctgagagccccctgccgcctggcgagtgggagctgcgccgcgcagccccgggccctgcttacgaggaggagggcactcccctgcgctaccagcgtctggtgccctcccgcagccgcatcgtgcggacgccctccctgaaggacagcccggcaggccgggggctcagcaaggccgccgtgtccgaggagctcaagtggtggcacgagcgtgcacgcctccggagcacccgcccccactcactggaccgccaaggagctttccgggtcaggagcctgccccttgggagagagggcttcggacgagccctgggaccccgggcacaggtgcccacagtttgtgtgctgcggagatcgcctgatggggcccctgtgcaagtctttgtacctgaaaaaggagagatcatcagccaggtgtaactctgcgccccacgctggaaaaaactgtttcatagaggggctgggctgagacccccccacccctgagtgcctctttcagctcccccatccccatcgcaggccgatgacctggagctgagaccttttattattttttttttacacgacttttttcagaagccctgacctaaggatttatatatgtggattgtcctcaatacccctgtgatatgattatgttttatcccccagagtttggcctactggacttaaggccttgcctgtctgactgacagcctctatctccttatataagacaagtggcaggggacgagtgaagcagagtgagccaccttgggagttctccaacgctctgtgctctggttctaagaaattccctggggaactgcccctggccctcctgtcccactattgctggaggctggacatggtacatactcatgcacatgactctcccccatttcccaggtctctgggtaccccagcctgggctgggggagaatctcttcccccttttctaatgtgctctgtgatgcacacaccaagtggtaggtcaaaggtcagtatatcccggtggtgtattgtcttgctagaccctgctattttcctgaccccctaaatcctctttagggacccagtcactataccctgtctatgccctgtgggctcccagacccctgagctttgagtcagtggcatcacagtttgtagcctcagggggtctggctgggggctggtccatgcttgtggttagtggacagcagccaccctttgacagctacctctgggcatctcaagggcttgcagccccactgctccttctaacattttgtttgtttttgagatggagtctcgctctgtcgcccaggctggaatgctgtagcaagatttcggctcactgcaacccccgtctcccgggttcaagcgaatctcctgcctcagccttccgagtagctgggattacaggcaagcaccaccatgcctgctaattttttatttttagtagagatggggtttcatcatgttggccaggctggtctcgaactcctgacctcaagtgatccacctgccttggcctttcaaagtgctgggattacaggcatgagccaccgcacctggcccttctaacgttttttcatcatagtcccaaaaaccaatactttacaagtggttttggaaaggcaccacttttgtggcatgttctggttgggagagggagtcacagttcctactccccccaccagctatgcttctgctctgagaaggtggttatttatacaaacatggacatactcactcccaagggctgatgagatgctgaattttctttgggggcattcattaattgtcccagctgcagcgactggagcaagtctggaagctgcctgtgctaagaccacccagctgtccctgggttctcatcctagggccttctttgcttccaggtcaggggacctgcttcaatgagaaagcaactgaattgaggctaggagaggtagggagagctgagttctgacttcacctgtgcagaactctctgcccccatgttacctggactggaacagactgtgaatatagcagaaggttccaagaactctggtgtctgacctagaagaggcacagttctctctactggaaagaaaacgatgtagccgattgcacaagggtgccaagggaagacccaggatggcccatcaaaggaacctgggggaggatgcaggaggctgaagggatgcacctggcatttctctcactgtgctcttaccgcatcagcaacccccaacttttgggcctactctgccccccatgcgtgaataccctgcttggatgctgtgcttttccggtttgtctctaagcccctttctccagggcatgttggtttccctggcctctcagtgtcctaactggagcccagagtgccttgttctgagccaggagacggctgagcactggccctccacacctaagcgtcctttacattaacttattggtcttgtataacacctggtgccattgccaagtggctgtgtcctcagctacagagctggaattgtgtggggtttagtgctaaatacttcaataaagtctgttttttgtgattggctgaaaaaaaaaaaaaaaaaaaaa

SEQ ID NO: 4646 - DNA, 2608 bp, Homo Sapiens
  NM_018268
actcggagcagcgcgcgccccgcaatcgccgcagccgcccccgccgtcggccgccgcaccccaagcgactgcccaaactaagcctccgtggctgggtacgggagcgctttggggacaaaaattctccctcaactgtggtctgcattccttcggcccgtgggctgatctggggcgggaagtattagcgtctcagttgcgctgcagccggggaggaaggaggaggccgagcctggggcggagtttgggctgactggggctggaccgggcaagacgccgccgctgcccggatgttgcgatggctgatcgggggaggccgagaaccgcagggactggccgagaaatctcctttacagacaataggtgaagaacaaacccagaatccctacactgaactgctagtactgaaggctcatcatgatattgtacgatttctggtacagttagatgactacagatttgcatctgctggtgatgatggaattgtagttgtgtggaatgcccagacaggggaaaaacttttagaactgaatggacacactcaaaagataacagctattattacatttccttccttggaatcttgtgaagagaaaaatcaactcatcttgacagcctctgctgatagaacagttattgtgtgggatggtgatactaccagacaagttcagagaatatcatgcttccagtctactgtaaagtgtttaactgttcttcagagactagatgtttggctttctggtgggaatgacctgtgtgtgtggaaccgaaaattagatctcctgtgtaagactagccacctttctgatacaggtattagtgctttggttgaaatacctaagaactgtgttgtggcagcagttggcaaagaactgataattttcaggttggtagcacccacagaaggatcactagaatgggatattcttgaagttaagcgcctccttgatcaccaggataatattctctcattgattaatgtcaatgatttgagttttgtcaccggctcccacgtcggagagctgatcatctgggatgccctggactggaccatgcaggcctatgaacgcaacttctgggacccatctccacaactggacacccaacaagaaataaaactctgtcaaaaatcaaatgacatttctattcatcatttcacatgtgatgaagagaatgtatttgctgcagttggaaggggtttatacgtgtatagccttcaaatgaagcgtgtgattgcctgccagaaaactgcacatgactccaatgtcctgcacgttgccagacttccaaacaggcagttaatctcatgctcagaagatggcagtgtacgcatttgggagttaagagaaaaacagcagcttgcagctgagcctgtaccaacaggtttttttaacatgtggggatttggaagagtcagcaaacaagccagccaacctgttaaaaagcagcaagaaaatgctacttcatgttcactggagcttattggagatttgattggacactcatcatctgtggagatgtttctatactttgaagatcatggactagtgacgtgctccgctgatcatctcattattttgtggaaaaatggagagcgagaatctggattgcgcagtttaagattatttcaaaaattagaggagaatggtgacttataccttgctgtctagtttaaggaattaaaaatacacatgcatgaaccttgaacatcaaatatcgggtactactctgaaaaccattaatatattgatcacttaaattggtaattttttttgtcagtccataaaattctacatgtttaaattttttgtggacctaccaaccaggaacatgttgcttctcaggtcctagtatatcctccaaagaatataccacaagtttttccatttgactttgagctgctgttgaagtggtgagtgctgtgttttgagcttattttgaacctagatccttgtgaaaggtacaaatagaggtaatagttaagttatggcatttattagaagttttattatttggcttcctttagaattattgtgaagtttaaaaatagcctttctcctgcaaattttcctagtctttagtaactgttagtgttctatatagcacaaacttgaatctctcagccaaaaaagggaacatatatactgtttaagtatggcaagttttctttggtaccaatttgtttagataattttaaaaatgttttttagttctagctactaaaacctgtatgaactcaaatggataggcatcttgtgagggtgtgtttttcccagtgtgaattggcttgaagagccatgggctaaatgggtactagaacaacaactgcccctcatgtacgccaaggatgagctctagatcatttgagaggcacagtgtttccggagtcagggactgcagctgagcgcaactgccccatctgaccactgactcaaatacgaactgcttgagacagacttcttttatgtagttctttgcagtgtccattgagacactataaccagccttgtaacaatatgttttctccttttggtgctaaaaaataaaaatattagaaagtaaaaaaaaaaaaaaaaaaaaaaaaaaaaaaaaaaaaaaaaaaaaaaaaaaa

SEQ ID NO: 4647 - DNA, 2265 bp, Homo Sapiens
  NM_018273
ggaggctcaatgacagtcgagctttggctaaggctccggggaaagggtctagccatgctgcatgtgacccggggggtctgggggtccagggtccgagtatggccactgttgcccgcgctcctcgggcccccccgggccctctcatcgctggcagccaaaatgggggagtatcgcaagatgtggaaccccagggagccccgcgactgggcccagcagtaccgcgagcgcttcattcccttctccaaggagcagctgctccgcctcctaatacaggaattccactcgagtccggcagagaaggcggctttggaggcgttctcggcccacgtggacttctgcaccctgttccactaccaccaaatcctggcccggctgcaggccttatatgaccccatcaaccctgacagggagaccctcgatcagccatcactaacggatccccagcgtctgtctaatgagcaggaggtgcttcgggctctggagcccctgctggcccaggccaacttctccccgctgtctgaggacaccctggcctacgcgctggtggtccaccaccctcaggatgaggtccaggtgacagtaaatttggatcagtatgtctacattcacttctgggccctgggccagcgagtcgggcagatgcccctgaagtccagcgtgggctccaggcgtggcttcttcaccaagctgccccctgcggagaggagatactttaagcgggtggtcctggcagcccggaccaaacggggacacctggtactgaagagtttcaaggacacgccgctggaaggcctggagcagctgctgccggagctgaaggtgcgcacgcccaccctgcagcgcgccctgctcaacctcatgctggtagtctccggcgtggcgatcttcgtcaacgtgggcatggtggtgctaaccgacctcaaggtggccacctccctgctgctgctgctcttcgccatcttcatgggcctgcgggcctccaagatgttcgggcagcggcgcagcgcgcaggcgttggagctggcgcacatgctgtactatcgcagtacgtccaacaactcggagctgctcagcgccctggccctgcgcgcgcaggacgagcacaccaaggaggcgctgctggctcacagcttcctggcccggcggccagggggcactcaaggctcgcccgaagagacctccaggtggctcaggtcggaggtggagaactggctcctagccaagtcaggctgtgaggtgaccttcaacggaactcgggccctggcgcatctgcaggccctgacccccagcatgggattgtacccacccccgggtttccccaaactagacccagtggctccgatcacttccgagcccccgcaagccacgcccagcagtaacatctcctgagtagaacctacctccctgcccagtcagcaggctaggaactaagccccgcctccttcacgacaggctgtcaattacggttattatacttttcactccaacttccaataactgacaggtgattatttttgctgcactgtgtgcttaagcaaagcagccaatcaaagcagctagcagttgttaagtcttccccgccccttcgatgaacagccaatcaaagcgatttagctctgcttctgttctatttcttagtcccaccctcaccataaatatccaagtgtggtttggctgaggagctgagggtgtctgccaatcacagctgctcagctctggcttctgtaaaccgccaggtagaagagttaaagctgcgccctcccgagactatatatcattgtcgttttcagcccgctccgggcaaactgcccatcatgtgcaccaaggccgttagccctgcctcctggcaaacgtccagtgacagctgctgggttccatcaactttgggcagccggttgtcgctgcagggaaggaaccaataagaatttctaaaggaaacctgatcttgctatcaattgctgctgcttaaatggcaggccaactggtcagctgctgatcagggtgtctaggctgaaggagttggagaccttgtgctaggtaggtgaaccagaaaccaccctcgccaccaagactcgctcccaacctggctcccggcaacctcaggtgccttcctcgcccaggtctttcaccctttctacagaaactacctcggtctggatctccccaccaccagcagcctgtgcaatatttattggtctatcaatttctcccgtctcctgtcccaaagtaataaatcatgtttaataagtaaaaaaaaaaaaaaaa

SEQ ID NO: 4648 - DNA, 4659 bp, Homo Sapiens
  NM_018279
aggcgctagaggcgggggcgccgggaggcgcgggctttgctcctggggtctcggccttggccggctggacctgaccctagggcggcttgcgcagctgtcgggacgtgactgcgttcagccgcgtcgggcgtgcttcccagacttgcccaagttcgggtgccctagctgcccctttgcagccgctggcctacccggcccgcgggtgagaaggttgcgacgggaggtgggtggaactcgccagcgccgggaccgcggattggctgcctcggctttctcttttccccgtgggctccggcgtgaggcgctgaagcggccggcagccggcgaccggccctcaccgtccgccgggttgcgctctgcttttgcggtgaggcgttgaccacgcccatatgaattggagctctccgccagtaggagtttccggaaggagtttgaatttttgtgatttttatgcttgtttggtcggtggaatatgttgggatttatgtttgcctctgaacaagtgtcttgctcacatcgtaaatgactttctctccgaaacgctaaatattctttcccgcaggagctcatatccttattttccatgacagatcttaacgacaatatatgcaaaagatatataaagatgataactaatatagttatactgagcctgatcatttgcatttcgttagctttctggattatatcaatgactgcaagcacctattatggtaacttacgacctatttctccgtggcgttggctgttttctgttgttgttcctgttctgatcgtctctaatggccttaaaaagaaaagtctagatcacagtggggctctaggagggctagtcgttggatttatcctaaccattgcaaatttcagcttttttacctctttgctgatgtttttcttgtcttcttcgaaactcactaaatggaagggagaagtgaagaagcgtctagattcagaatataaggaaggtgggcaaaggaattgggttcaggtgttctgtaatggagctgtacccacagaactggccctgctgtacatgatagaaaatggccccggggaaatcccagtcgatttttccaagcagtactccgcttcctggatgtgtttgtctctcttggctgcactggcctgctctgctggagacacatgggcttcagaagttggcccagttctgagtaaaagttctccaagactgataacaacctgggagaaagttccagttggtaccaatggaggagttacagtggtgggccttgtctccagtctccttggtggtacctttgtgggcattgcatacttcctcacacagctgatttttgtgaatgatttagacatttctgccccgcagtggccaattattgcatttggtggtttagctggattactaggatcaattgtggactcatacttaggggctacaatgcagtatactgggttggatgaaagcactggcatggtggtcaacagcccaacaaataaggcaaggcacatagcagggaaacccattcttgataacaacgcagtgaatctgttttcttctgttcttattgccctcttgctcccaactgctgcttggggtttttggcccagggggtgaactttatttcatttccacaggttgaaactggtgagtccagctaaatttgcaattccaactttcatcctaagaataataactgtaatggcaaagcggaaatgccagttcctcctgtattccattgagatgggatttcacattttcctctcatcaactcccctgtaatagctagcgtctttctagtgaaagagaagaattcctagaacttatgcatttttttcctgctgaatggaagtcttgagcaatgaagctatattgtccctacatattactatatattgaactgaaagttcttacataatcaatgtcaagttttgtcttattttgttttgtttgtttaaaccagtgtaggaaataaaagtgatgatatttaaaatagttctcagttgaagcagagaaatgccactgtgctagttgcccaaatgttgtatctattttaaatagtttaagctgatgtgtatgggagcctaaacaagtgtagtatcctgaacttctcccattaattgctattcacaattgggaaaagtgtggagattggttcctagtgagttttgtggcctactccacatttgttcttccttcctcagggttagtgatgaaaaaaagtaaatatctttttcatatgtccattagaatgtatgaaaaaaatcattttaactaaaagcaaaagaattttatcttatatctaaaaaatatataacttactatatgtttcagttgctctctgaacaaaaattatcttcaatttaatatgtggaatgtgttttctagctttctttgaattatgtatggcaacctggtttagcactggcatcctgaacagttaagagtcactgggaaattattgtatttctttataaatttactgtcatatcaattgctggaaaatgctatgatttttctattattaccttctaagttgtattctctcttacactgtagcctcaactaaggcaattctgctatgtttgttcttcactatgatttactgtgtgccaaaggagttttgacagggtacagagtattttactaaaagtatttttaaatgtttctcatgtgatttctgtaccttcttcctcctgccccttttgcttttttaaagaaactggggaaggatttatgaatacaccaccaccagagtggataatgcttagaattctttattggtggccctactatggtgatgatctagaactgacttacttcaggacagaagaaaaaacaatcacacccttaacctttaagccagttagatcagggggttgcaacaattgggttaaactttgggtatacattggaagcaccagggcatgtttgctttttttgtttatgtgtttgttttttgagacagagtctcacactgtggcccaggctggactccagcacagtggcatgatctcagctccgcctcctgggttcacgtgattctcatgcctcagcctcccaagtagctgggatcacaggcgtgcaccatcacgcccggctaatttttgtattttcagtagagacagggtttcgccacgttggctaggctggtctcgaactcctgacctcaagtgatctgcccatctcagcctcccaaagatctattacaagatgtgagccactgtgcccagccaccagggcatgtttttaaaaaagtactgatgtctgggtttcacactgcaaaattctgatttatctgatctaaggtacagcctggatattgagactttttaaagctctgactgtacattgaatcatcatgtaaggagtttttaaaacattgttgccagggcccctttctagaccaagttagtcagaatgttggacaatgaggcccatgcatgggtatttttacaaagctctctgggagattctaatgcttaaccaaattgagaagcactgaataagaatatcctgggccgggcgcactggctcatgcctgtaatcccagcattttggaaggccgaggcgggtggatcacttgaggtcaggagttcgagaccagcctggccaacatggtgaaacaccgtctctactaaaaatacaaaaaattaggtgtggtggtgcgtgcctgtattcccagccactcaggaggctgaggcaggagaatcgctggaacctgggatgtggaggttgcagtgagccaagattgcaccactgtactccagcctgggcaacagagggagactccatctagactccatctcaaaaaaaaaaaaaaaaaaaaaaaaaaaaaaaaaaaaaaagaatattctaagcactagaactacataagaatgtcctaaagcactgtatctaagcacttgaaaagaatgggacttttcggttttagggagataactattagcaaccacacaatatgttatctttatggatgaataacttctggtaatgacacagtgtcttacagctacatcatttataaaatcatgtgtcagttttcacacagcctgcacatcgttctgacatgccctttttttccctggagatttatcctcatgacatacaaggggacaaaaatatttattgggactgtctttgaatttagtagaatcactgtatcattaacagtttggggaagtactgctttgcagtcctttatttgaaaacttaggtctagctgtgttttgcatcaaaatttttgagctattcaaaaactaataggatctgtgtaaaatatttcactcaaaactactaaaaaaaagtctgggatggcagctcattatcaaatatactcctatttttgtggtgatttatgaacatccccactaagtataactaaagatcataaagagcctcagatcaagtttggtcaggttttgtcaccaagctttgtaaataaactggttttcatagctttttggagatgagaattgaggataagaaattgtgtctctgtcctttttttttttttttgttaagtcttacatgtattttactgtaacatcttttgaattggatatttaactaattcaacatatttttcctctttgcagaatgggcagttcatgttaaaatcacttttcatggaaagagctctatgtaacagcataataaaactgcctacctagcagcataaa

SEQ ID NO: 4649 - DNA, 1498 bp, Homo Sapiens
  NM_018281
aattggcgaaggcttcgcccgacgccggaactgcgagctctcagcgggagccgagacggtgcagggccggagaagcaccttcactcccagcctgcgccccgatgctgcgcgttctgtgcctcctgcgcccctggaggccccttcgggcccgcggctgcgcttccgacggggcggccgggggctcagagatccaagtgcgcgccctggcgggtccggaccaagggatcactgagattctgatgaacagaccttctgcccgcaatgccttggggaatgtcttcgtcagtgagctgctggaaactctggcccagctgcgggaggaccggcaagtgcgtgtcctgctcttcagaagtggagtgaagggcgtgttctgtgcaggtgcagacctgaaggagcgggaacagatgagtgaagcagaggtgggggtgtttgtccagcgactccggggcctgatgaatgacatcgcttcctcggcagtcatgggactgattgagaccacgcgagggctcctcccgggggcaggagggactcagaggctgccccgttgtctgggggtggccctggcgaaggagctcatcttcacgggccgacgactgagtggaactgaggcccacgtactggggctggtgaatcacgctgtggcccagaacgaggagggggacgccgcctaccagcgggcacgagcactggcccaggagatcctgccccaggcccccattgccgtgcggctgggcaaagtagccattgaccgaggaacggaggtggacattgcatctgggatggccattgaagggatgtgctatgcccagaatattccaacccgggaccggctagagggcatggcagccttcagggagaagcggactcccaaatttgttggcaaatgacccccattttaaccttcagcatgggagatgcatgccctgaagagcaggatccagaaggaagatttgtggccagattgccttcatcatttcacctctccagacttccatttcttcacaaggatgatgatggaaataaaatgactggcgtgatgcctggaaccaaggtgctgatcctaccacctactgctaccttccttagcttcaccctggctagaaataatcacgagggttgggtttgctttggaaaatgcctgtctctctacttgaatgataaagaattaaattagatctctctgagtcttggtatcattggctctcagcccctgacctctctcagttatcaggcactcattagagatgtcagaagattttaagatacccctagtttcttcctgtgaacaacagaggtaataaataaactctgacatcggttgaacatgtgtcaggggtcagactgcagatcccagtctctgccagttacttgctgtataaccgtggacaaattgtttaaatgctctgggcctcagcttcctcacctacaaaacaaaacttgtgaagatttagcaaaataaaaacacttcatattcaataaatatgttttaattgttaaa

SEQ ID NO: 4650 - DNA, 1255 bp, Homo Sapiens
  NM_018285
ccctggccaatgggaagtgagggcgtgactttaagtctttctttcattggcccagggtcccaggccgtccaggtcttggggcgccgcggcggaaatcgcgcggatgccagaacgcgctctcagcttcgggtcctgcggctgcggctgccgccatcatggtgcggaagcttaagttccacgagcagaagctgctgaagcaggtggacttcctgaactgggaggtcaccgaccacaacctgcacgagctgcgcgtgctgcggcgttaccggctgcagcggcgggaggactacacgcgctacaaccagctgagccgtgccgtgcgtgagctggcgcggcgcctgcgcgacctgcccgaacgcgaccagttccgcgtgcgcgcttcggccgcgctgctggacaagctgtatgctctcggcttggtgcccacgcgcggttcgctggagctctgcgacttcgtcacggcctcgtccttctgccgccgccgcctccccaccgtgctcctcaagctgcgcatggcgcagcaccttcaggctgccgtggcctttgtggagcaagggcacgtacgcgtgggccctgacgtggttaccgaccccgccttccttgtcacgcgcagcatggaggactttgtcacttgggtggactcgtccaagatcaagcggcacgtgctagagtacaatgaggagcgcgatgacttcgatctggaagcctagcggatctcccactttgcatggctgtcttttacagatgggaaaactgaggcctgatgctggagattctatgagggtgctctcctcaagggtatcagacggtcgtaggttcttaagaatttgattcatcagtggcaggccatgcatagagccacgggaggtgcgtccttgttttccagggaatgttcttagaacttggactactgattattaattgactgtgccttgggaaacagtgggaagtaacttggtgcagcactggggtattgttggcttcttgtgttggaaactttgtaatgtaaaaggaaaaactggaaatccccacgccctgtttccctttatcgtcttgtggttggactggttcaattcgtttaactcgaattcttgctcctggccgtggttaagctgtgtacagatgatggagagtttggcctcaagtttttataaactgagcgagactagtgttcaggatctcctcccttgtttaaatgtcaataaatgccccaactgctttgtaagtgcaactttttaaaaaaaaaaaaaaaaaa

SEQ ID NO: 4651 - DNA, 3238 bp, Homo Sapiens
  NM_018290
cacgtcttggggccgggccggaaggcagatctcaccgcctgcttccctctgcagcggtagcacaagctcagcgatggcggctccagaaggcagcggtctaggcgaggacgcccggctggaccaggagaccgcccagtggctgcgctgggacaagaattccttaactttggaggcagtgaaacgactaatagcagaaggtaataaagaagaactacgaaaatgttttggggcccgaatggagtttgggacagctggcctccgagctgctatgggacctggaatttctcgtatgaatgacttgaccatcatccagactacacagggattttgcagatacctggaaaaacaattcagtgacttaaagcagaaaggcatcgtgatcagttttgacgcccgagctcatccatccagtgggggtagcagcagaaggtttgcccgacttgctgcaaccacatttatcagtcaggggattcctgtgtacctcttttctgatataacgccaaccccctttgtgcccttcacagtatcacatttgaaactttgtgctggaatcatgataactgcatctcacaatccaaagcaggataatggttataaggtctattgggataatggagctcagatcatttctcctcacgataaagggatttctcaagctattgaagaaaatctagaaccgtggcctcaagcttgggacgattctttaattgatagcagtccacttctccacaatccgagtgcttccatcaataatgactactttgaagaccttaaaaagtactgtttccacaggagcgtgaacagggagacaaaggtgaagtttgtgcacacctctgtccatggggtgggtcatagctttgtgcagtcagctttcaaggcttttgaccttgttcctcctgaggctgttcctgaacagaaagatccggatcctgagtttccaacagtgaaatacccgaatcccgaagaggggaaaggtgtcttgactttgtcttttgctttggctgacaaaaccaaggccagaattgttttagctaacgacccggatgctgatagacttgctgtggcagaaaagcaagacagtggtgaatggagggtgttttcaggcaatgagttgggggccctcctgggctggtggctttttacatcttggaaagagaagaaccaggatcgcagtgctctcaaagacacgtacatgttgtccagcaccgtctcctccaaaatcttgcgggccattgccttaaaggaaggttttcattttgaggaaacattaactggctttaagtggatgggaaacagagccaaacagctaatagaccaggggaaaactgttttatttgcatttgaagaagctattggatacatgtgctgcccttttgttctggacaaagatggagtcagtgccgctgtcataagtgcagagttggctagcttcctagcaaccaagaatttgtctttgtctcagcaactaaaggccatttatgtggagtatggctaccatattactaaagcttcctattttatctgccatgatcaagaaaccattaagaaattatttgaaaacctcagaaactacgatggaaaaaataattatccaaaagcttgtggcaaatttgaaatttctgccattagggaccttacaactggctatgatgatagccaacctgataaaaaagctgttcttcccactagtaaaagcagccaaatgatcaccttcacctttgctaatggaggcgtggccaccatgcgcaccagtgggacagagcccaaaatcaagtactatgcagagctgtgtgccccacctgggaacagtgatcctgagcagctgaagaaggaactgaatgaactggtcagtgctattgaagaacattttttccagccacagaagtacaatctgcagccaaaagcagactaaaatagtccagccttgggtatacttgcatttacctacaattaagctgggtttaacttgttaagcaatatttttaagggccaaatgattcaaaacatcacaggtatttatgtgttttacaaagacctacattcctcattgtttcatgtttgacctttaaggtgaaaaaagaaaatggccaaacccaacaaactaacattcctactaaaaagttgagcttggacatattttgaatttttgtaagtgaagatttttaaactgactaacttaaaaaaatagattgtaattgatgtgccttaatttgcataaatcataaatgtatgtcctctctgtaattgttttaatgtgtgcttgaaatatccagaaaacctatggagttagtaaattctgggctgtcatatgtaggatagccactttttaggtatatgtacatttatatttctatcaattccttagaaagtaaaataaatgaatagatcaaatgttgtgttcatgtttggggaaaatataatttgcagaaacctatgaagtagagcaaagatgctttaaaaagataagtttttttgaactaaattttttttagttctaataatgcacataggatattagtacatcgtacacgtgctaggaaaaaacagcttcagtgtctttgtttaatgtgttgaaactcatctttttaaatcttgaaaaaccaattgtttacttgaaacttgaaagtagcatatttttctgttttttggttgtttgttcatttgtattagcacaatttaatgtaattcctggtttggaggcagcaagacctatgagcaagaactatttacttgaccctcgtttttttctcttgttcttgtgtggtctgaaatctaaaactagactttattatgatagatttcctataagccaatttctaataacaaatagatttattatttaatctgtaccttctatcttctcataattcgtggtcttacagccttccaaaataactccagttgggcacccatgagctaggatcaaactttctttatatactttatatattttacattatttctgatttttaaagcaaatgattgccattatgattacactcaacctaaatagttatgaacagtttcagaacaatgaaaaattacaatactatgtgatagtattgtaactatttttctattttagtcatatgtcgcttatatcctaccagaactcttaaatctataatattcgatatattctacaaactgctttattgtagaagccatatttatgtttattttataatgttttctagtgtcaaactgtactgtggagaaaagaaatgttagatctgtg

SEQ ID NO: 4652 - DNA, 2030 bp, Homo Sapiens
  NM_018291
gctggtgcgcaggctcttagcgcgcacgcccagaaagaggcttctccaacccggcccggcccttccttcccctttcccgcagtcgttgcctcctcctcccctgcctcctcctccccttcctcctcctggccgcttagtctcacacccgccgggccgttgttcccgagacgttgttgagtcccctgtgtcctcttctgggtggaggaactgcaatgtctggtggagaacagaaaccagagaggtactatgtgggtgtggacgttggaacaggcagtgtccgtgcagctctggtggaccagagtggggtcctgttggcttttgcagaccagccaattaagaattgggagccccagttcaaccaccatgagcagtcctccgaggacatctgggctgcgtgctgtgttgtcacaaagaaagttgtacaagggattgatttaaaccaaattcgaggacttgggtttgatgccacgtgttctctggttgttttggataagcagtttcacccattaccagtcaaccaggaaggggattcccatcgaaacgtcatcatgtggctggaccatcgagcagtcagtcaagttaacaggatcaatgagaccaagcacagtgtcctccagtacgtcgggggggtgatgtctgtggaaatgcaggccccgaaacttctgtggctgaaagagaacttgagagagatttgctgggataaggcgggacatttctttgatctcccggacttcttatcgtggaaggcaacaggtgtcacagcacggtctctctgctccctggtgtgtaagtggacatattcagcagagaaaggctgggacgacagtttctggaaaatgattggtttggaagactttgttgcagataattacagcaaaataggaaaccaagtgctacctcctggagcttctcttggaaatgggctcacaccagaggcagcaagagaccttggccttctccctgggattgcggtcgcagcttcactcattgatgcccatgcaggaggactaggagtgattggggcagatgtgagagggcacggcctcatctgtgaggggcagccagtgacgtcacggctggctgtcatctgtggaacgtcttcttgtcacatggggatcagcaaagacccgatttttgtaccaggcgtctgggggccttatttctcagccatggtacctgggttctggctgaatgaaggtggtcagagcgttactggaaaattgatagaccacatggtacaaggccatgctgcttttccagaactacaagtaaaggccacagccagatgccagagtatatatgcatatttgaacagtcacctggatctgattaagaaggctcagcctgtgggtttccttactgttgatttacatgtttggccagatttccatggcaaccggtctcccttagcagatctgacactaaagggcatggtcaccggattgaaactgtctcaggaccttgatgatcttgccattctctacctggccacagttcaagccattgctttggggactcgcttcattatagaagccatggaggcagcagggcactcaatcagtactcttttcctatgtggaggcctcagcaagaatcccctttttgtgcaaatgcatgcggacattactggcatgcctgtggtcctgtcgcaagaggtggagtccgttcttgtgggtgctgctgttctgggtgcctgtgcctcaggggatttcgcttctgtacaggaagcaatggcaaaaatgagcaaagttgggaaagttgtgttcccgagactacaggataaaaaatactatgataagaaataccaagtattcctgaagctggttgaacaccagaaggagtatttggcgatcatgaatgatgactgaacagggcttgcaggtgctgatgccagaagcttctgtgccattgcattaaagacttgtcatttgatccatgttcaagacccttgaggtattgtttcatcatttctgtattgtctttcaataaagaaaacaaacatgtgcaaccagaaaaaaaaaaaaaaaaaa

SEQ ID NO: 4653 - DNA, 4957 bp, Homo Sapiens
  NM_018293
taatgcaggtaatctaaaaaggacggaggaacagcaaggtttggatgaagggtttgactctcttacagatcagagcactggagagactgatcctgatgatgtatctggagtgcagcctaaaggtcatattaatacgaagaaaaatcttacagctctcagtacttccaaagtagatcacaatgtcccaaggcatcgttgtatgttatgtaacaaggaatttttaggtggtcacattgtaaggcatgcccaggctcatcagaaaaaaggcagttttgcatgtgtaatatgtggtaggaaatttagaaacagaggacttatgcagaagcatttgaagaatcatgttaagaagatacagaggcagcaaattgctgcagctcaacaggatgatcaggaagtcactgctttggaagaaataaattgttctagttcttccatttcatttgaaaatgggaattctgatagtaaggatttggaagtggagacacttactgcttctagtgaaggaaacaaagaagtcatccctgagcatgtggctgaattcattgaaattcccataagtgtaccagaagatgttattgaaaatgttattgaaaatggcagtcctaataattctttaaataatgttttcaagcctttaactgaatgtggggatgattatgaggaggaagaggatgaagaaggtgattatgaagaagatgattatgacctgaatcaagaaacttcagtaattcataaaatcaatggaactgtgtgccatccaaaagacatatatgccacagatcaagaaggaaactttaagtgtcctgctcttggttgtgtccggatatttaaaagaattgggtttctaaataaacatgcaatgaccgtacatccaaccgatttaaatgtgcgacaaacagtaatgaagtggagcaaaggaaaatgcaaattttgtcaaaggcaatttgaagattctcaacattttatagaccaccttaatagacatagctatccaaatgtgtatttttgtttgcattttaattgcaacgagtcgtttaagctgccgttccagcttgcccagcacacaaaaagtcacaggatatttcaggctcagtgtagttttccagaatgccatgagctttttgaagatcttcctctgctgtatgaacatgaagctcaacactatttaagtaaaacaccagagtcatctgcacaaccaagtgaaacaattctttgggatgttcagacagactcaaatcctaatcaggaaaaagactcatctagtaatgagaaacaaactattagtctgccagtttctactagcaaatcaaggaaagagtctacagaaccaaagacatgtatagaaagtatggaaaagaaaacagacagtttagttcagaatggaaacgaacgttctgatgacactgtttcaaatataagcttgatagaccaaaagatgcctgacatagagccaaattctgaaaataattgtagtagtagtgatatagtcaatggacacagtgaaatagagcaaacacctttagtttcatcagatcctgctttgaaaattgatacaaacagaatcaggacagaaaatggttccattttgcccagtgttgtaccacaagaacacaacaccttgccagtatctcaggcaccttccaaaccaaatctgacaagtgaacatacttcatatggcttaattttaacaaaaccatacgtcagaccattgcctcccagttaccttgatgaacggtatcttagtatgccaaaacgcagaaaatttctgactgatagagtagatgcctgttctgatcaagataacgtgtataaaaaatcagtgaaaagattaagatgtggcaaatgcctgaccacctactgtaatgcagaagcacttgaggctcatcttgcacaaaagaaatgtcagacactctttggatttgattcagatgatgaaagtgcctgatgaaaacggttcagaaagatctgtcaatcaagcagtagtgtgaaaaaagcactataagaaaatgcatcatcagtttgctatttccctgatggccttaattttagagtggtcttggattactaaagataaagacaaagcacattttctagaatgaactcacagagatgtgctggcttagactccaaaaggattataaaactcccaaagtaccagttttccagaaaaccacattttacagtttatgatgattaatagcagcagcatgttcagtttcgcttatatgagaaacatgtttaggcaactagtcagaaaaccagctatggccttacagaaagggaaaaattaacccattattaaaaagtgtgtgtggggaggggggctggtttacaatattaaaccatttaaagtattttattctacaaatggggtttgttttcttgtcatgcataatcagattatgtcccctcccttctggttaaacatggtttaaggaaccgctgctgtttggtttgtgattgatttagaaacttatacattaacttaccacagtgctatcaattaaagattgtaacaggtttccagatgattaattaggtcaaagttcaatgaatggcacgccagcattgaaaattaaaaaacaaaacaaaaaaaaccacagtgctttgctaataagctcttgatagaacctcccactaaccacttttgtggtacaaattagttaacatttaaagggcagcagtgtcaataaaatagaaaaaaaccgatcagtactctggggagagatgaaaggaatctaagactttacaggctttgtagttgaaggaaaacactgaattgcaaattattcaatgtgaataatggtaaaagcacactgggatacttctgtttgtgtatatgttgggacattgcttgatgattcatagtaaggtcctttagacattaatgtgagttatctaagtacagtcctattaaaataactggctcaaaaaatcagctaagaatcaggttgagaaatcattcattttattctattaggagaggtaattccaaaataagccatactattcctgtttttttaattcattagtgatgactctggtctgaacagtaatttttatatgtaaaaggaagtatttacacaaaacatttgcacaagaacacagtaagagatacattcaagcattgttttccttagtgatgttattttcctaagaagattttaacttaataaagtgttaaaacaataaatatttttaaaaataccctctcagatgttttccatttgtccattattgaaaggaagatgcttaaagacttccttttactaatagtgtgtaaatctaaaacagggattaaaataacaaaaaggcagtgtttcaaaacagatctcctaatgtcccaatgtcaaatattccagttattctaaataataaaatctttgttcaaggcagataatctcatcagaccctattagagcttcttgaatgaggctattacggaagtggggaatttcttccaggtagcatccatattttattaaattaggatttccagatcatgatagatcagatgatttttttttaatttcccggttttattggtttatcatcagcattcactactatgcaatgatggtcataagtccattccaaatttaaatttgtttctgttatgtagcctatattaggctgtggaatttacatttaggtaactaaacacagctcataattaaaatcttttctttaaggtcagctaaaaaaaatgtttcctgtatttcttgatactaaaaatgtaatgatttttattttagttcattctaaaagtatgtcttgtaataaaaagtctgtttggaaactggttcatttggacagtgaagtcttttgaaatatttctgctttgtacattttccagaagtttaatattttatcacattttccacaagttgtaacaattgatataaatccatgcccacaaagtattccattttcattacttttactgttcatgccaagatgtttcaaatatattccatttgtaatctgtctttaacttgaggtttatttctacttttgtgttgctaaaattatttctgcaagactgagatcaaactggtttatatataactaaatcaaggaatgttttataaaattctatttgaccacactgtcttaacctcggtttatatacttctcaaatagctattgaaagaatgtgttcattttattacatctgtcttttaaaacataaacctacatcattttgcttttatagggtgcataaacttccaacagttctaatttgagcgcttcagaagaaaaggaagcttgcttcttattcctcagattcttctttttttctgttttgaggatgtattcatcctacatggaccaagtttcaaatctttgtttttaaataaaaatttccttcaaaaaattaaatgttaaatttctgctgtgtgtcagtaaggtgaagaaaatagcaaatctgaatttttgctgctcagatattatggaggaggtaaaaaggggaatctccgtggacaaggacactggtactttgggctttagccatattcatttttttgaaaccaccaattatataatacttaaataatttatatcattgaacttgtgattcttttcaaatcacactgaaggttcagccgtactcctttcatgtttggtttaatactgttgtatggatgaaaaacctaaaagggatgatagtgtttattttttaatttatttggtactgtaaaacaccttttcagaatgagtaaatgctgcatatgcattttggagttgttaatatgtgaaagatattacagattcagcaagaaaggaaatttgtgcttccttgttgaatgttaaattattttactttgcattttataagagtacaaattaaaactgagccattgaactgcaataaatcaacaatagtgtctcatttcaagaaattttttgtactgtacatagatttgttcaataaaacgtccttgttggtaatcaa

SEQ ID NO: 4654 - DNA, 2622 bp, Homo Sapiens
  NM_018300
agacctggcttctgtactgcgcgcgcacatgcgcgcaaacccggaagcggattatgtggagtgaaagttacaccgtggcggattgacttctaaggactcttggtacatgaggaagaaacccggaaggggaagaggaaagcaaaggcgtcaggaatggttcttcctcaggtattttttctaaatgtgagatcaaggaattaccaccaaaaaaggagagtaatacaggagaaatattccagacagtaatgttggaaagacatgaaagccacgacatacaagatttttgcttcagagaaacccagaaaaatgtacatgactctcagtgtctgtggaaacatgattgaagacattataagcgagtgcgtgtgacctataaggaaagtctcattggtagaagagacatgcatgggagaaaggatgatgcacaaaagcagcctgttaaaaatcagcttggattaaacccgcagtcacatctaccagaactgcagctatttcaagctgaagggaaaatatataaatatgatcacatggaaaaatctgtcaacagtagttccttagtttccccaccccaacgtatttcttctactgtcaaaacccacatttctcatacatatgaatgtaattttgtggattcattattcacacaaaaagagaaagcaaatattgggacagaacactacaaatgtagtgagcgtggcaaggcctttcatcaaggcttacattttactatacatcaaataatccatactaaagagacgcaatttaaatgtgatatatgtggcaagatcttcaataaaaaatcaaaccttgcaagtcatcaaagaattcatactggagagaagccatataaatgtaatgaatgtggcaaggtcttccataatatgtcacaccttgcacagcatcgcaggattcatactggagagaaaccatataaatgtaatgaatgtggcaaggtctttaatcaaatttcacaccttgcacaacatcaaagaattcataccggagagaaaccttataaatgtaatgaatgtggaaaggtcttccatcaaatttcacaccttgcacaacatcggacaattcatactggagaaaaaccttacgaatgtaacaaatgtggcaaggtgttcagtcgcaattcctaccttgtacaacatctgatcattcatactggagagaaaccttacagatgtaatgtatgtggaaaggtcttccatcatatttcacaccttgcacaacatcagagaatccacactggagagaaaccttacaaatgtaatgagtgtggcaaggtcttcagtcacaagtcatccctagtaaatcactggagaattcatactggagagaaaccttacaaatgtaatgagtgtggcaaggtcttcagtcacaagtcatccctagtaaatcactggagaatccacactggagagaaaccttacaaatgtaatgaatgtggcaaggtcttcagtcgcaattcataccttgcccaacatctgataattcatgccggtgagaaaccttataagtgtgatgaatgtgacaaagcattcagtcaaaattcacatcttgtacaacatcacagaatccatactggagagaaaccttacaaatgtgatgaatgtggcaaagtcttcagtcaaaattcataccttgcatatcattggagaattcatactggagaaaaagcttataaatgtaatgaatgtgggaaggtcttcggtctaaactcatccctagcacatcatcggaaaattcacactggagagaaacctttcaaatgtaatgaatgtggcaaagcttttagtatgcgttcaagcctcactaatcatcatgcgatccacactggagagaaacatttcaaatgtaatgaatgtggcaaactcttccgcgacaattcatatcttgtacgtcatcagagatttcatgccggaaagaaatctaacacatgtaattaatgtggcagagtgttcagttagcattaaagccttgtaagacatacaataatttatactggagaaaaactttgcaagtataatgaatgtagcagagcctttagtttttgttcaaggcttaataaccgttagctagaccatagaggacagaaactttactaatgtactgaatgtggcaaggtcttaaggtaaaatctgagaccaggattcttcaaagaattcttgctggtgagaaacctaacaaatgtaatgaatgtggcaaggtcttctggcacaattctcacattgtacaatattgcaaaaattcatgcttgagagaaacaaaaacactgagagtgggaaaccattatgacttcaaacattcatcaacatcagagaatccatactaaagagcatttataataattatatgtgatagagattttccgcaggccaaagtctcactaggcatcaaaaacttttttgatgaaaccatacaaatgtaacgtgcatgcttaagcttttacccaggcatcaaaaccggaacatcacagggtttatactggagagtaactacacaaagataatgtaataagcctttcagtgtaatattcatgattttgtcgtgagagatccactcaataaaaaccaggcaaatgtagtgaatctggaaaaaaaaaaaaaaaaaaaaaaa

SEQ ID NO: 4655 - DNA, 3643 bp, Homo Sapiens
  NM_018302
acacaaccttggacattagagcctgtccgtctgatctagagaaggaatgttgctggggaaggaaaactcagggcgaggtgagagaggacagaacctctaaccaggaagaggctgtccccgccaagctccggagaggcgcggaagcatgaccctcaggtggtaacagaaaacaatccagatggggtgcaggtgctgtaaaataatacaaagctatctctttgatccagttcaagtgccctctcctggctatgtcaatgaagtcaacagctgcaagctagatgaagacgacactgataaattaaaaggcaaatggagcagtgaagtcttggtgcagaaaaatgaccctcagaggcagggctcaaagaagactgagagcagcagcaggacagctgatccatgggagccctgctggcctcaccaagggccgctcccacagggggacgctggaggggaacaccatgcctgcggtgtcaacggcatcggccctgctgccactccacagcccactgggaattccagccccacccaggatgacaggggctcctgggccagtactgcaaatactgttcccccaactcaacccttcctggaaggagggggcaccaggaaacaggactgtgtgctgctggcctcagaagggacccaagtcatgagaaatggagactccagagctccttctgaggcagaaagttttgccttggaagtacaagaccatgtcttccagataccagccccagattaccttcagcattggggcccagctggagacaacgttgatcataatgaaaaggactgtgttttcaagaaccatactgaggatgaatccctagagggaattcagcccccagtgggggagcatggtttgaatacgcccttctctgtgaggagaagctgggattcattgaatgaggatgtggaaacagaagttctaagcatctgctttaatgagaagggtcctgttcatgccatgcctgtggttgactcaggaaacaggcaggaggatacccatggctccgatggagatggggatggggagattgtggacgaggatgcagcggtggcggaggcccttgcagctttagaagctgctactgcaggagaagatttggatgagactgattaggggaggggatttgcacagggaggtaagctggtgtcatgctgagcatgcagatgcatttgctccctggatgcatagcaggtgattctgccagcatgcaccagtgcagccttaccagttgtttacatccagcatctgttctgattgtcagcatctgtcccatgctgcttgtcacatatctggagtttcactctgtgtagatgagctgtcattcaggacactaggagaaaaatctgagtgggtcattgtgcccatatccacagaaaatgcagaagttgaacagcttgcttgacaaccctcaaacatctttgagcacctggtacagatgtttatgagaatactctaagatctcaacccttgatcccaaaggcacacaatcacagagcattccttttgactgtaaactgtttaccttgcttttgagagccaaacattgtacccaacctggaaaaagtaactaccccaattaaagtgcctcatgtgtccccagagcatggcttaacttcagggacaatcacccagggaactaataactaaccagttgttcaacagcgggttaagctcagcagttttcacagtagagcagaagtccccaggaaacaaagggttagtcattagctgagatgttgattttaaaacaccttgaccttaacttttttacattattacttttaaatctcctttgggattggggaggctggccaaaataagtcttaaaactgcttatgtcatatttggattttaagttcatgacattcggaacagcaaagccatatatgcaatgtttttatgccattaaatgtctgattccaattaaaatataacaacgtatgtgtctttctagaagtcttaactcaaaggtggttctaattttctcagaatatcagtgaccctggatgttactttcaatgtaaagaactaatctagatggccgggcgtggtggctcatgcctgtaatcccagcactttgggaggccgaggcgggtggatcacaaggtcaggagttcaagatcagcctggccaacatagtgaaaccctgtctctactaaaaatacaaaaaattatccgggcacggtggcgggcgcctgtaatcccagctacttgggaggctgaggcaaggagaatcacttgaacctgggaggtggaggttgcagtgagctgagatcgtgccactgcactccagcctgggtgacagtgcaagactccatctcaaaaaaaaaaaaaaaaaaaagagctaagctaggcacagtggctcatgtctgtaatctgagcactttggaaggctgaggtgagaggattgccagggccaggaattcgagaccaacctgggcaatttagcgagaccccatctctatgaaaaaaaaaaaaaaaaaaagagctagactacaaaattatactcaaggaagggaccgagctggtttgcagagccatagctttggctttctctctgtcaaacttgatgccataactaaatgtcctgatcttacctcaaagatgaacaagccctctctggatttcagccttctaattcactgaaacaaggacaaccattctaacgtaactcaatggagaatttaaaggcattaaggatgctcaaaactatctagaaaaaaataaacatggaagatgctttagtttggtgttttgtaacacagaattgaaatctgactgaacttcatttgatttccagctttgccatgtgaccttggacaagttatgtatccctttacccatctgtaaagtgagaagaataattgtatgtgcttgtaaaggttaaatgagatgatgtaagtgtttagcacagtgcttggcacactaggcactcaaaaatgatgttttactagttgaaaacaattcctttaacaaacatttttacatccccacaactgaaaactctaaaactgggaagtatgtataatgtcattatttgactttggcaattatttagtataaaacatgatttctgagccttccagcacctttaaggacggcacccttacaaatgcttaatgagcctatgggtttgtttggtactgtaatgacaagccatcgcaagtgacctctatatacagggtcactcagagcccttaaaaagataaagtcttggcattgttaattgcattagaggtatgtctccttttgtatttagtacaccaaatacttaatatttcagaatgcttattccttcaatgatttcctaagtgtatcagttgagattatgttcagttgtatgggacgagtgttttatacaaatagaggcttatttacctcttatgtaaaagaagtctggagttagtgatccagggtggtagagaatgtatcactggcccgtgtatcaatgacccacatatcaatgacccacgtatcaatgacccgcatatgaatgacccatgctgcttcaatcattttggtttccttctcaagatcactttgtagtccataatggctgctgtggcttcagtcattacatttgcattccatgttggaaaaagaataaaggaataaaaaccccaaaaaaaaaaa

SEQ ID NO: 4656 - DNA, 4458 bp, Homo Sapiens
  NM_018303
gaggtgccggcggctggcggccgcggagtcttcggcgagacctaccgggccctgtctgtgccggccgtgagctgcggcaggacggctggagattacttctctaacaggatcaccagtttgctccacaaagcacaatgtctcgatcacgacaacccccccttgtgaccggcatctctccaaatgaagggataccatggacgaaggtcacaatcaggggagaaaatctggggactggccccaccgacctcataggcttgaccatttgtggacataattgcctcctgacggcagaatggatgtctgcaagtaaaatagtatgtcgagtgggacaagccaaaaatgacaaaggagacattattgtcaccactaagtcaggtggcagaggaacctcaacagtctctttcaagctactcaaacctgagaaaataggcattttggatcagtctgctgtgtgggttgatgaaatgaattattatgatatgcgcactgacaggaacaaaggaattccgcccttgtccttacgtcctgctaacccgcttggcattgagattgaaaaaagtaaattttcgcagaaggacttagaaatgctattccatggaatgagtgctgattttacaagtgagaatttctcagcagcctggtatcttatagagaatcactcaaacaccagttttgagcagctcaaaatggcagtcaccaacctaaagagacaggctaacaagaagagtgagggcagcctggcctatgtgaaaggcggtctcagtacattcttcgaagcacaggatgccctctcagccatccatcaaaaactagaagcagatggaacggaaaaagtagaaggatccatgacgcagaaactggagaatgttctgaacagagcaagtaatactgcagacacattgtttcaagaagtattaggtcggaaagacaaggcagattccactagaaatgcactcaatgtgcttcagcgatttaagtttcttttcaaccttcctctaaatattgaaaggaatattcaaaagggtgattatgatgtggttattaatgattatgaaaaggccaagtcactttttgggaaaacggaggtgcaagttttcaagaaatattatgctgaagtagaaacaaggattgaagctttaagagaattacttctggataaattgcttgagacaccatcaactttacatgaccaaaaacgttacataaggtacctgtctgaccttcatgcgtctggtgaccctgcttggcaatgcattggagcccaacacaagtggatccttcagctcatgcacagttgcaaagagggctacgtgaaagatctgaaaggtaacccaggcctgcacagtcccatgttggatcttgataatgatacacgtccctcagtgttgggccatctcagtcagacagcgtccctgaagaggggcagcagctttcagtctggtcgagacgacacgtggagatacaaaactccccacagggtggcctttgttgaaaaattgacaaaactcgtcttgagccagctgcctaacttctggaaactctggatctcctacgttaatggaagcctcttcagtgagactgctgagaagtcaggccagattgaaagatcaaagaatgtaaggcaaagacaaaatgattttaagaaaatgattcaggaagtaatgcactccctggtgaagcttacccgcggagccctgcttcccctcagcatccgggatggggaagccaagcagtacggaggctgggaggtgaagtgcgagctctccggacagtggctcgctcacgccatccagactgtaagacttactcatgaatcgttgactgcccttgaaattcctaatgacctgttacagactatccaggatctcatcttggatctccgagtacgttgcgtaatggccacgttgcagcacacggcggaagaaataaagagattagctgaaaaagaagactggattgttgacaatgaaggactgacttctctaccatgtcagtttgaacagtgcatcgtgtgttctctgcagtcactgaagggggttctggagtgcaagccgggagaggccagtgtcttccaacaacctaaaacacaggaggaggtttgccagctaagcatcaatataatgcaggtttttatatactgtctggaacagttgagcaccaagcctgatgcagatatagatactacacatctctctgttgatgtttcttcccctgacttgtttggaagtatccatgaagacttcagcttgacctcagaacagcgccttttgatagtcctaagtaattgctgctatctagaacgtcacaccttcctaaatatcgcagaacattttgaaaagcacaacttccagggaatagaaaaaatcacacaggttagcatggcctcattgaaagaactagatcaaagactctttgaaaattacatcgagttgaaagcagatcccatcgttggctccttagaacctggaatttatgcaggatattttgattggaaggactgcctgcctccaacaggtgtcagaaactatttaaaagaagcactggtgaatataattgccgtgcatgcagaggtgttcaccatttccaaagaactggtccctcgggtactatccaaggtgatagaagcagtttctgaagagctcagtcgactgatgcagtgtgtttcatccttcagcaaaaatggagctttacaggcgagacttgaaatctgtgctttgagggacactgtggctgtttacctgacacccgaaagcaagtcaagttttaagcaggctttggaagccctgccccagctttccagtggagcagataaaaagttactggaagagctcctgaacaagttcaagagtagcatgcacttgcagctcacctgtttccaagcagcttcttcaaccatgatgaaaacataaatatctgccacataaaagaagtccaggaaaataacacgtaataagactgttcactctctaagtaccctaaaggtatttggtgtattaaacattgggtttgccatttttctcttttttcttcctctgacttcgaaaattgttggtatacatttcaaccaaaatgacctcatttgaaatgcccaggaagtatttgttttgccattcttactagatcagatcctgtatgactttaaaatacattttaaaatatattttgcatctcagcagaaggttgagtgctgcaggaagagctgcttctgcagggagttttctggaatggcgtggcacatattgaagcatttctcagtgtcccgttcacggaagcgcaggcagctcccacgacacacggagagactgactgatacgagatttggaaagctatgtagacatctttggagctcttactgtcctaaactgtacagctgtgcttaaaaccctcatttcatataaatggccttaagttttctaattcaagcgggtttttggaaaaatttatggtctccattaaaatacatattacaactggggtagattatttgtggtccaggtgtctgtgatttaactttgcgttttgctatctgatttttatttttcacagggctaagcatgagctttcattctcactcactcttaatttgtcgtgcgtcactacacatgcacgtgttgcagtccctgaggccctgtgtgttatctgtgatggagtgtgaatgtgtaacgggcactgtgttacactctgaggtgttggcggggcggtcgcagacttcagggtcccctaacggaaaggccaggctccgcgtggacggccaactccctgcccgctccttcagcaggtgactgtctctgccacttcttacctgctgaaggatcttgctcagtagctggaacaatgctgctgtcacacagtctcttctctgaaacttcaggatgctccttggtcaccaggcaatgggagctgtagaccagccgcatgcacttgccccacattcactgctgactggcttcactggaataggttcaggtcaccgggacttctctcagagtcagcggcccacccaactccctcataccgtcgcatctgaaaattttcagagaggaattctctttgtagtcggcttgtcagggttttcaagtttttctatggttatttttaaatctctttttttaaatgctaaaattaatgtcctcattaatgcaagtaattttagagcacagtgtagccatgtacagtttccattatttaaaataaataaatgtgttggttcatttggtgtatggggggacatcatggtaactggaaatgaaagtttaatctttcacaaatgtgcttgataaagctgttaagaattgtctttcctaagtatgttaactgttgtatctaactcaactgtgagctaagtttaaaaactgcaatcatgaatgtttgtgatattttaaatatctactacagcacattcagccaataaagaatctgcctttaatgtaagttgtaatttaaaaaaaaaaaaaaaaa

SEQ ID NO: 4657 - DNA, 3867 bp, Homo Sapiens
  NM_018309
tttcggcctcgggacgccgtgacgttgcgttcctccagtcccttgccacctccctctttcttcccctctggggaagctcagtgctggacttccgaagaccttttacgacattgagtctcggagttggtctcagcgccggatccacttttcggcaaagtgacgtggacgtcaacagcaatggcggaaggagaagatgtgccgccgctgccaacgtcgagcggcgacggctgggaaaaagatcttgaagaagctctggaagcaggaggttgtgatcttgaaacgttgagaaatataattcaaggaagaccgctgcctgctgatctgagggccaaagtttggaagattgctctgaatgttgcaggaaaaggtgatagtttggcatcatgggatggtattttagacttgccagaacagaacactattcacaaagattgcctgcagtttattgaccagctttcagtgccagaggagaaggcagcagaattacttttggatattgaatctgtaattaccttttattgtaaatcacgtaacattaaatatagcacatcccttagctggatacatctactgaaaccattggtgcatcttcaactgccacgcagcgatttatacaactgcttttatgccataatgaataagtacattcccagggattgttcccagaaagggagaccatttcatctcttcaggttgctcatccaataccatgagcctgagctttgttcttatcttgatacaaagaaaattactccagactcctatgcactcaactggcttggaagtctttttgcatgttactgttccactgaagtcactcaggcaatatgggatggatatctacaacaagcagatccattttttatttatttcttaatgttaattatccttgttaatgcaaaagaagttattttaacacaagagtcagacagcaaagaagaagttatcaagttcttggaaaatactccatccagtctgaatatagaagatatagaagaccttttctctctggctcagtattattgcagcaaaacaccggcttcttttaggaaggataatcaccatctctttggtagtactttgttgggaattaaggatgatgatgcagatctgagtcaggctctttgtctggccatctccgtgtcagagatccttcaagcgaatcagctacaaggggaaggagtccggttctttgtggtggattgccgtcctgcagaacaatataatgctgggcatttatcaactgctttccacttagattcagacctgatgcttcagaatccatctgagtttgcacagtcagtaaaatccttgctggaagcacagaagcagtccattgagtctggctccatagctggtggggagcacctctgttttatgggcagtggcagggaggaagaagacatgtatatgaacatggtcctggcacactttttacagaaaaacaaagaatatgtgagtattgccagtggaggatttatggcactgcagcagcacctggcagacattaatgtggatggaccagaaaatggatatggccattggattgctagtacctcaggctcaaggagcagtatcaattctgttgatggtgaatctcctaatggctcaagtgatagaggaatgaaatcactagtaaataaaatgactgtggctttgaagacaaaatccgttaatgtcagggaaaaagttatcagttttatagagaatacatcaactcctgtggatcggcatgtgagcagcagtgacagagtgggcaagccttaccgtggcgtaaagcctgttttcagcattggggatgaagaagaatacgacacagatgaaattgacagttcttcaatgtcagatgatgatagaaaagaggttgtaaacattcagacttggataaacaaaccagatgtcaaacatcattttccttgtaaagaagtaaaagaaagtggacacatgtttcccagtcatctgttggttactgcaacacatatgtactgtttaagggagattgtttcacggaaaggattggcttatatacagtctcgacaagcgctgaattctgtagttaaaattacatccaaaaaaaaacatcctgaactcattaccttcaagtatggaaatagcagtgcttcaggaatagaaatcttggcaatcgaaaggtatttgattccaaatgcaggggatgcaactaaagccataaaacagcagatcatgaaagttttggatgctttggaaagttaatataaaagaaaattatataaaaagaaattaagacaaccaagagaaacatggacatatacctcctgactgaatactaactggagacctttcatttgctcatggggctgcttaaatagcaggtctaagaaagtgtaaattattataatcaatctgtggacagtaaactttttaaaaatttttcttctgcattttggttttataaaatgatgtattataaaggtcagttattaaattactttgaagtaactgaccctgtgcccttatggactaagtaagggtacagaatgcagttctgttttgaagagctgttttaagggaacatgcatcactttcgggatcaaaaacaactgtacacatacatatctgcagtgtcttcactgaaaattagagatagaattagttgaagagacttccttaattgctacattgttttactcactgagcaatatcagaaactaaaacatagattaataattcactcactgtttctattcttcttaaaaagagtgaaatctttttaatggaatggttgaagattcctgccaactcaaaatacagtacagctagtaaaatgttgaaacatcagtttctaaatcacctttgctccattagctaattttttggacactaaatgcttcaaagataagaaacttcatcctaatgatttctaaagagcagttaaaagcattaaaataagtaggtaggctgttaagattaaaattaacattttggggacagaattgtgtctgtaaaaatgtcattggttttattacaagcggattattttattcatattttaaaacaaatgtttaagccacattgatttatcctcattgaggattatggtctgtgaccacagtaatatccacttatataaatgccaaataatcagagagcttataaagtacaattgtttttgtcatcattttctgaatttctttctcttcttttggttttgtcctctcattgaagttccagtggtttgaaattagttttggacacattgtcttaatgtactgaaaattgctctgctgtattttgcagcgttcttcatttaatttataatggtccatattagacacatttggtaagagaagtccaggaacacatttagggccatggaatagtattttgtaaaatccatttgggaagttgcaatacccacaatctgacatgtcctaaaatgtaagggattatctctaaggggttgatgggagaaatatttagatgtaccctgttaacagccagtcattttgatttacttatggaaatcaagtgaataaaaggcaacataatttgggaaattttattctaatatctaataaaaacagtttgagtggttgaagacatctgcatgaaattgcacctaggtgcattacttgatataactctcccctaaaactgttgtaattgcattttttcccttttcttggcacccctttagaaatgtactgaagtctcatttttcacccatttcagccatgggacatttttcataatattaatgtaaagatgtttgtgttactgtttataaattacaattgtaaataaattactagtttgcccaaaactttgttcttaaaaaaaaaaaaaaaaaaaaaaaaaaaaaaaaaaaaaaagaaaaaaaaaaaaaaa

SEQ ID NO: 4658 - DNA, 2007 bp, Homo Sapiens
  NM_018310
ccgtcgcgctggccggaagacgggggtgcaaccctttgaagtgtcccctcctacttcttgctgcctcacggttgctgttgcagacccaggagtctctgaaggcttccgcggctttggggccggttgtgagatgccaggcagaggccgctgcccggactgcggctccacggagctggtggaagactcgcactattcgcagagccagctggtgtgctccgactgcggctgcgtggtcaccgagggggtccttaccactaccttcagcgacgagggcaatctccgagaggtaacatattcccgaagcacaggggaaaacgaacaagttagtcgcagccagcaacgaggtctccggcgagtgagagacctttgtcgagttctgcagttgccaccaacatttgaggataccgcggttgcctactaccaacaggcatatcggcactctggcatccgagcggccaggctgcaaaagaaggaggtgttggttgggtgctgcgtcttaatcacctgccgacagcataactggcccctaacaatgggggccatctgcacgctgttgtatgcagatttggatgtgttttctagcacttacatgcagatagtgaagctcctgggactggatgtgccatctctgtgcttggcagaactggtgaagacctattgcagcagcttcaaactgttccaagcttcaccttctgtgccagccaaatacgtggaagacaaagagaagatgctgtctcgaacaatgcagttggtggagctggcaaatgagacgtggctggtgaccgggaggcatcccttgcccgtcatcactgctgcgactttcctggcttggcagtcgctgcagcctgcagatcggctttcatgttcccttgcccgattttgtaaattggcaaatgtggacctgccctacccggcgtcctcccgcctgcaggagctgctggctgtgctgctgcggatggctgagcagctggcctggttacgagttctgagacttgacaaacggtctgtggtgaagcacatcggtgaccttctccagcaccgccagtcactggtccgctctgcctttcgggatgggacagcagaagtggagacccgagagaaggagccaccggggtggggacaggggcaaggagaaggggaggtgggaaataattccttaggtttaccccaggggaagcggccggccagtcctgcccttctcttgccaccctgcatgttgaagtccccgaagcggatctgccctgtaccccctgtctccactgtcactggagatgagaacatttctgatagtgaaatagaacagtatttgcgtacccctcaggaagttagggactttcagagagcccaggctgctagacaggctgccacgagtgtccctaaccctccctgatggatatccactgggagcacttcatcctgttctgacagcttgataacattcctgttataaccaaggatggaagtgtacaccagtccgtaggtattgcttttcttgtttgaaggaaccaagaggggctctgccattagttggaccctgggtcctggagtaaagtcaggagtgcagggatgactataggtaggagagattcccatcccttggtgtgggagagcaagttgcctatgtccatgttctgtgagatggctttcctcatagatggatgggaaaatgtcaggctctttgctgctggtttgaattggacacactgctgcggctcctcctgcaggcctgagggggcttccctctgcttgtggagtggttggcattcccagcagtatcaaccctcagaggagcgggaactggggaattctggccctacgtgcattcacaggcaatgatgggtttgtgtgtatggtgtcatgagatcctctacctcataacaaaaggacagtgggtagactaaggcagtagctcaaagggctttgcaaaattttaatatattaaaacaagaggcatctgctagaaaacattctattgtataaaacccgagttcttaaaaacaaaaaaaa

SEQ ID NO: 4659 - DNA, 3122 bp, Homo Sapiens
  NM_018316
actcgaacgcgcgacggcggggggaagatggcggagtccggcggtagcagcggtggtgctggtggcggcggcgctttcggcgcgggcccgggccccgagcgcccgaacagcacggccgacaagaacggggccctcaagtgcaccttctcggcacccagccacagcaccagcctcctgcagggcctggccaccctccgcgctcagggccagctcctcgatgttgtgctgactattaacagagaggcctttcctgcacacaaggtcgtcctggctgcctgcagcgactacttcagggccatgttcaccggcggcatgcgggaggcaagccaggacgtcatcgagctgaagggcgtgtcggcccgtggcctgcggcacatcatcgacttcgcctacagcgccgaggtgacactggacctggactgcgtgcaggacgtgctgggcgcggccgtgttcttgcagatgctgcccgtggtggagctgtgcgaggagttcctgaaggcggccatgagcgtggagacctgcctcaacatcggccagatggccaccaccttcagcctggcctcgctgcgagagtcggtggatgccttcaccttccggcacttcctgcagatcgccgaggaggaggatttcctgcgcctgccactggagcgcctggtcttcttcctgcagagcaaccggctgcagagctgtgccgagatcgacctgttccgcgcggccgtccgctggctgcagcatgacccggcccggcggccgcgcgccagccacgtgctctgccacattcgcttcccgctcatgcagtcgtccgagctggtggacagcgtgcagacgctggacatcatggtggaggacgtgctgtgccgccagtatctgctggaggccttcaactaccaggtgctgcccttccggcagcacgagatgcagtctccgcgcaccgccgtgcgctcggatgtgccctcgctcgtcaccttcggcggcacgccctacaccgacagcgaccgctcggtcagcagcaaggtctaccagctgcctgagccgggagcccgccacttccgcgagctcacggagatggaggtaggctgcagccacacgtgcgtggccgtgctggacaattttgtgtacgtggccggggggcagcacctgcagtaccgcagcggcgagggcgcagtggacgcctgctaccgctacgacccccacctgaatcgctggctgcgcctgcaggccatgcaggaaagccgcatccagttccagctgaacgtgctgtgcggcatggtgtacgccacgggcggccgcaaccgagccggcagcctggcctccgtggagcggtactgcccccggcgcaatgagtggggctacgcctgctcgctgaagcgccgtacctggggccatgctggggccgcctcagggggccgcctctacatctcgggtggctacgggatctcagtggaggacaagaaggccctgcactgctacgaccccgtggccgaccagtgggagttcaaggcgcccatgagcgaaccccgcgtgctacacgccatggtgggtgccggcggccgcatctatgccctcgggggccgcatggaccacgtggaccgctgcttcgacgtgctggctgtggagtactatgtgccggagacggaccagtggaccagcgtgagccccatgcgggccggccagtcagaggccggctgctgcctgctggagaggaagatctacatcgtcgggggctacaactggcgtctcaacaacgtcacgggcatcgtacaggtgtacaacacggacaccgacgagtgggagcgggacctgcacttcccggagtccttcgcaggcatagcctgcgcccccgtcctgctgccccgggccgggaccaggaggtagcccccaagacccccgggaccctggcctgaccgcatgttgtctccaagtggggcttggcgaatgcacgtctgcctgagaaccccagtgccccccttcgcccgggctgcccttgaggggcctgctgcgttgataagcccccctcccaggggtccctccctccctccttcccaaagcagatcctggctgcgagtccatccgagggagcctgccggcaaagcgtctgacatgtggtggcagcaaattcgtccccggggtggtttcctcgcctggcccccgagtccccacgggctggcgggtggaatcccaggtctccagggggtccctgtgcagctccatctcacttctctactgcctcccagccccacggtttcaggcattcagatgtgagctcatcaacattgaacccaaagtcggtggtatatgactcaccctccttccaagtctcctgcgcgcgtgtttttaaaataaactcacccgaaacgtccgtaacacacggacctccaggagcagtgagaggtggcttagaagcccctggtttggggtgggtggaggaggagggcacgtgtctgcctcccctggggtgccctccttcccccatcccaagctgctgaggggaggccctggtcatgcctcagttcctgccttcatctgctttccggaggaaaaaccatatcaactcctagaaacgctccttaggggcttgggaccttccatttggcactgagcatcttgtggggccttaactggctgagacatcccggccctctacatttgccctgttggccaggcagtccccttcccgcaattggagggcgacgctaacttcagaatcccatagtggcgcttgccgcaggtctggtggggtgtcttttttctcctccctcctttccacccctccgcgccctgccactccctggcctgccctgtttttgggtcaacattgctacggagccagcagtgaggcctttcccttcaagggctctgtggtatctctggccacatttgttctaatgtctgaacctctaaatcttttctttttgattggttttactgtttttaagaagccagcactgctgtctcatagatgggatttgtactcttggggcaacttaaagtgtctctctcgctgctaacagacgattgatgtcttgtctctgtgacccactcaccatgtaaagaattaacctcctatcttagcagacatcgtctcctaatatttccctttatttaataaaaatgttatggtg

SEQ ID NO: 4660 - DNA, 2204 bp, Homo Sapiens
  NM_018317
atagacaaggcaggaacaacggtgtgaaaagcgtcctccccgccccggtctttttccgccggcggaacgcagatgctgtggccttcaggcgctgaggggaccagagagggacggacacaaggctcggcagttgcctggtaacgcccgctggaggagtcccagtgtaataaggtcccggagaagtgtcactggccctgagtgggacccggtagcccgttcgctccgcgccggcggcctgtccccgcggcttggcgggctagggcaggggaaatgttgcaggaggagtcggacctctctctcattattgcccagatagtccaaaagctcaagggctccaatttgtactctcagctggaacggcaggcctgggccagtcttcagagacctgagattaaacttgaatcactgaaagaagatattaaggaattctttaaaatatcaggttgggagaagaaacttcagaatgctgtttatagtgaactgagtgtgtttcctttacctagtcatcctgctgcacctcctgaacatcttaaagaacctttggtatacatgaggaaagcacagggaagttgggaaaaaagaattttgaagagtttaaatagtatgtgcactgaactgagtatcccactggcacgaaagaggccagttggagaacagaaagaacttcttaataaatggaatgaaatgggaactgatgaaccagatttaagccttttcagacctgtttatgcacctaaggattttcttgaggtattaattaatcttcgcaacccaaattatgaaaacggtgattctcttagtttcaggactcatttgggtttaattcaagttccactgaaagtaaaagacatccctgaattgaaagaatgctttgtggaacttggcttaaatataggacaactgggtatagatgattctacacaagtgcctcctgaactttttgaaaatgagcatgtacgtattgggcaaaaagttctagcagaacaagatagtgctgctgctcaacagtacatcagacaaggaagtcccacggcactgagagctgaattgtgggctctcattttgaatatttccagccaacctgaggatgtcttgtattatgagcagcttaagaccaatgtgatacaacatgaccttttggtggacagtctaatctataaagatgtgaagttgacagcaagcaatgatgattattattttgtatttgaagattatttatatcaggtattactttgtttttcccgggatacatctgtgttgagtcactttgcattcaacagtgcctcgccaccaaaatcatacataagaggaaaactaggactggaagaatatgctgtcttttacccaccaaatggtgttatcccttttcatggattttcaatgtatgttgcaccactttgttttctataccatgaaccttccaaattgtatcagatattccgtgagatgtatgtgcgttttttcttcagactccattccatctcttctcatccttctggtattgtgtcactctgtctgctgtttgaaactcttcttcaaacttatcttccccaactcttttatcatctacgagaaattggggctcaaccacttcgcatatcatttaagtggatggttcgagctttctctggatacttagctacagatcagctcttgcttttatgggatagaatcctaggatacaactctctggaaattcttgctgtgctggcagctgccgtgtttgctttccgagcagtgaacctgatggaggtgacatcactggctgcagctgaagcagttcttgctgacctttctactttaaaagttatgcctcttcttcagatttttctgtttgctactgtcacctgatcttcttcacagtcactggcaacacatctagtttttcattagaaacaaatcatgaactatgcaaactctgcataaaaccaaaatgaaactttgcatataagccaataaagatcatgttccctcttcagttaaacctaagtagtttctcactttttgaaacaataactctgcaccaaatattgcatcgcatgctgctgattttcaagagagaagcaataaacacaacttctgctaaattgagcattatatatataatattataatatatatataatcctgacttgtcaatggcatgtaataatatatgcaataagaactaaagatactgtaataaacttcaagaggtaaaaaaa

SEQ ID NO: 4661 - DNA, 3763 bp, Homo Sapiens
  NM_018319
actgcgcgcatgcgcggcggccgccgaaggggcgggatccgaggcaagcgttggttctgtgcgcctcagagttggagcacacagctgtattaaaaaggcaaatcgaaggccgggcgcggtgactcacgcctgtcatcctagcactttgggaggccgaggcggctgaatcacttgaggttaggagtttgagatcagcccgggcaacatggtgaaaccccgtctctacaaaaatagaaaaattagccgagcgtgatggtggatgcctgtaatcctagctcctcgggaggctaaggagtataatgtctcaggaaggcgattatgggaggtggaccatatctagtagtgatgaaagtgaggaagaaaagccaaaaccagacaagccatctacctcttctcttctctgtgccaggcaaggagcagcaaatgagcccaggtacacctgttccgaggcccagaaagctgcacacaagaggaaaatatcacctgtgaaattcagcaatacagattcagttttacctcccaaaaggcagaaaagcggttcccaggaggacctcggctggtgtctgtccagcagtgatgatgagctgcaaccagaaatgccgcagaagcaggctgagaaagtggtgatcaaaaaggagaaagacatctctgctcccaatgacggcactgcccaaagaactgaaaatcatggcgctcccgcctgccacaggctcaaagaggaggaagacgagtatgagacatcaggggagggccaggacatttgggacatgctggataaagggaaccccttccagttttacctcactagagtctctggagttaagccaaagtataactctggagccctccacatcaaggatattttatctcctttatttgggacgcttgtttcttcagctcagtttaactactgctttgacgtggactggctcgtaaaacagtatccaccagagttcaggaagaagccaatcctgcttgtgcatggtgataagcgagaggctaaggctcacctccatgcccaggccaagccttacgagaacatctctctctgccaggcaaagttggatattgcgtttggaacacaccacacgaaaatgatgctgctgctctatgaagaaggcctccgggttgtcatacacacctccaacctcatccatgctgactggcaccagaaaactcaaggaatatggttgagccccttatacccacgaattgctgatggaacccacaaatctggagagtcgccaacacattttaaagctgatctcatcagttacttgatggcttataatgccccttctctcaaggagtggatagatgtcattcacaagcacgatctctctgaaacaaatgtttatcttattggttcaaccccaggacgctttcaaggaagtcaaaaagataattggggacattttagacttaagaagcttctgaaagaccatgcctcatccatgcctaacgcagagtcctggcctgtcgtaggtcagttttcaagcgttggctccttgggagccgatgaatcaaagtggttatgttctgagtttaaagagagcatgctgacactggggaaggaaagcaagactccaggaaaaagctctgttcctctttacttgatctatccttctgtggaaaatgtgcggaccagtttagaaggatatcctgctgggggctctcttccctatagcatccagacagctgaaaaacagaattggctgcattcctattttcacaaatggtcagctgagacttctggccgcagcaatgccatgccacatattaagacatatatgaggccttctccagacttcagtaaaattgcttggttccttgtcacaagcgcaaatctgtccaaggctgcctggggagcattggagaagaatggcacccagctgatgatccgctcctacgagctcggggtccttttcctcccttcagcatttggtctagacagtttcaaagtgaaacagaagttcttcgctggcagccaggagccaatggccacctttcctgtgccatatgatttgcctccagaactgtatggaagtaaagatcggccatggatatggaacattccttatgtcaaagcaccggatacgcatgggaacatgtgggtgccctcctgagaatcttgaggcactgtgaaatttaagtgtaagacattgagccacaaacatggaatctcttctttgtactggatgtccacttcccttaaagtcttatttgcacccttacaaaatctttccaaaggtcactcttatgaatggatgttggttatacttttaatggacattaacattcctaataaagtattagtttcttaattcacttttatatgttttggaaagaaaattagtgaacttctctatgttaaaaatacgtactgcttgagtatcccctgtctgaaatgcttgggaccagaagtgtttcagcttttggatttttttgaattttggaatatttgcatagcataatgagatatcttgggaatgggacccaaatctaaacacaaaattcatttatgtttcatatacaccttatatacaataacctaaaggtgattttatatgatattttgagtaattttatgcatgaaacaaagttttgacaggcttttgaccgtgattcatcacatgagttcaggcatggaaattttcatttggagcatcatgtcagcactcaaaaagttctggatcttggagcagttcagattttcagattagggatgctcaaatctatatagatataaaattatcctcacagtaacatagaatctcttggtgctgtcagctgttgggaattgaagattgactttgtgcttccaccctccatccagaaaggcacccttcattccaccagaactttacccaggaagaacacgatcatttcctttttcaccgatgccctctctcagctttctgagtacgtctcttggggtcgctggaggtgatcctaggatctgtctctgagaccaatgtgctgtttcagccccctgcagctaagaattgtattgactgtcctcacagcggcttttcatagctttcagcttcagctttacgaggcttctcctctctccctggcaccctgctggctgcctcactgcttacagacaggtcccaccaaacccaaacacctgcctagggtaaatgggtctctcttctatccccagaaactttcagaggaagcagctcatagaaacatacaaaagcacacaagtattttgggaaaaaatcctaaaaggtgacttaatttgatgccttaaattcacaagtgaggaagctaaggcctagaaggttaaggatgtccccagggtcacacagtgagcggggctcagagcttgagtgtctttgtgctttgtgtacattgtgttctccctagggtgctttagaccctgtttgttttcttctgcatgaggctgatttccagtttgtcatcaacctctttatcttataatttaggatagagttgaacgttagtcttgaaagattttctaaagtagtctttcaaactgttcctcagaggcctaggattttccaaaagtaccttaggaaccttgtaggctgcagtgggggtgtggcgatagagcaggaggcagggagacagggctgcagggcctcccaccttccaacagacaggctctgctgtatctgttgtacatactgggattctgtaaaggacattatctggggtgttgtatgtatttttgtgtgttctgctttttttaaataaacttgaaaagctactgaaaaaaaaaaaaaaaaaa

SEQ ID NO: 4662 - DNA, 2623 bp, Homo Sapiens
  NM_018320
agactgagggagcgtcgcgaaagttgcccgttttggaacgctcccatttggctctccaaagggaagaattggttaaatagttgcactgaaaataatgcgattcaaatttctcattttccaagaacgctcccttgctgaagcttgcaagggcacggtactcccctctccttgaccctgaaacgtgcagcaagtagataacctcctgatccctgacagtctccgcctgtgttgatgccccgccccctctgctggagtccgagccgccgattggctaggagcacttgagcagcggaagcagctggctcgcgcggggactgcggtgagggggcgagccgtgaagatggcggcagtggtggaggtggaggttggaggtggtgctgctggggaacgggagctggatgaggttgatatgtcagatctctctccagaagagcaatggagggtcgagcacgcacgcatgcatgccaagcaccgtggccatgaagctatgcatgctgaaatggtcctcatcctcatcgcaaccttggtggtggcccagctgctcctggtgcagtggaagcagaggcacccacgctcctacaatatggtgaccctctttcagatgtgggttgttcccctctatttcacagtgaagctgcactggtggaggttcctagtgatctggatcttgttctctgctgtcacagcctttgttaccttccgagccacccgaaaacctctagtacagacaaccccaaggttggtttataagtggttcctgctaatctataaaatcagctatgccactggcattgttggctacatggctgtcatgtttaccctctttggtcttaacttattattcaagatcaaaccagaagatgccatggactttggcatctcccttctcttctatggcctctactatggagttctggaacgggactttgcagaaatgtgtgcagactacatggcatctaccatagggttctacagcgagtcgggcatgcctaccaaacatctttcagacagtgtgtgtgctgtgtgtgggcagcagatctttgtggacgtcagtgaagaggggatcattgagaacacgtataggctgtcctgcaatcatgtcttccacgagttctgcatccgtggctggtgcatcgtgggaaagaagcaaacgtgtccctactgcaaagagaaggtagacctcaagaggatgttcagcaatccctgggagaggcctcacgtcatgtatgggcaactgctggactggcttcgatacttggtagcctggcagcctgtcatcattggtgtagtccaaggcatcaactacatcctgggcctggaatagtgatgaagagcatcagtggaaaacccaccccacacgccatggacctcagggcactctcctccctgcccacaaagacctcctgggtgggaaagactcaaaggggtgcttgggccactcaggacccctctggctgtgtcggactggggagggatatgatggagagccagccagtggggctgtcagcagtggggggctttttaaaagaaaactattttgatgaatatatttaaaaaacctttttttattgtggagcataggaattgcccccctccaggcttcaccctccctgcctaagcagggtgggggcagagccatgacatttttggtttaaaggagccttctcatctctggccgagaacactgctgggctcccaggtagctgaaggcctcagcccacccactcccttcttccctgtgtggggctcaagcctggtgcacttagtatagaagagctaacgtactcaggcttgtgccacgggtgagcactgaggccccaggtgtcctccctcccccactgtctgggacacaggacaggtgttgcgtctgactctgtctccccctgtccaagagctataggctggttgaggcaagtggaaccttatcagtgacttggccaacaagggaagccttggggcctcagaattcattgaagatttgttttgggacaactggaagaatcagcaccatggatactcgcccgtgggcagggctgtggtcagccaagaatagaggtcatatagttgggccatggggcaattgttggcagccatgactgacggccccttgtgcaagctcattcttcagtggatccttcagtggagtggtgacacgtgccagcggtcactctgccacatcacttccttcttgaaagcctaagagtgcgtatgcgtgtgtgtgtgtgtgtgtgtgtgtacgtgaggcagaagaatatgacagatgtcagcttctccctgtgtcagatgatatgtccttgaagctggcaggggattcccagtccagggaatatccctacatgatttttgtcattcatgggtcctccctgggcctgacaacgggagtggtgggtgggtgagaacaggttctgagagggggcttctaggaaggccccagccctagtcctaggcgacttgaataaagtgggaggtcaaacatgggccttcggcattgggtttctagggaatatggctcagtagggcctgccccttcaagggcagcaagaacgaagcaggatgttgtcactcccgtctgaataaagctccatgagctgggttggaaagctgaaaaaaaaaaaaaaaaaaa

SEQ ID NO: 4663 - DNA, 1303 bp, Homo Sapiens
  NM_018321
caagagcgcgggcggcgaggcaagatggcggcaaccaagaggaaacggcgtggaggctttgcagttcaggcgaagaagccaaaaagaaacgaaatagatgcggagccgccagctaagcggcacgccacagcagaggaggtggaggaagaagagagggaccggatcccaggccccgtttgcaagggaaagtggaaaaataaggaacggattctcatcttttcttccagaggaataaattttagaacaagacatttaatgcaggacttgagaatgttgatgcctcattctaaagcagatactaaaatggatcgtaaggataagctatttgtgattaacgaggtttgtgaaatgaagaactgtaataaatgcatctattttgaagctaagaaaaaacaggatctctatatgtggctttcaaattcacctcacggaccatctgctaaattccttgttcaaaatattcataccctcgctgaactgaagatgactggaaactgtttgaaaggttctcggccccttttgtcttttgaccctgcttttgatgaattaccacattatgctttgttaaaagaactcttaattcagatctttagtacaccacggtatcatcccaaaagccaaccatttgtggaccacgtgtttactttcaccattttggataataggatatggtttcggaactttcagatcatagaagaagatgctgctcttgtagaaataggacctcgttttgtcttaaatctcataaagattttccagggaagttttggaggaccaactttatatgaaaatcctcactaccagtcaccaaacatgcatcggcgtgtcataagatccatcacagctgcaaaatacagagagaaacagcaagtgaaagatgtgcaaaaactgagaaagaaagagccgaagactcttcttccacatgatcccactgcagatgtttttgtaacaccagctgaggagaaaccaatagaaatacagtgggtaaaaccagagccaaaagttgatttgaaagcaagaaagaaacggatttacaaaaggcaaagaaaaatgaaacagaggatggacagtgggaaaacaaaataagtcaatggaaacctgatttgtttttcagttactttatatttattttgtattcaatgtgtaaatacttttattatctaatactatcttacgtctaattagtgtagcatttacaagaaagaaaaattaagatcttaaaatcagtgattatctttttctaaataaaatatcaccagaattcatcagttaaaaaaaaaaaaaaaaaaaaaaaaaaaaaaaa

SEQ ID NO: 4664 - DNA, 1920 bp, Homo Sapiens
  NM_018322
atggaacagcggttagctgagtttcgggcggcgcggaaacgggcgggtctggcggcccaaccccctgctgccagtcagggcgcacaaaccccaggagagaaggcggaagcagcagcgactctaaaggcagccccaggctggctaaagcggttcctggtatggaaacctaggcccgcgagtgcccgggcccagcccggcctagttcaggaagcggctcagccccagggcagcacatcagagacaccatggaacacagccattcctctgccgtcgtgctgggaccagtctttcctgaccaatatcaccttcttgaaggttcttctctggttggtcctgctgggactgtttgtggaactggaatttggcctggcatattttgtcctgtccttgttctattggatgtacgtcgggacacgaggccctgaagagaagaaagagggagagaagagcgcctactctgtgttcaatccaggctgtgaagccatccagggcaccctgactgcagagcagttggagcgcgagttacagttgagacccctggcagggagataggacccagctgtgctgtcatgcagctaacctctgatgtggtcttcctcaccattggctatggatttgatttcaggtgtataggactaagggcagcttgcgggttagctctgtgactgcatagtttttctaccttctttccctgatcttttgctgccgtttgatctttgatagttttggtgaaactctctaaaatacattcactgtgggtccgacgcaatttataaaaattatgtactcaagaagggagacctgtttgtttcatttctcatctgtttgggagatgattttagagcactagaaaggcactggggagattctcagcttaaaacatccagcagtttgaagtatgattaggtacatcagggctgcattgtcaatgttctctttaagtcttttaacatttatagcaattttttttttcccggagagtttaggttgcaagttttgggtttcttgtttgtttttgttttgcttcctgctttaattctttaattttcagtcattactggtattgaaaaataaaatatctttaaaacatctcctcttcagaaataggtccctcttcattgcccatcaccatcttccactctcctattattttgccactactcagtaaaggaaggtaggaagagacaaacgcctaagtgcaggtgtggggagggatttcacaagtggttattaacggccagttcagcaagaagtgttgagtgtgtacaaaggggagggctggaagtgttaactccagacccgttggctgcttgagttgtttcttatattctaaagcagcagtccctaacctttttggcaccagggaccagttttgtggaacacagtttttccatggacggggtggtggtggaggatgaaacttccacctcagatcatcaggcattagagtctcataaggagcacgcaacctagatccctcgcatgcgcagttcacaatacggttctaagggctttagagtaagcagccttttcacctgtgggcctctggtgagaaattctgtaaattgtgataatcaggctggattttaatgctgcttttccagtacaatgttagagtttgggttcattaaaattaggcaaactcccattgggttagggcttctctcattccattttgtggctaaccttactgtgtttcagcccttgctgaaaattcttctgatacgtgttgcccttcctcacagccctttggccattgggagtttggctgtccctcagagccatccggtcaagcagatggtctgttctatctcacagaaaagtcttttcttccatgagttctgtctgaactgaacatgtaaaaagtatgggaaacagatgaatccctattaaacatgaagttttgattgtatttaagat

SEQ ID NO: 4665 - DNA, 1834 bp, Homo Sapiens
  NM_018324
acctcatttcctgtgtcctctctttctttggcaatccaaagaaagtcatctttcagattgtctgctcagagttcatctcaaagcctggcaaggattggagaggtcaataagagtcagcgcctttaaaaagaaatctactcactcttctgtgtgcataaggccgagcagaggttcttcgtctcaagaggaactgacttctgttgagcactcaacacgccacagagaccagccatcttgcaacctcacctcacagcatggagagaggagaccaacctaagagaaccaggaatgaaaacattttcaactgcttatacaaaaaccctgaggcaacttttaagctgatttgctttccctggatgggaggtggctccactcattttgccaaatggggccaagatactcatgatttgctggaagagacagcatctcaccatgttgccaaggctggtctcaaactccggcgctcaagtgatcctcctgcttcagcctacccatgtgctggcgtgagccaccgtaggcgtgagccaccgtgcctggccaaaattcttggtctattctggattctaattttttttatgcactccttaaggcttcctggaagagaaagcagagttgaagaacctcttgaaaatgacatctcccagttagttgatgaagttgtttgtgctctgcagccagtcatccaggataaaccatttgcattttttggccacagtatgggatcctacattgcttttaggactgcactaggtctaaaagaaaacaatcaaccagaaccattgcatttatttttgtcaagtgcaactcctgtacattcaaaggcctggcatcgcattcccaaagatgatgaattgtcagaagaacaaataagtcattaccttatggaatttggaggcacccccaagcattttgctgaagccaaggaatttgtgaaacaatgtagtcccatcataagggcagatctgaacattgttagaagttgcacctctaacgtaccatctaaggctgttctttcctgtgacttgacatgttttgttggatctgaagacatagcaaaggacatggaagcctggaaagatgtaaccagtggaaatgctaaaatttaccagcttccagggggtcacttttatcttctggatcctgcgaacgagaaattaatcaagaactacataatcaagtgtctagaagtatcatcgatatccaatttttagatattttccctttcacttttaaaataatcaaagtaatatcatactcttctcagttattcagatatagctcagttttattcagattggaaattacacattttctactgtcagggagattcgttacataaatatatttacgtatctggggacaaaggtcaagccagtaaagaatacttctggcagcactttgggaggccaaggcgggcggatcacgaggtcaggagatcgagaccgtcctggctaacaccgtgaaaccccatctctactaaaaatacacaaaattagccgggcgtggtggtgggcacctgtagtcccagctactcgggaggctgaggcaggagaatggtgtgaacctgggaggtggagcttgcagtgaaccgagatcgctccactgcactccagcctgggtgacagatccagactctgtctcaaaaaaaaaaaaaaaaaaaatacttctggcagagtcttttatcttcctattaaaatctcacttgattctcctttatgggaagtttgtcgacaaaattcatgattagtaaattatccattttttccttcagttagtttaatggtgaagatgattaacaggggaaatgcttgaagtaaatgattgtttcaatggc

SEQ ID NO: 4666 - DNA, 3233 bp, Homo Sapiens
  NM_018325
gcggttgcggtgcctgcgcccgcggcggcggaggcgcaggcggtggcgagtggatatctccggagcatttggataatgtgacagttggaatgcagtgatgtcgactctttgcccaccgccatctccagctgttgccaagacagagattgctttaagtggcaaatcacctttattagcagctacttttgcttactgggacaatattcttggtcctagagtaaggcacatttgggctccaaagacagaacaggtacttctcagtgatggagaaataacttttcttgccaaccacactctaaatggagaaatccttcgaaatgcagagagtggtgctatagatgtaaagttttttgtcttgtctgaaaagggagtgattattgtttcattaatctttgatggaaactggaatggggatcgcagcacatatggactatcaattatacttccacagacagaacttagtttctacctcccacttcatagagtgtgtgttgatagattaacacatataatccggaaaggaagaatatggatgcataaggaaagacaagaaaatgtccagaagattatcttagaaggcacagagagaatggaagatcagggtcagagtattattccaatgcttactggagaagtgattcctgtaatggaactgctttcatctatgaaatcacacagtgttcctgaagaaatagatatagctgatacagtactcaatgatgatgatattggtgacagctgtcatgaaggctttcttctcaatgccatcagctcacacttgcaaacctgtggctgttccgttgtagtaggtagcagtgcagagaaagtaaataagatagtcagaacattatgcctttttctgactccagcagagagaaaatgctccaggttatgtgaagcagaatcatcatttaaatatgagtcagggctctttgtacaaggcctgctaaaggattcaactggaagctttgtgctgcctttccggcaagtcatgtatgctccatatcccaccacacacatagatgtggatgtcaatactgtgaagcagatgccaccctgtcatgaacatatttataatcagcgtagatacatgagatccgagctgacagccttctggagagccacttcagaagaagacatggctcaggatacgatcatctacactgacgaaagctttactcctgatttgaatatttttcaagatgtcttacacagagacactctagtgaaagccttcctggatcaggtctttcagctgaaacctggcttatctctcagaagtactttccttgcacagtttctacttgtccttcacagaaaagccttgacactaataaaatatatagaagacgatacgcagaagggaaaaaagccctttaaatctcttcggaacctgaagatagaccttgatttaacagcagagggcgatcttaacataataatggctctggctgagaaaattaaaccaggcctacactcttttatctttggaagacctttctacactagtgtgcaagaacgagatgttctaatgactttttaaatgtgtaacttaataagcctattccatcacaatcatgatcgctggtaaagtagctcagtggtgtggggaaacgttcccctggatcatactccagaattctgctctcagcaattgcagttaagtaagttacactacagttctcacaagagcctgtgaggggatgtcaggtgcatcattacattgggtgtctcttttcctagatttatgcttttgggatacagacctatgtttacaatataataaatattattgctatcttttaaagatataataataggatgtaaacttgaccacaactactgtttttttgaaatacatgattcatggtttacatgtgtcaaggtgaaatctgagttggcttttacagatagttgactttctatcttttggcattctttggtgtgtagaattactgtaatacttctgcaatcaactgaaaactagagcctttaaatgatttcaattccacagaaagaaagtgagcttgaacataggatgagctttagaaagaaaattgatcaagcagatgtttaattggaattgattattagatcctactttgtggatttagtccctgggattcagtctgtagaaatgtctaatagttctctatagtccttgttcctggtgaaccacagttagggtgttttgtttattttattgttcttgctattgttgatattctatgtagttgagctctgtaaaaggaaattgtattttatgttttagtaattgttgccaactttttaaattaattttcattatttttgagccaaattgaaatgtgcacctcctgtgccttttttctccttagaaaatctaattacttggaacaagttcagatttcactggtcagtcattttcatcttgttttcttcttgctaagtcttaccatgtacctgctttggcaatcattgcaactctgagattataaaatgccttagagaatatactaactaataagatctttttttcagaaacagaaaatagttccttgagtacttccttcttgcatttctgcctatgtttttgaagttgttgctgtttgcctgcaataggctataaggaatagcaggagaaattttactgaagtgctgttttcctaggtgctactttggcagagctaagttatcttttgttttcttaatgcgtttggaccattttgctggctataaaataactgattaatataattctaacacaatgttgacattgtagttacacaaacacaaataaatattttatttaaaattctggaagtaatataaaagggaaaatatatttataagaaagggataaaggtaatagagcccttctgccccccacccaccaaatttacacaacaaaatgacatgttcgaatgtgaaaggtcataatagctttcccatcatgaatcagaaagatgtggacagcttgatgttttagacaaccactgaactagatgactgttgtactgtagctcagtcatttaaaaaatatataaatactaccttgtagtgtcccatactgtgttttttacatggtagattcttatttaagtgctaactggttattttctttggctggtttattgtactgttatacagaatgtaagttgtacagtgaaataagttattaaagcatgtgtaaacattgttatatatcttttctcctaaatggagaattttgaataaaatatatttgaaatttt

SEQ ID NO: 4667 - DNA, 1983 bp, Homo Sapiens
  NM_018326
gtttctcaacatcctggcttagtattgtgtgcaaaatcagagaggggtgcaagatcctgatttttcaggagttcaagcgacaatggcagcccaatacggcagtatgagcttcaaccccagcacaccaggggccagttatgggcctggaaggcaagagcccagaaattcccaattgagaattgtgttagtgggtaaaaccggagcaggaaaaagtgcaacaggaaacagcatccttggccggaaagtgtttcattctggcactgcagcaaaatccattaccaagaagtgtgagaaacgcagcagctcatggaaggaaacagaacttgtcgtagttgacacaccaggcattttcgacacagaggtgcccaatgctgaaacgtccaaggagattattcgctgcattcttctgacctccccagggcctcatgctctgcttctggtggttccactgggccgttacactgaggaagagcacaaagccacagagaagatcctgaaaatgtttggagagagggctagaagtttcatgattctcatattcacccggaaagatgacttaggtgacaccaatttgcatgactacttaagggaagctccagaagacattcaagacttgatggacattttcggtgaccgctactgtgcgttaaacaacaaggcaacaggcgctgagcaggaggcccagagggcacagttgctgggcctgatccagcgcgtggtgagggagaacaaggaaggctgctacactaataggatgtaccaaagggcggaggaggagatccagaagcaaacacaagcaatgcaagaactccacagagtggagctggagagagagaaagcgcggataagagaggagtatgaagagaaaatcagaaagctggaagataaagtggagcaggaaaagagaaagaagcaaatggagaagaaactagcagaacaggaggctcactatgctgtaaggcagcaaagggcaagaacggaagtggagagtaaggatgggatacttgaattaatcatgacagcgttacagattgcttcctttattttgttacgtctgttcgcggaagattaaacttaatgaaaatctgtttgtattttctgcatattctctggcaaccttgccccatacttacttatttagcatagtcgagtgctctagtttctgtctctcaggcactcgtaactaaggaccaccattggccattggtagatgtttgattgacttaacaagagagggacaaattttcaatttgtgaaactccaaagcagaaagtattggtgcttgctaccttgtgaattcttccttagacatgcagagaaaatgtatgcaagagaccaaaaagatggctccaagctatgtcatgttacctgtaataaaatcttttcttctagattctttctatgttggcagataatctccccttgtagcttccactcacttattcttgcattcagagtcacaatgatcatcttacccatgtggtttttgagaaagaaagatcaattctttgtttgcagtaggtaatcttagagatggagatgattgtagaattattcctagatgagtgtcaatttatttaattccattgtcatataaggagtcaaattgtttcttatcatttgttcattgaagaacagagacctgtctggaaaatcgatctctacaaattcaattaaataatgatccccaaatgctgaaaaagtgaaatacagcaattcaacagataatagagcaatgtttagtatattcagctgtatctgtagaaactctttgacgaacctcaatttaaccaatttgatgaatacccagttctcttcttttctagagaaagatagttgcaacctcacctccctcactcaacactttgaatacttattgtttggcaggtcatccacacacttctgcccccactgcattgaattttttgcttatgttgtttataataaaacttttcaattatctcaaaaaaaaaaaaaaaaaaa

SEQ ID NO: 4668 - DNA, 2918 bp, Homo Sapiens
  NM_018332
cgaggttagggcccgcgttgcgacgtggtgcagcgcatattttcacaagtgggtctcccttgtccgggactatggccaccgactcgtgggccctggcggtggacgagcaggaagcggctgtcaagtcgatgaccaatttgcagatcaaggaagagaaagtcaaagcagataccaatggtattatcaaaaccagtaccactgccgagaaaacagatgaagaggagaaagaggacagagctgcccagtccttactcaacaagctgatcagaagcaaccttgttgataacacaaaccaagtggaagtcctgcaacgggatccaaactcccctctgtactcggtgaagtcgtttgaagagcttcggctgaaaccacagcttctccagggagtctatgccatgggcttcaatcgaccctccaagatacaagagaacgcattacccatgatgcttgctgaacccccacagaatctgattgcccagtctcagtctggcactggtaaaacagctgcctttgtcttagccatgctcagccgagtggagccatcagacagatacccccagtgtctgtgcctctccccaacatatgagctggcgcttcaaacaggaaaagtgattgagcagatgggcaaattttacccagaactgaagcttgcctatgccgttcgaggcaataaattggaaagaggccagaagatcagtgagcagattgtcattggcacccctgggaccgtgctggactggtgctccaagctcaagttcattgatcccaagaaaatcaaggtgtttgttctggatgaggctgatgtcatgatagccactcagggccaccaagatcagagcatccgcatccagaggatgctgcccaggaactgccagatgctgcttttctccgccacctttgaagactctgtgtggaagtttgcccagaaagtggtcccagacccaaatgttatcaaactgaagcgtgaggaagagaccctggataccatcaagcagtactatgtcctgtgcagcagcagagacgagaagttccaggccttgtgtaacctctacggggccatcaccattgctcaagccatgatcttctgccatactcgcaaaacagctagttggctggcagcagagctctcaaaagaaggccaccaggtggctctgctgagtggggagatgatggtggagcagagggctgcggtgattgagcgcttccgagagggcaaagagaaggttttggtgaccaccaacgtgtgtgcccgcggcattgatgttgaacaagtgtctgtcgtcatcaactttgatcttcccgtggacaaggacgggaatcctgacaatgagacctacctgcaccggatcgggcgcacgggccgctttggcaagaggggcctggcagtgaacatggtggacagcaagcacagcatgaacatcctgaacagaatccaggagcattttaataagaagatagaaagattggacacagatgatttggacgagattgagaaaatagccaactgagaagctccaccagccactgatgccagccctggcactgcccctgcacaggagacaagtgcatttagggcacaggccccgacatcaccccaaggacaacggcagaagtagagagaaactacctacctcacttcaaattatgtttggacttgacaaaaataggtgcaaatgatggggggcaatagaagaaaaaatttgcattttggaaaattgggtcctttccccacttttttaaagccacattcccccatctttataataatctggtcacagtggtagtcgctggccccaggaccccctcctgattttggctaggcatcgtggaaccagctccagcccctgaagaaacgatagatgtgcaggttgtgcggaagaggctgagtggaaaatggtgtgagccccaccgctgtgcatcgaatgagggaagtggcagcagagaggccagagctgccccctctctgtctcttcaatggacccttcacaagtgtttctcctgcccttggggctgtcttccttctcctgaaatccagagactttcttgctcatcccttctccctttcacttctgttctctgctgcagaaagcagacttgcatatccctgatgagcagctcggctacttttgtaaacttcagatttggagagaaacacgaaagtctgaatcctgaccccttgagagagagtgatctggcgagggccgatgaaggggctgggcctggtcttgccttctcttctctcggttgctccctctgcctaggcccctggtactcagtcacggcagccaggagaccccaggtgagtttctgagcgcatacgtagttggttcttacccccaggtgtcacacggggccgagagctgagcaagaatttggaatggaagttatgaccaagggaattatgctgttcatttataatagtggacattatggagagctctgattcctacataatatgaataaggatggataggccgggcgtggtggctcatgcctataatcccagcacgttgggaggctgaggcgggcggatcggttgagctcaggcgttcgggaccagcctggccaacatgatgaaaccccgtctctaccaaaaatagaaaaaaatatagccgggcctggtggcgcacgcctgtagtcccagctactcgggaggctgaggtaggaggatcgcttgagcctgggtagaggctgctgtgagctgaaatggcgccactgcactccagcctgggtaacagagcgagaccccgactcaataaataaataaggatggataaattgtagcgtatgcaccattcattatgctaagacattttaaagtaattatgagaaacgctctactaatgatttgtttttatttgtatttttctgcttattagacaaatatatactcattttaaaaaaaaaaaaaaaaaaaa

SEQ ID NO: 4669 - DNA, 3555 bp, Homo Sapiens
  NM_018334
tttcagccaaccagactggagcagctgcgagtgctacatcttggctgtctgaagcgattggctcctctctggggagtggagggtgttcagttattaatgaccgctgagcaggcagcaccatgtcagtgtgacaactgatcgggtgaacgatgcaccactaaccaccatggaaacaaggaaaaataaagccagctcacaggatctctcttcactggattgagagcctcagcctgccgactgagaaaaagagttccaggaaaaagaaggaatcccggctgcagcctcctgccttcctttatattttaaaatagagagataagattgcgtgcatgtgtgcatatctatagtatatattttgtacactttgttacacagacacacaaatgcacctatttataccgggcaagaacacaaccatgtgattatctcaaccaaggaactgaggaatccagcacgcaaggacatcggaggtgggctagcactgaaactgcttttcaagcatcatgctgctattcctgcaaatactgaagaagcatgggatttaaatattttacttctaaataaatgaattactcaatctcctatgaccatctatacatactccaccttcaaaaagtacatcaatattatatcattaaggaaatagtaaccttctcttctccaatatgcatgacatttttggacaatgcaattgtggcactggcacttatttcagtgaagaaaaactttgtggttctatggcattcatcatttgacaaatgcaagcatcttccttatcaatcagctcctattgaacttactagcactgactgtggaatccttaagggcccattacatttctgaagaagaaagctaagatgaaggacatgccactccgaattcatgtgctacttggcctagctatcactacactagtacaagctgtagataaaaaagtggattgtccacggttatgtacgtgtgaaatcaggccttggtttacacccagatccatttatatggaagcatctacagtggattgtaatgatttaggtcttttaactttcccagccagattgccagctaacacacagattcttctcctacagactaacaatattgcaaaaattgaatactccacagactttccagtaaaccttactggcctggatttatctcaaaacaatttatcttcagtcaccaatattaatgtaaaaaagatgcctcagctcctttctgtgtacctagaggaaaacaaacttactgaactgcctgaaaaatgtctgtccgaactgagcaacttacaagaactctatattaatcacaacttgctttctacaatttcacctggagcctttattggcctacataatcttcttcgacttcatctcaattcaaatagattgcagatgatcaacagtaagtggtttgatgctcttccaaatctagagattctgatgattggggaaaatccaattatcagaatcaaagacatgaactttaagcctcttatcaatcttcgcagcctggttatagctggtataaacctcacagaaataccagataacgccttggttggactggaaaacttagaaagcatctctttttacgataacaggcttattaaagtaccccatgttgctcttcaaaaagttgtaaatctcaaatttttggatctaaataaaaatcctattaatagaatacgaaggggtgattttagcaatatgctacacttaaaagagttggggataaataatatgcctgagctgatttccatcgatagtcttgctgtggataacctgccagatttaagaaaaatagaagctactaacaaccctagattgtcttacattcaccccaatgcatttttcagactccccaagctggaatcactcatgctgaacagcaatgctctcagtgccctgtaccatggtaccattgagtctctgccaaacctcaaggaaatcagcatacacagtaaccccatcaggtgtgactgtgtcatccgttggatgaacatgaacaaaaccaacattcgattcatggagccagattcactgttttgcgtggacccacctgaattccaaggtcagaatgttcggcaagtgcatttcagggacatgatggaaatttgtctccctcttatagctcctgagagctttccttctaatctaaatgtagaagctgggagctatgtttcctttcactgtagagctactgcagaaccacagcctgaaatctactggataacaccttctggtcaaaaactcttgcctaataccctgacagacaagttctatgtccattctgagggaacactagatataaatggcgtaactcccaaagaagggggtttatatacttgtatagcaactaacctagttggcgctgacttgaagtctgttatgatcaaagtggatggatcttttccacaagataacaatggctctttgaatattaaaataagagatattcaggccaattcagttttggtgtcctggaaagcaagttctaaaattctcaaatctagtgttaaatggacagcctttgtcaagactgaaaattctcatgctgcgcaaagtgctcgaataccatctgatgtcaaggtatataatcttactcatctgaatccatcaactgagtataaaatttgtattgatattcccaccatctatcagaaaaacagaaaaaaatgtgtaaatgtcaccaccaaaggtttgcaccctgatcaaaaagagtatgaaaagaataataccacaacacttatggcctgtcttggaggccttctggggattattggtgtgatatgtcttatcagctgcctctctccagaaatgaactgtgatggtggacacagctatgtgaggaattacttacagaaaccaacctttgcattaggtgagctttatcctcctctgataaatctctgggaagcaggaaaagaaaaaagtacatcactgaaagtaaaagcaactgttataggtttaccaacaaatatgtcctaaaaaccaccaaggaaacctactccaaaaatgaacaaaaaaaaaaaaagcgaaagactgcagttgtgctaaaaacaaaacaaaacaaacaaacaaacaaaaaagtaaaaaaagattactttcgagagagaagtttaagcttcaccaatgctgctcctgaccaatggaaatatgtacaacttcagcattttaagtaactggcttcaaggggtactgtggcaaccaaataaaataactccattttctaaaactttcatgtaacttttatgtctggactacagttcaagtggacaaaaacatttctgtattttttttaagtaaataagagtagttgaactgagcaatacctcctcctgtgttgtattacacatattagccacgagtttttgcagtgaccagataaacttgaattgacacgtggtgtaataaaatggacaaattctgtagagtagacacagtgagtatgtggacctcttttataaggaaaaatacattttggattaaaatcaattgcttctgtcttgttttgtttctaaataaagaataatttctgggaaaaaaaaaaaaaaaaaaa

SEQ ID NO: 4670 - DNA, 3281 bp, Homo Sapiens
  NM_018338
gagtaaacggaggcctccggcagacgctgtgaagagaggagccgcggcggtcagtaccttcgaggaaatgaaggaaccagatgatcaggatactgatggggagaaatcagttacatcaaagagtgatgggaagaagtctctgaggtcttctaaatcagaatcaagatctcctgttcaagaagataacacatttttagaagatgacacagatgaaacatttaccaaaggggaaggatcatatttagaagaagactcagatgaggaacgtttggaaggaagtttgagttcatttcagtatggtgatttgcaaagcactacagtacctcagcaaacccctgctccagctgtggaagaagcagaggaggaagttaagaagaaaatatcagagagcttcttctatgattatatggagcttgcttcgatgccttttgtgactctggattcaaacataccactggatcttctcacacttgtacattcttttggttatgactgtagaaagcgagccaacctacaacttctggacgacagtatcgccatatacatagctgggaaccaactgatctttctgaatttgaaaaccaaggaacagatctacctgcgaagtagcagtggtgaaggaattggcgtcattggggttcatccacataaaacttatttcacagtagctgaaaaagggagttttccagatattatcatctatgaatatccttctctgagaccatacagagtccttcgagatgggactgagaagggatatgcttatgtggactttaactacagcggtaacttgctggcctctgttggtagtaaccctgactacacactgactatctggaactggaaagaagaacaacccatactaaggacaaaagctttttctcaggaagtttttaaggttactttcaatcctgataaggaagagcagcttactacatcgggatcaggccacatcaagttctgggaaatggcttttacgttcaccggtctcaagctgcagggatcactaggtcgatttggcaaaacaatcactactgatatagaaggctacatggagctcccagatgggaaggtgctctcagggtcagaatggggcaacatgctgctttgggaaggtggtctgatcaaagtggagctctgtcgagggacaagcaagtcatgtcacaatggtcccattaaccagataatgctgtatgagggtgaagttatcactgttgggtcagatggatatgttaggatatgggattttgagacaatagacactgctgatgtaatagatgagactggattgttggagattgagcctattaatgaacttcaagtagacaagaatgtgaatctcttctctatgataaaaatgaatgaaactggaaataacttttggttggctcaggatgccaatggagccatatggaagcttgaccttagtttttcaaatattacccaggacccagaatgcctcttctccttccattctggagctattgaagccgtggctgtttctcctctcacttatctcatggccacaactgccttggactgctctgttcgaatctatgattttgctagcaaaactcctttggcccagatgaaattcaaacaaggaggtactgcccttgtttgggtaccccgaatggtaaacttcactggagcacaaattattgtaggatttgaagatggagttgttcgaattcttgaactttatgatccaaaagggctcacgatttttgcgggacggaagaaaattttggatgctgatattcagttgaaacaggttttcaaaccccatactgcttgtgtcactgctttagcttatgaacgtgatggggaaattctagccacagggagtaaagatcaaactgttttcttctttgaagtggaaagggattataagccgattggttatattaatactcctggacctgtgtgtcagttaatgtggtctcccatgtctcatcctgaaagtactttactaattatctgtgaaaatggctatattcttgaagctccacttccaaccataaagcaagaagaggatgatcatgatgtagtctcctatgaaatcaaagacatgtgcataaaatgtttccatttttcaagtgtcaaatctaagattctgagattaatagaaattgaaaagagggagagacaaagggagttgaaggagaaaataagggaagaaaggaggaacaagctagcagcagagatgggagaagatggagaaaaagaatttcaggaggaggaagaggagaaagaggaggaggaggaggaagaagagccattacctgaaatatttattccgtcaaccccctctcccatcctctgtggattttactcagagccagggaagttctgggtttctttgggtggctatgattctggttttctatatcactgtgagttccccccttgtgatgaaagcagtgatttcaaagaacaaaaagatgaacctattgatgtccgttatcttgcggatacagaggacaatcccatccaaactatcactttcaacattaacaaagttatgatgttttgtggaatgaaaaatggagcaattcgagtctatgtcctaaatcaaaatgatccttcattgaccagtttggtggactactggcacttcaatatgcatgacaataattatggatgtattaaaagtattgctaatagctttgatgatcgtttcttggtgactgctggagcagatggcaatatctttgttttcaacattttttctgaatttatgctaaggaaagacatgaaggccaaagttccatctcccaggtttggaattgaaacagagccaattccagaagacattgaagatcccaaagcctacagtatcgagaatgctaggagaaaaagagaacatgacaagttaatgaaagaagtgggagaaataaaggcacggaagagagagcaaatcaaagctttgaggagtgaattttgtaatctattagaaatgaatgaaaaattaccaaagcatatgcagtttaaacgaacagtaagcctaatataaacttgatttttattttaacatatgctatttctggatagagatgactattttcccaacaagtagaaacacttaaaatcatctttcttttttgtttgtttctttcaaaatttcaatagccatttattttgggcatcttttaatttgtatgtggggtttatcccttttaatcagttaagattcttgttgacacaaattgttttacatcaactgttgttatagaacacatgaaaggaatacatggggaagaaataaagtagaacccaag

SEQ ID NO: 4671 - DNA, 2078 bp, Homo Sapiens
  NM_018341
attcacgcgcgccgcagcggggcaccggaagttatggaggtattaataggggaccctattaccacatgtctttctccctcagtgtatgatataatttgtaatcttgggtttcaactcagagaaaattgtgatatcaatagcattgtaactcagaatggtgaagtatgctggaaaacaatcacagactgtgtgagctacacagagtcagagcagggtctggattactggggaagcgtgaggctgctgggccctgtgtgtgaggctgtccattcacatttcttatctctgaccaaggggcaatttgaaattcgatatgcaccgtggttccagtggacaagttttccagagttatttcctgaaatatttgatgccttggaaagtctacaatctcctgctatttctcttagcttaatgaaactgacatcgtgtctagaacgagccttgggtgatgtatttttactgattgggaaggaatgcccctttcttttaagagatctgctttcatctgaggagcttgctcaagtcttcagtcagtctgtgatgaatgtgctaaaagtcttcgttggctctccgtgtggtctcaacctgcgtaacgtcttatggcatgggtttgcgtcacctgaagaaattcctccaaaatactgttcaatgatgatactgttgacggcaggattgggtcagttactgaagagttaccttcaaaacactaaacttacattggcacatcgctctttcatatctcttacaaacctcgaggatttgattgtttttcctgatgttacttatgaggtgctttcagtattagaagaagtgatgatgaaatctgcttttatattaaaaatcatgttaccatattgggaagttgcactggtcaagttcaagtcacacaggtttgctgactgcgccatattgttgctgacacaactggagactggacttaggaatgtttttgccacacttaacagatgtccaaaaagactcctgactgctgagtcaacagctctttataccacctttgatcaaatattggcaaaacacttgaatgatggtaaaatcaatcagcttcctcttttccttggagagcctgctatggaatttctctgggatttcctgaaccatcaggagggtccccgcataagagatcatttaagccacggggagatcaacttacatgaattttcaaaagaaacaactaatcagttgcttgcattttctcttgtactgctactcagattcgttgatgactgtctgctatcagtttttaaggaaaaatcagccgtagaattgttgattagtcttgcagaaggctatagttctcgctgtcatccggtttttcagcttaaaaaacaggtgctgagctgtgaggagagcatcagggtttgggctctgctgcctttccccgaagaactcactcggcaagccgtcagattagaagataattctgaaacaaatgcctgccactctttgattacaaaaatgacggatgagctgtatcaccatatgcctgagaatcgttgtgtgttaaaggacttggatcgtcttcctactgagacgtggccccagcttctccgtgagctctgcagcacacctgttcccaccctgttctgccccaggattgtgctggaagtgctggttgtgctccgaagcatcagcgaacagtgccgccgtgtgtccagccaggtcaccgttgcctcagagctgagacacaggcagtgggtggaaaggacgctgcggtctcgccagcggcagaactacctgcgtatgtggagtagtatcagactactgtcccctgtgctcagcctgatactgttactcattgcgctggagttggtcaacattcatgctgtttgtgggaagaatgcgcatgagtatcagcagtacctaaagtttgtaaagtcgatcttgcagtacacggagaacctggtggcttacaccagttacgaaaagaacaagtggaatgaaactatcaatcttacacatacagctttgttgaaaatgtggacttttagtgagaagaaacaaatgttaatacatttagccaagaaatccacaagtaaagtactcttatgaaaacttgt

SEQ ID NO: 4672 - DNA, 3980 bp, Homo Sapiens
  NM_018343
gcgtgcgcgagccatctggcgctgtaaagcgcttagaggctggaataacgacctgccttacgctttgcggctgtcgtcggagaggcatctgggttcggactggggccgccatggggaaagtgaatgtggccaagttgcgttacatgagccgagatgacttcagggtcttgaccgcggttgaaatgggcatgaagaaccatgaaattgttcccggcagtttgattgcttctatagccagccttaaacatggtggctgtaataaagttttaagagaattagtgaaacataaactcatagcttgggagcgtaccaaaactgtccagggctatcggttgacaaatgcaggatatgattacctagctttgaaaacactttcttctaggcaagtagttgagtctgttggaaaccagatgggtgttggcaaagaatcagatatttacattgttgcaaatgaagaaggacaacaatttgcattaaagcttcacagactaggaagaacctcgtttcgaaatttgaaaaacaaacgcgattatcataaacataggcacaatgtgtcatggctatatttatctcgtctctctgccatgaaggaatttgcctatatgaaggcattgtatgagaggaaatttccagttccaaagccaattgattacaatcgtcatgcagtggtcatggaactcataaatggttatccactatgtcagatacaccatgttgaagatcctgcatcagtatatgatgaagctatggaactaattgtcaaacttgcaaatcatgggctgattcatggagattttaatgaatttaatctcattttggatgaaagtgaccatatcaccatgattgattttccacagatggtttcaacttctcatcccaatgctgagtggtattttgacagagatgttaaatgcattaaagatttctttatgaaacgtttcagctacgaaagtgagctttttccaacttttaaggatatcaggagagaagacactcttgatgtggaggtttctgccagtggctacacaaaggaaatgcaggcagatgatgaactgcttcatccattaggtccagatgataaaaatattgaaacaaaagagggatctgaattctcattttcagatggagaagtggcagaaaaagcagaggtttacgggtcagaaaatgaaagtgaacggaactgtctagaagaatcagagggctgctattgcagatcatctggagaccctgaacaaataaaggaagacagtttatcagaagagagtgctgatgcacggagttttgaaatgactgaattcaatcaagctttagaagaaataaaagggcaggttgttgaaaacaactctgtaactgaattttctgaggagaaaaacagaactgaaaattacaacaggcaagatggtcagagagttcaaggaggagtccctgctggctctgacgagtatgaagatgaatgccctcatctaattgccttgtcgtcattaaatagagaattcaggcctttcagagatgaagaaaatgtgggagctatgaatcagtatagaacaagaactctgagtatcacttcttcaggcagtgctgtaagctgttcaacaattcctccagaactggtgaaacagaaggtgaaacgtcagttgacaaaacagcaaaaatcagctgtcagacgtcgattgcagaaaggagaagcaaatatatttaccaagcaacgtagggaaaacatgcaaaatatcaaatcaagtttggaagcagccagcttttggggagaataatatatttaggatcttggatatgtttaatatattttttaaagttactgtaattcctttttgagccctcatttgtcttttttgagccaaggctatcatatattaataaataaaccctctttcatctataaatttggtcattcagtatgtgtcttgcaaagaataattacctgccaaagcagtccatttttttcaaagtaatttgggtaactacagttacgtaactttattagagacatttgcatatttttaaaaatctaaataacatttttgttgttttctgtttgttgaggatgatatgctacaatgcacataaagcaattagaacaatgtttagcacattcttaagcattcaataaaacatggctattagaatcataatgattctgaaattctgctgacaatttggttgcattttatttggcaactggaggacttcactgtcttatttttctttagaagtaaagataagcctttggaagtaaagataagccagtgatgcacaatttgcttaattaattgattaataatctgttttgtgccacttacattggtaatgtggtcatgagaatggaaacttacttgagatagtctaccacaatttttacagttggcagcttgtaagcaggcctgagtagcagaagagttaggggttggggaaggtggagtagaatgaggaatgaaatgttctttctcatatgcttattatataagtgggtccggaacatgttctcacctcaaggttaacaaatacctaatgcaggaaagaaaatacatagccatggtcccttcctcaaggactttataattcagtgagatgtaaagatgagtgcttaagtgtatgcacctgattattgtctcttcattgccgcataagtcggaaaaggggatcacttgcagcgaaaaatggccactagatggcaatatcaccccatagtcaccaaacaggattacttgcatccctaattatgttctaccagagggaatatagtacagacttttccaagattgataaagacagcagattccctttcacctttgccaaattaactctactagctatttgcaagacctgtaattatctaataaattggcttaaatatatagaagctagaaaatgccaattcctcttccctcaaaagttacctgacattcaaatatttaaatacccttgctttgcattttagatatatctttgaattcaggtattcattttgtataatctctcaacttttaagcatttttataatgtaaagttgaaaacagcttaatagaaccacagaatgtttattttggagtcattttcttatattcagagctatgaaagcaaattgggaataaagccttatcctgctcagctttacctagttgactcagttgacttttgagtatctactacataaaaagcccattactattaagaaactcaagacaaacatgatttttacctttaatagcctaagatttcttgtgggccaaggaattaattattccaatcagaaatggaggccttacctcatttgggcaaagattagtgctagttattgaagatttactaataaatgatctgttaaggaatttagttttttttggatatgttgttttggttgttgaaaactaaggtataattataatagttattttttgaagatatgtttggctagccatcaattagaagttagagagtttgtcctaacagataagctataaccctcacattttaaaacatgcatagtgaacaatgaacaaaaacaaattcaaaattttactaatgtaaagctgtatattgtgattgttaaaacacttttttttgcctaggagttccagatttaaatcctggttctacacttcccaaacctcaggtaccttctgtggcctctctaacctcaatttttttacttgtaaaatggggacatttaatagtatacctcagtgtcgtgaagactaaatgaagtaccacttgtaaagagtttattacagtgcctgacatatactgtatggttagtactgctaaaatgacttcttaaggttaccaaaaggaaaattccacaagctgaccacctttcctattgtgatggtcactggtatttcagctatgatcctttgttgtgtatttatccagactgaaagatgtttttctagtaaccatcttgcatcgtcttagtctccccattaaataaacttttcctacaaactaaaaaaaaaaaaaaaaaa

SEQ ID NO: 4673 - DNA, 2277 bp, Homo Sapiens
  NM_018344
aagcccagtggtcctggccgtgcgccggaggcagcggcggcgtggcgcagcggcgacatggccgttgtctcagaggacgactttcagcacagttcaaactccacctacagaaccacaagcagcagtctccgagctgaccaggaggcactgcttgagaagctgctggaccgcccgccccctggcctgcagaggcccgaggaccgcttctgtggcacatacatcatcttcttcagcctgggcattggcagtctactgccatggaacttctttatcactgccaaggagtactggatgttcaaactccgcaactcctccagcccagccaccggggaggaccctgagggctcagacatcctgaactactttgagagctaccttgccgttgcctccaccgtgccctccatgctgtgcctggtggccaacttcctgcttgtcaacagggttgcagtccacatccgtgtcctggcctcactgacggtcatcctggccatcttcatggtgataactgcactggtgaaggtggacacttcctcctggacccgtggcttttttgcggtcaccattgtctgcatggtgatcctcagcggtgcctccactgtcttcagcagcagcatctacggcatgaccggctcctttcctatgaggaactcccaggcactgatatcaggaggagccatgggcgggacggtcagcgccgtggcctcattggtggacttggctgcatccagtgatgtgaggaacagcgccctggccttcttcctgacggccactgtcttcctcgtgctctgcatgggactctacctgctgctgtccaggctggagtatgccaggtactacatgaggcctgttcttgcggcccatgtgttttctggtgaagaggagcttccccaggactccctcagtgccccttcggtggcctccagattcattgattcccacacaccccctctccgccccatcctgaagaagacggccagcctgggcttctgtgtcacctacgtcttcttcatcaccagcctcatctaccccgccatctgcaccaacatcgagtccctcaacaagggttcgggctcactgtggaccaccaagtttttcatccccctcactaccttcctcctgtacaactttgctgacctatgtggccggcagctcaccgcctggatccaggtgccagggcccaatagcaaggcgctcccagggttcgtgctcctccggacctgcctcatccccctcttcgtgctctgtaactaccagccccgcgtccacctgaagactgtggtcttccagtccgatgtgtaccccgcactcctcagctccctgctggggctcagcaacggctacctcagcaccctggccctcctctacgggcctaagattgtgcccagggagctggctgaggccacgggagtggtgatgtccttttatgtgtgcttgggcttaacactgggctcagcctgctctaccctcctggtgcacctcatctagaagggaggacacaaggacattggtgcttcagagcctttgaagatgagaagagagtgcaggagggctgggggccatggaggaaaggcctaaagtttcacttggggacagagagcagagcacactcgggcctcatccctcccaagatgccagtgagccacgtccatgcccattccgtgcaaggcagatattccagtcatattaacagaacactcctgagacagttgaagaagaaatagcacaaatcaggggtactcccttcacagctgatggttaacattccaccttctttctagcccttcaaagatgctgccagtgttcgccctagagttattacaaagccagtgccaaaacccagccatgggctctttgcaacctcccagctgcgctcattccagctgacagcgagatgcaagcaaatgctcagctctccttaccctgaaggggtctccctggaatggaagtcccctggcatggtcagtcctcaggcccaagactcaagtgtgcacagacccctgtgttctgtgggtgaacaactgcccactaaccagactggaaaacccagaaagatgggccttccatgaatgcttcattccagagggaccagagggcctccctgtgcaagggatcaagcatgtctggcctgggttttcaaaaaaagagggatcctcatgacctggtggtctatggcctgggtcaagatgagggtctttcagtgttcctgtttacaacatgtcaaagccattggttcaagggcgtaataaatacttgcgtattcaatgtaaaaaaaaaaaa

SEQ ID NO: 4674 - DNA, 2499 bp, Homo Sapiens
  NM_018346
gtgatccctgcgcgcgtctcctgctcgggtcagtgcgccgcgctgcgctgggcgccatggcgctccccggagcccgggctcgcggctgggcggcagcagccagagcggcccagaggcgccgccgcgtggagaacgcaggagggtccccgagtcctgagcctgcgggccggcgcgcggcgctttacgtacactggccttactgcgagaagcgctgcagttactgcaacttcaacaagtacatccctcgccgcctggaggaggctgccatgcagaagtgtctggtgaccgaagctcagacgctgctgcggctcagcggggtgcaacgggtggagtctgtgttctttggtggggggacccccagtctagccagtccccacacggtggctgctgtcctggaggctgtggcacaggcagcccacctgcctgcagacttggaagtcacattggaggctaatcctacttcagctccgggctccagactggcagagttcggggcagcaggggttaacaggttgtctataggcctccagtccctagatgacactgagctccggctgttgggacggacgcactcggcctgcgatgctctgcggacgctggcagaggcccggcgcctctttcccgggcgcgtgtctgtagacttgatgctggggctgccggcacagcaggtggggccgtggcttgggcagctgcaggaactgctgcaccactgtgatgaccacctctccctctaccagctgtccctggagcggggcaccgcactcttcgcccaggtgcagcggggtgcccttccagcccctgacccggagctcgcagctgagatgtaccagaggggccgggctgtccttcgggaggctggcttccaccagtatgaggtctccaactttgcccggaatggggcgctcagtacccacaattggacttactggcagtgtggtcagtaccttggcgttgggcctggggcccatggacgatttatgccccagggggctggaggccacacccgggaggctcggatccagacactggagcctgacaactggatgaaggaggtgatgctgtttggccatggcacccggaagcgtgtccccctgggcaggctggagctgctggaggaagttttggccctggggctacgcaccgatgtggggatcactcaccagcactggcagcagtttgagccccagctgaccctgtgggatgtgtttggagcgaacaaggaggtgcaggagctgctggagcggggcctactgcagctggatcacaggggtcttcggtgttcctgggagggtctggctgtgctggactctctcttgctgaccctcctgcctcagctccaagaagcctggcagcagagaaccccctcccctgtgccaggaggatgacaaaaatgttcctgtgttccagggtaatgccaggtgggttttgagagctgggtcggtactgcagacatctcttctccgttgtcgggtgccgtctctgctccttgtggttattgctcagccctggcatccccaggggaatggcagcagtgaggtagatgggaggacatttctggtcagggaactggcatcccattcagcatctcaggactcacaggccaacatgtgttccatggctgggaattgcctaccacccacatcagcttctgtttacctttttggcatcaaataatgaacagtgtttggaaatctttctacaggcaattacctccccaagagaagccttccttattttggagtaaggtcctaagatagctggatgaatcaggaaaaccatgtcccctctaggtattattaatattagcaggaagggatctactataggaatgaagtatttataaaccactgaaagggatagagaagtgaacattggagaaagccagtagcaactgtgagaaatcagcaacttgcaggaggcacagaaaactcctgctgatggtctcagcttccagcagcacaaaagcagatgatgtactggaaaatgctcagaagatgctacaaaacctcatgcctactgtctgccactgctggagaaggaatcatggtttctagaagtgcctctcattagtggactttaaagcaaatcctggctggcaggaaattctgaggaatatagctcttaggcttccagcctctaccatgcaggagagaacacagaaggactgatgtatgttggtggatccatgtatgtgtccagcacagcggcctgctggactctgagaactgggaaagatcagagcaagccttgcctcttatcttcgggaaaccagaatatgtttggggtggtaggagccacacagactcttctgagccccctcactcacttccttccccctgtgcctttcctttgagagtgaaggtgggtggagttgaccagagaaaggggagagaattcgggaaagacccaaagtgtttgtaattcttctttgtccttttacctacagaaatggtcacatggttctatttaaatagcctaataaacacatctggagcctgt

SEQ ID NO: 4675 - DNA, 4184 bp, Homo Sapiens
  NM_018348
cggagccaaagaatgctccgcctgcgcgcgccgcttccgttgccatagtggccgggggcgggaggctggcgcctcccagcttctgtactccgcgaagcaaaacctagggagctgaggcctaggcgaggcgagagtcgccggcgtgcgtaacgttggcgcacgtgactccggcccggcctacagggcgcgtgcgcagtgggacttgagtgcctcctggtccctgtctgccggcattcgcggctgcggggcccggaggtgggactggcttcccggtgccgcgagggcgggtccggacagccttccccccagtccggcgcaccatctccctgccttgtggctggaggcgccgcggacccaaagggagggaccatcccgggaagcagccccgagagcggaagtgcagaatggcttcctcgagagagtaaagtgcagcctctccagacactggggccccagtgggcgtgggcgaagttgctggtaggaggagttggcggaagcacttggaactcctttataagtgtcagctgtgagattttaatttgatttgaaaatgagtaagtgcagaaagacaccagttcagcagctagcaagtcccgcgtcattcagcccagatattcttgctgacatttttgaactctttgccaagaacttttcttatggcaagccacttaataatgagtggcagttaccagatcccagtgagattttcacctgtgaccacactgaacttaatgcatttcttgatttgaagaactccctaaatgaagtaaaaaacctactgagtgataagaaactggatgagtggcatgagcacactgctttcactaataaagcggggaaaatcatttctcatgttagaaaatctgtgaatgctgaactttgtactcaagcatggtgtaagttccatgagattttgtgcagctttccacttattccacaggaagcttttcagaatggaaaactgaattctctacacctttgtgaagctccaggagcttttatagctagtctcaaccactacttaaaatcccatcggtttccttgtcattggagttgggtagcgaatactctgaatccataccatgaagcaaatgacgacctcatgatgattatggatgaccggcttattgcaaataccttgcactggtggtactttggtccagataacactggtgatatcatgaccctgaaattcttgactggacttcagaatttcataagcagcatggctactgttcacttggtcactgcagatgggagttttgattgccaaggaaacccaggtgaacaagaagctttagtttcttctttgcattactgtgaagttgtcactgctctgaccactcttggaaacggtggctcttttgttctaaagatgtttactatgtttgaacattgttccataaacttgatgtacctgctaaactgttgttttgaccaagtccatgttttcaaacctgctactagcaaggcaggaaactccgaagtctatgtggtttgcctccactataaggggagagaggccatccatcctctgttatctaagatgaccttgaattttgggactgaaatgaaaaggaaagccctttttccccatcatgtgattcctgattcttttcttaagagacatgaagaatgttgtgtgttctttcataaatatcagctagagactatttctgaaaacattcgtctatttgagtgcatgggaaaggcggaacaagaaaagctgaataatttaagggattgtgctatacaatattttatgcaaaaatttcaactgaaacatctttccagaaataattggctagtaaaaaaatctagtattggttgtagtacaaatacaaaatggtttgggcagaggaacaaatattttaaaacttataatgaaaggaagatgctagaagccctttcatggaaagataaagtagccaaaggatactttaatagttgggctgaagaacatggtgtatatcatcctgggcagagttctattttagaaggaacagcttccaatcttgagtgtcacttatggcatattttggagggaaagaaactgccaaaggtaaaatgttctcctttttgcaatggtgaaattttaaaaactcttaatgaagcaattgaaaagtcattaggaggagcttttaatttggattccaagtttaggccaaaacagcagtattcttgttcttgtcatgttttttctgaagaactgatattttccgagttgtgtagccttactgagtgccttcaggatgagcaggttgtagtacccagcaatcaaataaagtgcctgctggtgggcttttcgactctccgtaatatcaaaatgcatataccgttggaagttcgactcctagaatcagctgaactcacaacttttagctgttcattgcttcatgatggagatccaacttaccagcgtttatttttggactgccttctacattcattgcgggagcttcatacaggagatgttatgattttgcctgtactttcttgcttcacaagatttatggctggtttgatctttgtactccacagttgttttagattcatcacttttgtttgtcccacatcctctgatcccctgaggacctgcgcagtcctgctatgtgttggttatcaggaccttccaaatccagttttccgatatttgcagagtgtgaatgaattgttgagcactttgctcaactctgactcaccccagcaggttttacagtttgtgccaatggaggtactccttaagggggccctgcttgattttttgtgggatttgaatgctgccattgctaaaaggcatttgcatttcattattcaaagagagagagaagaaattatcaacagccttcagttacaaaactgaacatatgctttctgagattcaactttatgatttcttataatttgcccagtatttgcatcctgttgctctattaatttaaaaaccttttattttggggaaaggccaacatttgcatcattcaaagtctcattaattctggaaaaccatccattctgatctctagggtatatacacccacaggcatagagctcttccacgtggtggaatctatgcaatgatagatattcacactctaaatatgaggtgtgtgtatgtgtatgggtggccacagccatgcttacctatgccatttagttggtcttacttaatctgcttaagatttgcatctgtgtacctttgttcagattagttttttttttccagccgatttcctcttagtggctaatgctgttagtgaattttccaactaatttcctctcattggttaatgttgttaatgaattgagagaggtaattgaggaaaggaaatgagtaaatcactgttcagcaacactgatttccgttaacacatcagttatgaatttcagggaattcatctcgccagattcttgataacatgccattcattgcccttaggtgattgaccctattttcttacatggctcaaataaaactagtatgctgttgtatgaatcttttactgaccacaccatccaactataaaaatataacgggacagctttaaaccaaagatcatgtttagaacaatgaaaaattatttgttgtatctaatacacgcctgtattgtgaaaagcttcatttagcaatgatgtaataatttttaacttccaggaaataatctgtgaatggaaagattttttaagattttgagatagtgtttagtctcatgttgggaacacatgaatgtgatgaacatagtgaatactaaagaaaacgcttcagactttcagaatgatggttcagaatttaaaatttttaatcttttctaatttctttttttcagtgtgaaaatagcactttaccaaaagattagccatgaaatggttattttgccagttacatttgatttcttttgtatctgcaatgtaatgagttattttatttcttctgtatttgcagtgtaatgagtttttgtggcaaagtgtattaagcaatttttcattatcttgaagttccacaaagtggagaatatttatattctcacatgcattttaggcacttttgatatgtgaaaatagatgtattttctgatgcatttggttaataaatattaatctgaacattttcatgttctttgctattttgaattccattatagattcatgaataaagtcattactagagagaaaaaaaaaaaaaa

SEQ ID NO: 4676 - DNA, 7637 bp, Homo Sapiens
  NM_018349
gagtcattgcagttttcagtagaggtgtacttctgagaagtggcttcttgggtcttcatgcagccatggatctggataaaccatctgtttggggctcattaaaacagcggaccaggccattgttgatcaacttgagcaagaagaaggtgaaaaagaacccaagtaagcccccagatctacgggcaaggcatcacttggaccgccgtctcagcctctctgtgcctgatctcctggaggctgaggccttggccccagagggccggccttactccgggccacagtcttcctacacctcggtgcccagcagtctgtccactgcagggatctttcccaagagcagcagtagctccttgaaacagtctgaagaagaattggattggagccaggaagaagccagtcacctccatgtggtggaaacagactcagaggaggcctatgcctctcctgctgagcggagacgggtgtccagcaacggcatctttgatcttcagaaaacttcccttggaggggatgcaccagaagagccagagaagctatgtggaagcagtgacctgaatgcttctatgacatctcaacattttgaagaacaatctgtaccgggggaagccagtgatggcttgagtaacctccccagcccttttgcgtacctcctcaccatacacctgaaggaaggccggaacctggttgtccgagatcgctgtggcacaagtgatccttatgtgaaatttaagctgaatgggaagacgctgtacaaaagtaaagtcatatataagaacttgaacccagtatgggatgagatagttgtattgccaatccaaagccttgatcaaaagctacgtgtgaaggtatatgatcgagatttaaccacatctgatttcatgggttctgcatttgtcattctcagtgatcttgagcttaacagaacaactgaacatattttaaaactggaagatccaaacagtttagaagatgacatgggagtgatcgtgttaaatttgaacctagtggtaaaacagggtgatttcaagagacaccgttggtcaaatcggaagcgattaagtgccagcaagtcctctttgatacgcaacctacggctctctgagtccttgaaaaagaaccaactctggaacgggattataagtataactttgttggaagggaagaatgtctcaggaggaagcatgacagagatgtttgtccagttaaaactgggagatcagaggtataaaagtaagacactgtgtaagagtgcaaatccgcagtggcaggaacagtttgactttcactacttctctgacaggatgggcattttggacattgaagtgtggggaaaggacaacaaaaagcatgaggaacgtctgggcacgtgtaaagtggatatctcggcactccctctgaagcaagccaactgcctggagctgccactggacagctgtctgggggctctccttatgttggtcacacttacaccctgtgcgggggtctccgtctctgatctgtgtgtctgccccttagcagacctcagcgaaagaaagcagattacccagcgatattgcttacagaactccctgaaagatgtgaaagacgtcggcattctacaagtgaaggttttaaaggcagcagatctcttagcggcagatttctcagggaagagtgacccattttgcttgttggagttaggcaatgaccgacttcagacgcataccgtctacaaaaacctcaaccctgaatggaacaaagtttttacatttcccattaaagatatccatgatgttttggaagtgacagtgtttgatgaagatggagataaacccccagattttcttggaaaagttgccattcccttgctgtccattagagatggacaaccgaattgttatgtactaaagaataaagatttagaacaagcttttaaaggagttatttacttagagatggaccttatatataatccggtgaaagcaagtattaggacttttactccccgggaaaagcgctttgttgaagacagccgcaagctgtccaaaaagatcttatcaagagatgtggaccgtgtgaaaagaatcactatggcaatatggaatacaatgcagttccttaaaagctgcttccagtgggaatccacattaagaagtacaatagcattcgcggtatttttgatcactgtctggaattttgaactatatatgatccccttggcattgttgctgatctttgtctacaatttcatcagacctgtgaaaggcaaggtcagcagcatccaggacagccaggagagcacagacatagatgacgaggaggatgaagatgacaaggaatctgagaaaaaggggttgattgaaagaatctatatggtacaggatattgtttcaactgttcaaaacgtcttggaggaaatagcttcttttggagaaaggattaagaacacatttaactggacggtccccttcctttcatctctggcctgtttgattctggcagcagccaccatcattttgtatttcattccactgcggtacatcattttaatctggggcataaataaatttactaagaagcttcgaaatccctattccatcgacaataatgagctactagacttcctctctagggtaccgtctgatgttcaaaaggtgcagtatgcagaattgaaactctgcagcagccacagccccctgcggaagaagcgcagcgctctctagggcacacaccgactttggacagcagcacccaatattgtgtttggttgagtagaccaatgttatggctgtttcagtggtacccaaggtgtccttctgaaatgcatgccctgtggcaccctctgtatacttcctcctccttcacgtgcacagacatacacacatgtgcacacaccctcatgcatgggtgtcctagttgcgtagagggtcagcccagcgaaaagcaacaaccccaagactgtgaaagactaacatccattctgaaataggagataacaaggctgccatggatctgaacaccaccttccttgagaacagccaggagcccacttggattcaagagtgactttgaacttgttttcacacctccaacagactctcattaagattcagttatttccgctccccagccccacactcctttcagattatcgttcatgggcgtaagtctcttctcagagttaacaagtctttggtagtcatcctctgtccaaatattgtatattattaaaaggcatttttaataattaccagaattagctcaaacctttagggatctttcagccatgattattaaggatatgtatgtgaatttttgggaaacctctcggtgctggatgccagcctacagcagggtccattgctggcaatggatggcccaggaaggtccctagagatcactcacttgaaaaatgagggtcccatgaaagtatttggttgccttctgatgccacttcttctcactttactttttgcttattttcaaaatattataaaatgtcaacatataatttcagaaaggcaggtgggggtaggggagaaatgaatgaataaattctctaggtatttagaaagataagaaactgaagaccgagagactaataaggctgcttacctaattattataatcatttcatttgcctgaatgttttaagcaggaagtagaaatactttggctgcccaaatgtatcttttgttcctcttagaagtaaaataagctacatacaataaaaatttatttcagaaccccatttctagaaaataccaccccagagtcctcatttgatagcatctgtctcctgcagacctcatcattccacagtatttccctgccatgtaaaaatcctgactttgtgcgtatataaaatgtatgcaattaagtctgtttaaatgatatttaagttttaaagactgtattttgttgacacatactttgtgcagtttttatgtatgtatgtattataaaaaaagttaaggttaaaaagatctcatttaatagtgagttcactatttttttttttttgtctctgggttgtaatttaataatcttcaaacaaaatgtttacgaaaaatgccaaagattctaaatcttatcatcccgtgtctgtttttcttcatgttgtatctcactgggttgctttctggctgagccagaattctgcatgatttgatttacttcaagttaatgaagctggctggaaaagagccttgcagaaattataaaagctccagtaaatctcgtagttgtacatacaatagatacccaagaacctcttttgttaaaccagttactcaatcttctgtgtaaacaatgcctcattgtcttgcttctaactatcatctagtttatcatagtctgtcattttgtaacgacctaagtcagacatttttaaacagacatgtgagatctgatcagtcatttgaatgaaaactttcagcagcaaaataaccccttatttatttaaaagtggaaccaatactttattgttgttcttttgctatagaatttcaaaatgaaattatttgcccgacaagaaggcatcattagttagacttgtttcctctgtagcccgattgaaattctcagtgttaagtttaggacccaaacaccagctgggacgtaagagcaggaccgaatcaaccttgaataaactgtatatagaaaacaattgttagttgattaagtagacattggatgtttgttagaaaggaatgttagttgtaagtgacatgttaagatttatacaattgtcaaaaacttttaggaaagattccagaatgcttttgataaaatttatcgattgtggattcacagtgtgataattaagtagggatgttgaagtcttgccaagttttcctggttcccttctcaaactttatcttcccatttctagccctgtctctctatcttacaggcatctacacctcagcaagtcagaaactaaacatcatctgtctctccctgtcttcagaaccccaaccctcataatctccttccagcttccttatttcccttaccaggactggcattttctgggcttggaatttctcggtcatcctctttttttttgttcctcgtgctgttgtcctcgtctcccaacccctaaagcctagtaggtccagtgtcaatgcattaaccacttctgttctgatttccaccacccaagtggaggccttcataacctctcagacgtcacggccatgatgccagttacattatgcctagttaatcttcattcagactggaaggacctgcccccagttgtttctttctgaatagattctactctccttcaacacttccaaagtctcctgccccaaagaggcttagttagtcctgtggctggatgtgactccaacttccttttttgtaccatcacatctttcatatctttctggcatctgccatacatcataagaggctttgaccactgtcctccactgaatagcccattacagctagcacctaatagttactcaggaaataaatacatgtttaacaggccaggtcgtagagattatttttctttctctgccttttcatgtgctgctttcagaacagagggctggattggatagattagtatgatctatcctggagattcatttcttgcattaagagcttattttgtgtgatattatttataatccctgactatgtcaattataaacttttaaattatgtcttatatttgaagttcttacctacatatcagaggaaaatataatgtttatttctaggtggtaaaacaatcttctggattcttttttctttacttgtaaattatcatttaacaagtctatattgaatgccgataattttctggaacaaaacagactacattcccttggtaaagccagacattaaacagatactttcaagcaacagcatgccatgctcagatttaagtttgaaaaatattctagctgcaatggatagcctagcaattttcaaagtttagagaagttattaatattagccctttgtagtactcctgataaatgaataacaccctggactttcaaatagtggcactgggaaaaaagtaagtagaattgagagatggtgaagagataaagtgagcaggacttaacaattgctggactatgggatgagggagcgtagagtcaaggatggctctcagtccctaggtctccaggtctaggaagatggtgttacctttcactaagggagagaactgtaagaactgctgtgagaggaccacaggagtccagttttagcgctgaatctcaggtgactgaaaagcatccaaataggaatgtcagcaaggtaatggaatatatagttctcagagaagtaacacactgtacttgagatgtacacaagttaaaggcaaacattgtatatgaaaagtgatcaaaactacatgcttcaagaaattaaaccttgaagaactcaacagttaatgtcatatatagaaaggcaagtcagttaagagtgtaaatagaaacgggtaaatacagaggagaaaaacagtaagcatggactgtcctagaattcagtggcagagcatactgcaagaaagctgatgtggtcaataatatcaaatgccgctgagatcacataagtacagaatcatgaccttaatggtttgacagtttggaagcaccctggcaacaagccatttcagtggaatggtagaaatggaaaccacgctgggttgagaagtgagtggatgtgaaaatatggggcctctgaatggaggtaacccttgaaaaattccactgtggagaagaaaggagagagagagggctggaatttggaatgaaaggagatatttgggattattttagtaagaaaacagaggtgtcatgacctcagtgtaaccctattagctgcaaaaaattcttcatgggcttgagatggagttagccatattcattattgaaaactatgttctgcacttatacattgttggttggagtgtaaattagttcaaccgctgtggaagacagggtgggtgtttcctcaaaaacctaaagacagaaataccatttgacccagcaatcccataactgggtatgtacccaaaggaatataaattgttctactataaaaacacatgcacacacatgttcactgcaacactatttacaatagcaaagacactggatcagtctaaatgcccatcattgatagaatggataaagaaaatgtggtagaggtacaccatggaatactatgcagccataaaaaagaatgagatcatgtccttttgcaggaacttggatacagctggaggccattatccttagcaaactaatgcagcaacagaaaaccaaataccacatgttctcatttataggtaggagttaaatgatgagaacacatggacatgtagaagggaacaaaatacactgggggctattggagggtgaagggtgaaaggaggaagaggatcaggaaaaataatgagtaccaggcttaatacatgggcgatgaaataatctgtatgacaagcctctctgacacagtttacctatgtaacaaacctgcacagttacccctgaactttaaaaaaaactatgttctatcaaaacctgcctctcatttatgtattaggaatcttgtgacaacggaacagttgaaaaattaaaataaaaattgcctgaaaatgcaaaaaaaaaaaaaaaaaa

SEQ ID NO: 4677 - DNA, 2626 bp, Homo Sapiens
  NM_018358
gcactccgctcctttcctgcgtcaccgctacacatgcgccttgcaaggaagggcgagatttcgggggcagggcggggggcgggcctaggccggggtctcacagcgactgcgcggacgggttcctgagtggaacatggcgacttgcgccgaaatcctgcggagcgagttccccgaaattgacggacaagtcttcgactacgtgaccggcgtcttgcacagcggcagcgcggacttcgagtctgtggatgacctggtggaagctgtaggggaactattgcaagaggtgtccggggacagcaaggatgacgcgggcatcagggccgtgtgccagcgcatgtacaacactctgcgtctggctgagccacaaagccagggaaatagccaggtgctactggacgcccctatccagttgtcaaagataacggagaactacgactgtggaaccaaacttccaggactgctaaagagggaacagtcctcgacagtgaatgcaaagaagttagagaaggccgaggctcgacttaaggcaaagcaggagaagcgctcagagaaggacacgctcaagaccagcaaccctctagtcttagaagaggcatcagccagccaggcaggcagcagaaaggagagtcggttggaatcatctggcaagaacaaatcctatgatgtgcgaattgagaactttgatgtgtcttttggcgatagagtactgctggctggagcggatgtgaacctggcatggggccgccgttacgggctggtggggcggaatgggttggggaagacaacgttactgaagatgctggccacccggagtctgcgggttccagcccacatttccctgctgcacgttgagcaagaggttgctggagatgacactcctgccctgcagagtgtgctggagagtgacagtgtgcgagaggatttgctacggagggagcgggagctcactgcccagattgctgctggcagggcggagggctctgaagctgcagagctggcagaaatctatgccaaactggaggagattgaggctgacaaggcacctgccagggcatcagtcattctcgctgggcttggctttacccctaaaatgcagcagcagcccacccgggagttctcaggtggctggaggatgaggctggccctggcccgggccctctttgctaggccagatcttctgctgttagatgaacctacaaacatgctggatgtcagggccatcctgtggctggagaattacctgcagacgtggccctccaccatcctagtcgtctcccacgaccgcaacttcttgaatgccatcgccacagacatcatccacctgcacagccagcggctagatggttaccggggagactttgagaccttcatcaagagtaagcaggagcggctgctcaaccagcagcgtgaatatgaggcgcagcagcagtatcgccagcacatccaggttttcattgaccggtttcgctacaatgccaacagggcctctcaagtgcagagtaaactcaagatgctggagaagctgcctgagctgaagcctgtggacaaggaatcagaggtcgtaatgaagttccctgatgggtttgagaagttctcgccgccaattctgcagctagatgaggtggatttctactacgatccgaagcacgtcatcttcagtcgcctctctgtgtctgctgatctcgagtctcgcatctgtgtggttggagagaatggggctgggaagtctaccatgctgaagctgcttttgggggacctggcacctgttcggggcatcagacacgctcacaggaatctgaagattggctatttcagccagcaccatgtggagcagctggacctaaacgtcagtgctgtggaactgctggcacgcaagtttcctgggcggcctgaggaggagtaccgtcaccagctgggtcggtatggcatctccggagaactggccatgcgtcctcttgccagcctgtctgggggccagaagagccgagtggcctttgctcagatgactatgccctgccccaacttctacattctggatgaacccacaaaccacctggacatggagaccattgaggctctgggccgtgccctcaacaatttcaggggtggtgtgattctggtgtcccacgatgagcgctttatcaggctggtgtgccgggagttgtgggtatgcgaaggaggcggcgtcacccgtgtggaaggaggatttgaccagtaccgcgccctcctccaggaacagttccgccgcgaaggcttcctctagggccaccaggctgaggactcgcccaggacatggactggtctctcagacccctgggccaccatgtaggccaccactccaggccgtggacttcccccaacttggggacagccttattcccaaatgtctctatccttttgactggagcatcttctgcacaaccttgggagcccatccaagggttggtgaggactggtctcccgggggtgggggtctggggggtaccctctggggttatagattcccccactgccccagctctgactggaccccaagtggctgctatgtaaattaaatctctccccgcgtctcaaaaaaaaaaaaaaaaaaaaaaaaaaaaaaaaaaaaaaaaaaaaaaaaaaaaaa

SEQ ID NO: 4678 - DNA, 2379 bp, Homo Sapiens
  NM_018359
agttgtagttggtccgcccgggccccgcccctgggccgtgcggtgacgccacttcagggccggcccccggaacttttgggcaggcgtcagcgcccgtgtcaccgccacgtcgcggacatggtgatttcagaaagtatggatatactcttcagaataagaggaggccttgatttggcttttcagctagctactcctaatgaaatttttctcaagaaggcactgaaacatgtgttgagtgacctgtcaactaagctgtcttcaaacgcccttgtgttcagaatttgccacagttcagtgtatatatggcctagcagtgacataaacaccattcctggagaactgactgatgcttctgcttgtaagaacatactgcgctttattcaatttgagccagaagaagatataaaaagaaaattcatgagaaagaaggacaaaaagttatcagacatgcatcaaatagtaaatatagatcttatgctggaaatgtcaacctccctggcagctgtaacgcccatcattgaaagggaaagcggaggacaccattatgttaatatgactttacctgtcgatgcagttatatctgttgctccagaagaaacatggggaaaagttcgtaaactcctggttgatgcaattcataatcaactaactgacatggaaaaatgtattttgaaatatatgaaaggaacatctattgtggtccctgaaccactgcactttttattaccagggaaaaaaaatcttgtaacaatttcatatccttcaggaataccagatggccagctgcaggcctataggaaggagttacatgatcttttcaatctgcctcacgacagaccctatttcaaaaggtctaatgcttatcactttccagatgagccatacaaagatggttacattagaaatccacatacttaccttaatccacctaacatggagactggtatgatttatgtggtccagggcatatatggctatcatcattatatgcaggatcgcatagatgacaatggctggggctgtgcttatcgatctctgcagactatctgctcttggttcaaacatcagggatacacagagaggtccattccaacacacagagaaattcagcaggctctagtcgatgccggggacaaaccagcaacatttgtcggatcgcggcaatggattggatctattgaggtgcagctggtactaaaccaattgatcggtataacgtcaaaaatcctgtttgtcagccaaggttcagaaattgcctctcaaggacgggaactggctaatcatttccaaagtgaaggaactccagttatgatcgggggaggagttttggcccacacaatactaggagttgcatggaatgagattacagggcagataaagtttctgattctagatccacattataccggtgctgaagacctgcaagttattttggaaaagggctggtgcggatggaagggcccagatttttggaacaaggatgcatactataacttatgtcttcctcagcgaccaaatatgatttaaaatatcttggagtcaaagactgcagtagagtggtattataaatttgtgaataaagaatcagtttaatttttcacattaaatcctggttctagtttgacgatttaaattatgacctttttcaaaggttgtaaatactgcacggagaatgtattttttagacgttcctttaataacttaaaagacaaagcatacacaaccagcatattataggcatgtaaatacatgtgttcttaaatggatcttcacttggaagaaagtttttcgtccttctcagaaggagattagacacaacatatggtaaagccaaaagcaggagcttatagatttgcatgaaatgaaggcgttcttcagacttcttcataacccacgtgacatctgtttttaaaaacacgttaacattaaaaacttttttttaaaaagagttttatccccaaacttccaccatgcagtcccatttttggtctctagactctggtaagtataaccagtactaaaatgttaatgagaatgaaacaatactactagaaatacgagtgtcagtattaaatggaataataaatgctatgcaaacaagagatcactgcgggaggaaaaaagcagcagctctgagttacttaccagcacttccttttcccactggtattttctacacttccgagactccgtttctgtctgagcacggcaacacaatcattcctgtcagggtgttcacttgcttttattgtctgcatacatttaattgttgtaagaaacttggcacagtctggaaatccacatgaccaagcgagatcttcagctgtttgcccgttcttattacataaactgaaaacaggataaaaacggagtgaaatg

SEQ ID NO: 4679 - DNA, 5535 bp, Homo Sapiens
  NM_018361
cggagccccctgccccggcagggggatgtggcgatgggtgagggtcatggggtgtgagcatccctgagccatcgatccgggagggccgcgggttcccttgctttgccgccgggagcggcgcacgcagccccgcactcgcctacccggccccgggcggcggcgcggcccatgcggctgggggcggaggctgggagcgggtggcgggcgcggcggcccgggcccgggcggtgattggccgcctgctggccgcgactgaggcccgggaggcgggcggggagcgcaggcggagctcgctgccgccgagctgagaagatgctgctgtccctggtgctccacacgtactccatgcgctacctgctgcccagcgtcgtgctcctgggcacggcgcccacctacgtgttggcctggggggtctggcggctgctctccgccttcctgcccgcccgcttctaccaagcgctggacgaccggctctactgcgtctaccagagcatggtgctcttcttcttcgagaattacaccggggtccagatattgctatatggagatttgccaaaaaataaagaaaatataatatatttagcaaatcatcaaagcacagttgactggattgttgctgacatcttggccatcaggcagaatgcgctaggacatgtgcgctacgtgctgaaagaagggttaaaatggctgccattgtatgggtgttactttgctcagcatggaggaatctatgtaaagcgcagtgccaaatttaacgagaaagagatgcgaaacaagttgcagagctacgtggacgcaggaactccaatgtatcttgtgatttttccagaaggtacaaggtataatccagagcaaacaaaagtcctttcagctagtcaggcatttgctgcccaacgtggccttgcagtattaaaacatgtgctaacaccacgaataaaggcaactcacgttgcttttgattgcatgaagaattatttagatgcaatttatgatgttacggtggtttatgaagggaaagacgatggagggcagcgaagagagtcaccgaccatgacggaatttctctgcaaagaatgtccaaaaattcatattcacattgatcgtatcgacaaaaaagatgtcccagaagaacaagaacatatgagaagatggctgcatgaacgtttcgaaatcaaagataagatgcttatagaattttatgagtcaccagatccagaaagaagaaaaagatttcctgggaaaagtgttaattccaaattaagtatcaagaagactttaccatcaatgttgatcttaagtggtttgactgcaggcatgcttatgaccgatgctggaaggaagctgtatgtgaacacctggatatatggaaccctacttggctgcctgtgggttactattaaagcatagacaagtagctgtctccagacagtgggatgtgctacattgtctatttttggcggctgcacatgacatcaaattgtttcctgaatttattaaggagtgtaaataaagccttgttgattgaagattggataatagaatttgtgacgaaagctgatatgcaatggtcttgggcaaacatacctggttgtacaactttagcatcggggctgctggaagggtaaaagctaaatggagtttctcctgctctgtccatttcctatgaactaatgacaacttgagaaggctgggaggattgtgtattttgcaagtcagatggctgcatttttgagcattaatttgcagcgtatttcactttttctgttattttcaatttattacaacttgacagctccaagctcttattactaaagtatttagtatcttgcagctagttaatatttcatcttttgcttatttctacaagtcagtgaaataaattgtatttaggaagtgtcaggatgttcaaaggaaagggtaaaaagtgttcatggggaaaaagctctgtttagcacatgattttattgtattgcgttattagctgattttactcattttatatttgcaaaataaatttctaatatttattgaaattgcttaatttgcacaccctgtacacacagaaaatggtataaaatatgagaacgaagtttaaaattgtgactctgattcattatagcagaactttaaatttcccagctttttgaagatttaagctacgctattagtacttccctttgtctgtgccataagtgcttgaaaacgttaaggttttctgttttgttttgtttttttaatatcaaaagagtcggtgtgaaccttggttggaccccaagttcacaagatttttaaggtgatgagagcctgcagacattctgcctagatttactagcgtgtgccttttgcctgcttctctttgatttcacagaatattcattcagaagtcgcgtttctgtagtgtggtggattcccactgggctctggtccttcccttggatcccgtcagtggtgctgctcagcggcttgcacgcagacttgctaggaagaaatgcagagccagcctgtgctgcccactttcagagttgaactctttaagcccttgtgagtgggcttcaccagctactgcagaggcattttgcatttgtctgtgtcaagaagttcaccttctcaagccagtgaaatacagacttaatttgtcatgactgaacgaatttgtttatttcccattaggtttagtggagctacacattaatatgtatcgccttagagcaagagctgtgttccaggaaccagatcacgatttttagccatggaacaatatatcccatgggagaagacctttcagtgtgaactgttctatttttgtgttataatttaaacttcgatttcctcatagtcctttaagttgacatttctgcttactgctactggatttttgctgcagaaatatatcagtggcccacattaaacataccagttggatcatgataagcaaaatgaaagaaataatgattaagggaaaattaagtgactgtgttacactgcttctcccatgccagagaataaactctttcaagcatcatctttgaagagtcgtgtggtgtgaattggtttgtgtacattagaatgtatgcacacatccatggacactcaggatatagttggcctaataatcggggcatgggtaaaacttatgaaaatttcctcatgctgaattgtaattttctcttacctgtaaagtaaaatttagatcaattccatgtctttgttaagtacagggatttaatatattttgaatataatgggtatgttctaaatttgaactttgagaggcaatactgttggaattatgtggattctaactcattttaacaaggtagcctgacctgcataagatcacttgaatgttaggtttcatagaactatactaatcttctcacaaaaggtctataaaatacagtcgttgaaaaaaattttgtatcaaaatgtttggaaaattagaagcttctccttaacctgtattgatactgacttgaattattttctaaaattaagagccgtatacctacctgtaagtcttttcacatatcatttaaacttttgtttgtattattactgatttacagcttagttattaatttttctttataagaatgccgtcgatgtgcatgcttttatgtttttcagaaaagggtgtgtttggatgaaagtaaaaaaaaaaataaaatctttcactgtctctaatggctgtgctgtttaacattttttgaccctaaaattcaccaacagtctcccagtacataaaataggcttaatgactggccctgcattcttcacaatatttttccctaagctttgagcaaagttttaaaaaaatacactaaaataatcaaaactgttaagcagtatattagtttggttatataaattcatctgcaatttataagatgcatggccgatgttaatttgcttggcaattctgtaatcattaagtgatctcagtgaaacatgtcaaatgccttaaattaactaagttggtgaataaaagtgccgatctggctaactcttacaccatacatactgatagtttttcatatgtttcatttccatgtgatttttaaaatttagagtggcaacaattttgcttaatatgggttacataagctttattttttcctttgttcataattatattctttgaataggtctgtgtcaatcaagtgatctaactagactgatcatagatagaaggaaataaggccaagttcaagaccagcctgggcaacatatcgagaacctgtctacaaaaaaattaaaaaaaattagccaggcatggtggcgtacactgagtagtttgtcccagctactcgggagggtgaggtgggaggatcgcttcagcccaggaggttgagattgcagtgagccatggacataccactgcactacagcctaggtaacagcacgagaccccaactcttagaaaatgaaaaggaaatatagaaatataaaatttgcttattatagacacacagtaactcccagatatgtaccacaaaaaatgtgaaaagagagagaaatgtctaccaaagcagtattttgtgtgtataattgcaagcgcatagtaaaataattttaaccttaatttgtttttagtagtgtttagattgaagattgagtgaaatattttcttggcagatattccgtatctggtggaaagctacaatgcaatgtcgttgtagttttgcatggcttgctttataaacaagattttttctccctccttttgggccagttttcattacgagtaactcacactttttgattaaagaacttgaaattacgttatcacttagtataattgacattatatagagactatgtaacatgcaatcattagaatcaaaattagtactttggtcaaaatatttacaacattcacatacttgtcaaatattcatgtaattaactgaatttaaaaccttcaactattatgaagtgctcgtctgtacaatcgctaatttactcagtttagagtagctacaactcttcgatactatcatcaatatttgacatcttttccaatttgtgtatgaaaagtaaatctattcctgtagcaactggggagtcatatatgaggtcaaagacatataccttgttattataatatgtatactataataatagctggttatcctgagcaggggaaaaggttatttttaggaaaaccacttcaaatagaaagctgaagtacttctaatatactgagggaagtataatatgtggaacaaactctcaacaaaatgtttattgatgttgatgaaacagatcagtttttccatccggattattattggttcatgattttatatgtgaatatgtaagatatgttctgcaattttataaatgttcatgtctttttttaaaaaaggtgctattgaaattctgtgtctccagcaggcaagaatacttgactaactctttttgtctctttatggtattttcagaataaagtctgacttgtgtttttgagattattggtgcctcattaattcagcaataaaggaaaatatgcatctcaaaaaaaaaaaaaaaaaa

SEQ ID NO: 4680 - DNA, 6604 bp, Homo Sapiens
  NM_018364
gcctgcggagaaaagctgggaacggccgcttccggcatgttcatctctggacgaagaacggccgacaagtggagggcggaggagagactccaatgcccagcgggcagtgcgcgggcggcgcttgcgcgatgcgcggacgggggggcggtcgggccatttaaatgtgtgtttgtgggtgaaatggctgcgcaggtcggagcggtgcgcgtagtacgggcggtggcggcgcaggaggagccggacaaagaggggaaggagaaacctcatgctggggtctccccgcggggagttaaacggcagcgccgatctagcagtggggggtctcaggagaagcgggggcggccgagccaggagccccctctcgctccccctcaccggcggcgtcgcagccgccaacatcctgggccgctgccgccaacgaatgcagccccaactgtcccaggccctgttgagcctcttctcctgccgcctccgccgccaccttcgctggcacccgccgggcccgctgtcgctgcccctctcccggccccaagcacctcggccctcttcaccttctcgcctctgacggtgagcgcggccgggcccaagcataagggccacaaggagcggcacaagcaccatcaccaccgcggccccgatggtgatcccagctcctgcggaaccgatctcaagcacaaggacaagcaggaaaacggcgagaggactggaggggtgcctctgatcaaagcccccaagagagaaacaccagatgaaaatggtaaaacccagagagccgatgattttgtcttgaagaaaataaagaagaaaaagaaaaagaaacaccgagaagacatgcgaggaagacgccttaaaatgtacaataaggaagtacaaaccgtctgtgctggcctgacccgcatcagtaaagaaattctcacccaaggacaaataaatagcacttcaggacttaataaggagtccttcaggtatctgaaagatgaacagctgtgccgattaaatttgggtatgcaagaatatcgggtaccccagggagtacaaacaccttttatgactcaccaggaacattctattcgtagaaatttcttaaaaacaggtactaaatttagcaactttattcatgaggaacaccagtccaatggtggtgctcttgtccttcatgcttacatggatgaactctcatttttgtctccaatggagatggagagattttctgaggagtttcttgctttgacattcagtgaaaatgagaaaaatgctgcttactatgctttagcaatagtgcatggagcggctgcttatctcccagacttcttggactactttgcttttaatttccccaacactccagtgaaaatggaaattctgggcaagaaagatattgaaacaaccaccatttcaaattttcacactcaggtcaacaggacatactgctgtggcacctaccgagcaggtcctatgcggcagataagtctcgttggagcagtagatgaagaagttggtgattatttcccagagttccttgatatgttagaagaatcaccatttctgaaaatgactttgccctggggtacactttctagcctccgactccagtgtaggtcccagagtgatgatgggcctataatgtgggtaaggccaggagaacagatgatccctacagcagatatgccaaagtcacccttcaaaagacgacgatcaatgaatgaaataaaaaatctccagtacctacctcggaccagtgaaccccgcgaagttctctttgaagataggactagagctcatgctgatcatgtcggtcaggggtttgactggcagagtacggctgctgttggagttttgaaagctgtacaatttggtgaatggagtgaccaacctcgcataaccaaagatgtgatttgttttcatgctgaggattttactgatgttgtacaaagacttcagttagatcttcatgaacctccagtttcccagtgcgtacagtgggtagatgaagctaaactaaaccaaatgaggcgggaaggcattcgttatgctagaattcagctttgcgacaatgatatctacttcatccctagaaatgtcattcatcagttcaaaacagtttcggcggtgtgcagcttagcctggcatataaggcttaaacagtaccaccctgttgtggaagccactcaaaacacagaaagcaattctaacatggactgtggtttaactggaaagcgagaattagaagttgactcccaatgtgtgaggataaaaactgaatctgaagaagcatgcacagagattcagctgttaacaactgcttcatcatctttcccacctgcatcagaacttaatctacagcaagatcagaagactcagcctattccagttttaaaagtggaaagtagactggactctgaccagcaacacaatctgcaagaacattcaaccacttctgtgtgatatgtacatattcaaacacattttttaacttttttaaattttgatgtgaagttatagttttataactggcttaagttaagttttattggagaaatcttgcctataattctataaagagaaatgacattccacaaatgtcaagcatatcttttttacacagattatgcaaagttaagagttgtatcttatcccgttagtacagtatgtaatagtgggtctgctgctactttctgttttaaggtgtgaggtaacaattcaatctcttcttcaaatcaaaatgagaattctctggaataacagattcttgtttggtaaattattcacttcccttaattttatcttgccttgtctcttgccatatttgctgtttttatggataaataagatttatggtttagtacttgtgtctttatggcacaggttcaatttctacagtgaaaatggcataggttgcaggaaagaatttctgcatctggtacatgggcaagtaagttatttagttctaaccacaaataacaagtagtttccaaggaaatttcagtggctctctggtttcttaacaaaagagaaagcacagcactttctgatccaaactgtcttttttttgtatctgttatttaaagcccagtggatatttcaattaaaaaaaaaatctaaagatgaatagtccttggtcattcattatccatggctcattaatctcttctagaatatatgctaactgttgaagatattttgggtaaaagagataatgttgacatgatactctattgttctgcttcctggcatcctcacattttgtggggataattttgcttcctaaactgatcacaactattaaacttagagaataataatagtctttctgatgaggctgccatattttgagcatcaatcttatgataaactattcttgtcacttggcatcaacctcttcatgataaatatctactactgagacacttcaattcacagttttaactggtgaatacctgggtttatttactattactctgtgttgctattttctaagaaagaatacagcactagacttcatcctagagtttcaggtaggctaatgcttagtgcctgagtatttaaattttcttttcaaacaggcacagttcacattgctagtatggtcctaactttctgttattttagaatgttaacatgattcacattatactttctcttagttaataatacagtaggccttttgtttattaatggaagagtactccccacacctaagaccagattcttatatctccctggttacagtgcaatttggagattttttttttttcctggatggtaagatttgaaatatttacattaacataggcaaaaaaaaaaaaaaatacaagatgctgctttattatgtctgtcaccatgaaaacttagctgcatcttttgaaatatcaaatatgaattttctctaaaatattctgaaataggttaaatcttatataaatattactttgtgcaatattgttgtgtagttaaatgcatattagcaaagtatagaggtcactgtgtaaaccgatagaaaagtaaccatcagcaaatactgcagtgattagttagaatctgtattattccttatatatatgtatatgtatgtattctctgttacaaaggatgaagacaaatagggatacatttcaatgtaaaccatttatgaattggaagtgatgttggctttagttatctttgtaaataaggtaattagaatggtatgaaaggtaatgtgattattgcaggggtgtttttaaatcttgggtataaattctagggtaaattccagtttatccagactagtttttaacgggacctgcctttgagggtgttttttgttattttgttggggaggggtttaatcacaaagtgtgtgggtttgggttatttcttgtttttatttttctgtccagaagagctttaccaggctgtgcaaagtaaaattcttctcaggcaacatttgcttttaaaaataatcatgaagagaaggctgttaaagcaaaaattttttttttttaattttttcttgtcttccaagatccgatttccccatctcccacttgccatccagcagatgccatctgtcatccaagctggtcattgctaataaacaaggagtctgtctcctgacggccagcactgtgtattatcactcaggaaccagcggatctgcaaagacctacaatcaaaagcaaatccccattttccttttataaaacattctaccctcacctccaatataaacacattaaaagagtacaataaaaatgtttaaaatcatgtactaataaattcattgtatgttagaattgcaatagaatgaagagaaacatttagctagtaacgtgatctgaaaactgaatgtcctatgtgagtattagattttaatagcatgctttaaagactgatgagtataaaagcagaagttttgcgttttttactgctttcaaagctgtatcctagtttagtgatacaaatgattgcaatttttctaaatcattaaattatttggtttggtggagtgaggcatggagcaatctggcgtcttctgatttgttaaagtagtgatggcagtgaagttgtaactgaaatttaagctgatcttcctttttggtatattatccgttgtgccagctcttgagattacttgcacaatgtggctataagttttaatattttgtggagcagagggatggtttttaaatgtgcttatggaaaggacccaataaatgaatattcctaacttagtaaagtagaataatttcatggtattcattaaaaagcataaaagtcttcctcttgccccagaagtaattctctataccaagatatgctaggagtaggatgatgattcaaagtggtaacccaaattcataaagcaataataataaaaacctatatagtatgttctctcctccaaagttttaactctaaaaattggttcctaggtttaattgtacctttaatttgcttattcagtacttagaatttgtttaactggtacttttattattttttagtgaaagacttttgaaaagtgccctttccccttaagagacagttggaataccagttgactaatattacaagctcttgtagggggaaaaaggagcttattaaagttgtttactaaactttaggaaaagatgtcttgcatcagtcttactaggcataaaagtcacacttaatgactggaaaaaacttgcttattgcctttccctatataaatattaattgtctagaatgaaagctaatataggaacaagactcccaaatccatgaaaacgcttagtgaatatattcttaatcattaataaattagcccattatattttcatctgtatttgccataaaaaatttatttgcatttatgcctttaggataattttgtatctttctaatctgttttatcattgctacaggtttttaaaaaagaacctttcactagctagcacatgccagaggttcacatctgttttgtttttcaaacaggtcgtagctgtatttattggccatgcaagtagaggaaatgcacagtacaaatgtttttctttagcacgtaagggacctatccttgtcttgaaagtttgttgctttaaaagcaagtatctctccataaatattatggccttccattttcttcatacattttttaggatccacttgtgcatgtagttgagaccactgtctcttaaaatatagcacttttcaattctctctaaagaaatacttatgtactactatcacatgttgtaaattttcatgtaatagtgttttctgtgagtaaactccattttgattggcagctaagactttttttcctgtggcttttatttatctaagaggtctttgcatatagatgaaatgtatatttgcctggcggactatttgcgttgtgtggccttagtttgtttattgacattaacgagtgttttaaaaaggtttttaatgaatagtcttaaatctaaatttgtgtgaataatccttttaacacagtgcttttttgtagctgtctaagtgtgttaaattgttaagctatttctttgtaaaataggacaatggaatgcatagtttttttttttcctgtaaagtatttttttaataaaaaaagtctgatttgtcctttaaaaaaaaaaaa

SEQ ID NO: 4681 - DNA, 1546 bp, Homo Sapiens
  NM_018366
aaaggcgtgagcgcgcgtgcgtgcgtgtgcgggtgcgtgagcgtgagcgcgcggaggccggaagcgagcgctgcgcagtcgggtggtcgcgggccatggagggtagcttttcggatggcggagcgctgccggaggggctcgcggaagaggccgagccgcagggcgccgcctggagcggggacagtggcactgtttcccagagccacagcagcgcctcggggccgtgggaggacgagggcgcggaggacggcgcgccgggccgcgacctgccgctgcttcgccgcgccgctgcgggctacgccgcctgcctgctgcccggggccggggcgcggcccgaggtcgaggccctggacgcgagcctagaggacctgcttaccagagtggacgagttcgtgggcatgctggacatgcttcgcggcgactcgtcccacgtcgtcagcgagggcgtgccgcgcatccacgcgaaggccgccgagatgcggcgcatctacagcaggatcgaccggctggaggccttcgtgaggatggtggggggccgcgtggccaggatggaggagcaggtcaccaaggccgaggccgagctgggcaccttccccagggcgttcaagaagctcctgcacacgatgaacgtgccctcgctctttagcaagtctgctccctcgaggccacagcaagccggctacgaagcccccgtcctgtttcggaccgaagactacttcccttgttgcagtgaaaggcctcagctctgacggcctgaccactgcggcaagaggaccccagctggggtgcttacctccagtatgaagtgaattgcaaatcctgcttatggacatatatgatgttggagtgtgggattttaaagtttactttctacaaactctccgtagtatattcatgattcagtgtagaatgtatagactttatgtcttccaagtttaaaaaaagagacagggtcttggtatgttgcccagactgttcggaaactcctgggctcaagtgatccttccacctcagcctccccagtagctgggactacggggtcgccactgcacccagcctgtgtcttccagctctaatcagaaagctgcttgtcgagggcatggggaatcaaactgaatgaacttttctctgcactgtggcaaaactgttatttttatggattttactaaatggcgttaccttttcaagatttatatgtttgtataatcataagaaaattgagccattaaagccttgttattcaatcctaatagtcagttttctagaacctacttttagggtaaatggtacattatttaatattatattaaacctcctatagcgtggattgtagaccaaaggaaatggtacaatttctgagaatatatgttgattttttgtgactaattccaaagttgtatttgaaagtatgacctcacagtcttcatttgtccatagcaaacatatgtgtgtgtgtgtgtatatatatatgtgggttgccaatgtttggtttataatttaaatgttaatagaaattttgagttttattggaaatgatttccttctg

SEQ ID NO: 4682 - DNA, 4387 bp, Homo Sapiens
  NM_018367
gggcggggcgcgagcgagcgcgcgggctgggccggagccggcctggtcgccagcctaacccggcacagtgagcggagcgcctgggcggcggcggcggcggcgtgatggctccggccgcggaccgagagggctactggggccccacgacctccacgctggactggtgcgaggagaactactccgtgacctggtacatcgccgagttctggaatacagtgagtaacctgatcatgattatacctccaatgttcggtgcagttcagagtgttagagacggtctggaaaagcggtacattgcttcttatttagcactcacagtggtaggaatgggatcctggtgcttccacatgactctgaaatatgaaatgcagctattggatgaactcccaatgatatacagctgttgcatatttgtgtactgcatgtttgaatgtttcaagatcaagaactcagtaaactaccatctgctttttaccttagttctattcagtttaatagtaaccacagtttaccttaaggtaaaagagccgatattccatcaggtcatgtatggaatgttggtctttacattagtacttcgatctatttatattgttacatgggtttatccatggcttagaggactgggttatacatcattgggtatatttttattgggatttttattttggaatatagataacatattttgtgagtcactgaggaactttcgaaagaaggtaccacctatcataggtattaccacacaatttcatgcatggtggcatattttaactggccttggttcctatcttcacatccttttcagtttgtatacaagaacactttacctgagatataggccaaaagtgaagtttctctttggaatctggccagtgatcctgtttgagcctctcaggaagcattgatgaatcattccaccaagaaaacaaacaagcacctaccatagacctggcagaataaataaggaaatccttaaagatctacaagttcaaatatgtcatgaccatcacagcagaggagtgactttctgactaatgctgccacccacacagagaataaggagtagggcctgctgggtgtttagctcatggctttatcttatttgtccccctcctcctttcacgctccagtttataaagaaacagagatgatgtgtgtgtatgcctcaaatgcagaaacagttgggcttttcttaacaggttaacagtttgtgctggttataagaaattaaccttcttttctttttgccaagggttgcatgtgaattatacctttcttaatatttgattaaataatgcagtcagctaagagccaacaaaaccccatatccagatagttagctgtgagccagcactcagctgtgtcagatttgattaatattgtattaatctcatggatggttctcaaaggtaaaaaaagagagagaaagagagagagctagctgtgggattctgtgtagttcttcactatctgttccagggctagtcggaggatcataagcaagctcagacctgcccccagttcagtacttgaccacatcccaggatttatggtgtctgtctatggccacagccaaccagaatgagtgggtcatcttataacctttctgaagctccatgaggacatgtatagaatgctgcaccttcagccagctctgctctgatctttgcagatctttaagttgtcactgtttctacggctagacaaatatgactggtggtctagactacccatagttcatcctcctcacataacttatttgaagttgtcagggaatgtcattacactctgatttttaaaattatgcagtattttccagttctcagagaggtcatggttgtgcccagggaagtgtgttgcattaactaaagctaaaattatcagaatcctatttacataaagcatattaaaatatctgctccttaattttctgaaggaaatagatgtaagtttctgctacttgaaacctacagaaccgacaaaaattagggtgctaaaaaaatgacagtgaaatctcatcgtaaggcagctagttctaatttgcatttgaatgtataacaaattgcatcacttttcacaaacttaacacctgcctggagtaaaaatctgatttgacccctctgctcatgtttcatcatatttgtagctctgcatcatttagcatttttatgactttttttgctttatataaattattgtaaaatccagattgtttttaccacatgatgacgtgactcaggattaaatcctgagctacagtttcaaaaggaaaatcatttttttcttatgcaaagatggtaaaacactgttgtcattttttccagtattcaataagtagcctttgtacaaatttaaaaccaaaaactattctgttgtttttcttcacctactagccttagtttttaaccaagtatccaaggatgtcaacttgacatccttcccttagcatgccaacaagccattagactgattcttccacctatttttatgaacctccaggaagaaaaacacttgccaaaacattaagagaactttgattctgccttaagagggtataaaactaaaccatttgaaggcacagcccataagactatacttgattttgccccaagattctgacttctggctacatttcacctgcagttacctgggctatcggccgtgatacattttttaattcatttgttttccaccattatatttttatacttttcagttagatatacttctgcataaagagtatatatacagtgtaggataaaggcatatcgtacatggcaatgctgttaaacatggtaagactgaggttctgcaggattaaagtcagattaagggtacagaaagcacaccttgatactgaggccatttagagcaatttgtttaatgagtggttcagccatcaccaccagtggccacctgttcaataaaattgcctagcaccacagtggagagtcatctacaccccaaggtgagctgtaagactggccaattctttgaagacctttttttctgttgggagaatggaaagcagaaagggaagccaggctctttaatgttccaagtcagctgtgcctcacacaaggctctctttttagctactaagtaacatactcaagactttgtatctgtgcagcattttatggaaatcactggtgacctataggatattactaaattatttcaatagctttatttttttcctacttggattctaggtggacattacagagttgaattcctcactaccccctcccgctgtcatttgttttattggaaaacttcatgttaactagagtgtacaaaaagtctgtttcctgctgagccaatagtgatttgtttgcatatcacctaatgtgaaaagtgctcatctgtgaactctacagcaaattatattttagaaaatactttgtgaggccgggcatggtggcagagcgagactccgtctcaaaaaaaaaaaaaaaaaaaaaaaagaaaagaaaagaaaatataaggatgtaaaagaagcaatttgcttgcacatctgaatatccttcttgtgcctccattttcactcttgaaaactgaaagcaatttgacttttatttttgtttttctaaagaacagctaggtgaaaggaggttaagctgattgtcactctgcctgcccactacctactccccaccatggtgtttcatgaaacatccccaccacctgaagtgatctttttaatccttgtgatagtaaatgcattgataattaacaggaaaaacatgtttttaaataatctacaaatgagaacccaaatagtagtgttttgtttgacagaagtaaatcaaatattatggtttaaatataatgcaaaatttcaggacagttaatttggacttcccttaccctaagagggtttttcttataataaggagaagaggtgtggttcaaagaaaattaagagacaaaaccttcaggtacataatgcatgaaaatctttaaatgcctgcaaaaattaagttctgttataataccagccaattctgaattagccaatgccctaaaagcatctaacaatttaaggttatcttatgagtcctatgaaaacaattatttgttgctaaatttgagttttagctaccaacgccatgtttacgtgacaagaaattgttttggccctgtggtttatgacgtgctgctggataagcatttatgtaaaactgagtatttcaaagagaaccatttacaattggaatttccacctgtgtggctgtttgcagacctacctctgtcttccattttgcatcctgtcagtgctataattagtttgatcactttgtcttgtttttcagtgtctacaattatagcttattcactatgttctaactatttaaaaataatgggccgggcgcggtgg

SEQ ID NO: 4683 - DNA, 3553 bp, Homo Sapiens
  NM_018370
gagccagcgcggtagggccagagtgggaaggccagagcgggcgtccccgccagtgaccccacgccgcccgtccgcgcccaacccggcctccgccgagtgtccaaaccaaaagcgaaaggaacccgaccccgcgtcccctccggcggctccgtagtcgcgtccgcttggagctcgccgggcgcctccgaccctgccgggccgctttgtgacttcactcgtttcgcaacaagcccgggcagcccgcgccccacccactctggcccggcagcctcgccgcccgcagcctcgctccgctcctcgcgcttcccctccctccggggctgggcctgccccggccgtcgcggagcctcccctcccaccgtccgtgagtgtacgcgcccggccgccgcctccaggcagcccggagcaacccggcgcccggccccgctgggcgcagcactccgtcggcggcggcggcggcgcgatgctgtgcttcctgaggggaatggctttcgtccccttcctcttggtgacctggtcgtcagccgccttcattatctcctacgtggtcgccgtgctctccgggcacgtcaaccccttcctcccgtatatcagtgatacgggaacaacacctccagagagtggtatttttggatttatgataaacttctctgcatttcttggtgcagccacgatgtatacaagatacaaaatagtacagaagcaaaatcaaacctgctatttcagcactcctgtttttaacttggtgtctttagtgcttggattggtgggatgtttcggaatgggcattgtcgccaattttcaggagttagctgtgccagtggttcatgacgggggcgctcttttggcctttgtctgtggtgtcgtgtacacgctcctacagtccatcatctcttacaaatcatgtccccagtggaacagtctctcgacatgccacatacggatggtcatctctgccgtttcttgcgcagctgtcatccccatgattgtctgtgcttcactaatttccataaccaagctggagtggaatccaagagaaaaggattatgtatatcacgtagtgagtgcgatctgtgaatggacagtggcctttggttttattttctacttcctaactttcatccaagatttccagagtgtcaccctaaggatatccacagaaatcaatggtgatatttgaagaaagaagaattcagtctcactcagtgaatgtcgcaggccatttctaaaagtgctacagaggacagacagggttttgaggccaccctgattattgggatgcatctgcagcacatccaggacttgaatttcattacgagttcctaatagttgtatttctaaagatgtgtttcctagagaatgtacagccttatgacactgtagtgatgtttttataattttctaagtagatttttttatattaacaaattcatatacagaaaaaataaggtgttacaaaaaatggagagctcttatttttgtacagattctgtcgtttttgttttatttgtgtgagatttatggaaatacactaaatgagtaattcaggttcagtacatttattacaaagtgaaatcaggggatattcatttgtaaattttattcttagtgaatgaactgtataattttttttatcaggagagcacttataaaattcaatttataaagatcatatacccaaatcataaagatttagttgatacattaacactaagatactctgatttttagccgaactaaacaaagtgcttctactgagaggcctttataccaccatgtacagtaactctaagtgaatacggaagaccttggttttgaaattctgccaccttgtttctccctgctcatgaggtcgcaccttttgctcttgctgctaattgcccattcgtagtgggtgtaatgccaggtggaatggtttcaacaagtcaggtgaaaaccatcctttattgttgctggcacaacttgatatatagtctgactcagaactgaagctcacatctcaaattcatttcatgccagtaaatgtggcaaagagaagaaaggcccaagagcgagacaagaagaatggagaagggggcagccaagaagaacttctgggttcagggtactgtttatttgctccttctcttcatgcctgtggctggatgtcccacaacactataagaaatataagtcaagccctttgtgttaagcaagaactacagactccatcttttcacccaaatcatgaatgaccaataaaaagcaagttattccagaggaagaagcagcccttgaaatgttaaggcttaggcttgaaaggtgaagagcaggaattctctctttcaaatcctagagcataaacccatgtgtggccaagtgagatcagccctcaagggcacatgccaagggcagagcagcccatgtagacagcttcggagggcatgggggtgtagggagttcggggtagctcctcattaactatttgttgggtgagtaaaggggtgaggctcagtggcaggtacctctgcaatgacaagctgcctcccctctatgtgtttagcatatgttattagaacatgtccgacacccctaccgctgccatttgggccctttaataaagccaagtagagaaatctggcaataaaaggcaaatgtaagcatgctttctttaagacgcatcataaatggttttctttaagtgaatggaagagtttgacagagatacacctttgtaagaaaacattaagaatgctggctggctgtggtggctcacacctgtattcccagcactttgggaggcctaggcaggaggattgcttgagcctgggacttcgagaccagactgggaaacatggcaaaatcccatctctacaacaaaaatacaaaaattagccaagtgcggtggtgtgcctgtagtcctagttacttgggaggctgaggtgggagaatcacctgagcccaggaggtggaggctgcagtgagccatgccaatgcactccagtctgggcaacagagtgagaccctgtctcaaaaataaataaataaataaatgaataaagagaatgctaatcatttctgggttcactgcgactcactgtagtgctggggatcccccttgtaacactggaactgaaagacagtgatgaaagctatgtcaagcattcattattctgaagaggaggagaaatgccacatacctttcccatgggacctgtggtggaatgaatccatacttctgcctcacttcgagcagacttttgttctcggcgctcctcacgatggagtttcatgcttcattttcacatctctctgcacaattagattgggagctccttgagggcagagtacgtgccttaatctttatctttgtaatgccacaatgaacagagtgcctcctggtacactgtaggagcttaagaaatactcactgaatgcatgaatgaatgaatgaacaaatgaaggaatgactaaggatgtttgtagtgctataatatagaatgggatttactctgctttaccagttagtttcataataaacaaatagtctgtatcgcctggtaaaaaaaaaaaa

SEQ ID NO: 4684 - DNA, 7074 bp, Homo Sapiens
  NM_018373
cttttccgggtctcgaggctgctgaaaccgaaaccgctgtgctgtgggcgcagcgccgagattgattcaccttcacctgtgctgcactccagctgacccaagtaggaagccagacgagctgtaaaacatgaacggaagagtggattatttggtcactgaggaagagatcaatcttaccagagggccctcagggctgggcttcaacatcgtcggtgggacagatcagcagtatgtctccaacgacagtggcatctacgtcagccgcatcaaagaaaatggggctgcggccctggatgggcggctccaggagggtgataagatcctttcggtaaatggccaagacctaaagaacctgctgcaccaggatgctgtagacctctttcgtaatgcaggctatgctgtgtctctgagagtgcagcacaggttacaggtgcagaatggacctataggacatcgaggtgaaggggacccaagtggtattcccatatttatggtgctggtgccagtgtttgccctcaccatggtagcagcctgggctttcatgagataccggcaacaactttgaaaaacttgctctctttcaatactcccaatgaagatacatttcactcaccctccacccctgctattctgccatgtctttccctctctctgcatagccagatttgaagtgactgatacccaccccaaaccttgctgttcacagtctccaattcttcatattctaatgggaaagtaaaggtattgtttgaaggaaaactgaagaaaagacttggcttagaacaaatgaggagttatatattttactaggacttttgatagaaattcagctacaacccaaagagagaaagattgagtcttcctgtcaccataggcaataccttttttcttagctggcatgccataaaggccagctatgtgatattagaggaagaaaggatttttctttttaatgatcttccttgggaaattattgtggcctttatttaatttctaactacgtacctgggtgcctatatcgacaaagagtgagaagagcatttttacttttttaaaaaagcaaatacatatatacacatacgtatgcaaatattatagtataatagtgatccctatggagaattaaaggtgagaaagctactttgtggtgtctaggtttctgataaaagggatgatcttaactgaagaatttaaagagatacttaaacagagcaaatgtagtaggaacaagggagtgagccttataagaggacgttcagtctcatttattaaaataataactgagactgggagaggtggctcatgcctgtaaatcccagcactttggtagcctgaagtgggagattgcttgagtccaggagaccagcctgggcaacatagcaaaacctcatctctatttaaaaaaaaaatagaaaaaaatgtaataactgaagcaactaattaaaaatcttagaagaacaatatttattcttataacagccaactatggtgagttattataaggtaaattgccataatccagcgctgctcacatctaaaaaactttgaggtgtaaaggtaaatcgtaccaatctctgggctgccctagtgacttttttgatacctcagagtcctattgaagaaccaggtggaatgattgtggtaagggctatagtgctggagccaaacaccccagcaagaaaactctaaaaggacaaaagataaggtagtgcctccaaggtggcacctgaaccctctcaggctactttttggtttctactaacaaacctgagggaaggaactgcctccctggcaggatgggcatcaaatcaactctggcttcagatttagttaaaatgaggccgggtgcagcggctcacacctgtcatctcagcactttgggaggccgaggcaggcagatcacaaggtcaggagttcaagaccagcctggccaacatggtgaaaccccatgtctactgaaaatacaaaaattacctggacatggtggcgcgttcctgtaattccagctactcaggaggctgaggcaggagaactgtttgaaccaggacctgggagacggaggttgcagtgagccaagatcacgccactgcactccagcctgggctacagagcaagactccatctcaaaaaaagaaaggcatggattgctagtatttttgaaaggctttatacactacatacggcttttaataaacctttttgcagcaagagggaggaaaagagttttgtttgctttaggaggtagggaaatgtggtaggtgtttcatgcggcctaggaggaggatatgaatgaatggatactatggaatgccagtgatctcgataaggtgggaaccatcctgttcatgttcttttaaggctggttttaagcactatgggtagctgaattttctggctttaagaaaatcatttccattagccaaatatattggccatactataggccttttataattttgttagcaagattatcaggactcaggcaatcaactgtatttcatttctagcttggacagtctggtaattaaatgttgattggacatcagctttgtcaagacacttttacaaagaagtacagtgcatatcctccatcccatagggcttttgggttccaactgcgaagacaacactcttattggccacataggtaggacagtgtaagtaggggtcatgtttatattacagacagcaaaagagaaaagttactgagaactggggcgtttgagaaagttacgtggaggaaagggacaagttgaagacccttaagggcctcacagcctagttaagagaattcataaacaggtgagaagttaaaagtatatcagcaggctaagtattgaaaacaatattaaaggggtaccatgcaaaacacgatgcagcaacaaagaagatatgcaggtaatcatcacattttcttttagaaattcagggaaaaaaagatgtcacataatggcatcaggctcaattggaaagggaaggcttttgaaaataagaggtccggtaagaccttgcctctgggtcactactggtatagggagaaacttgctttaaacagtcctgacataaagtgccttttgacatcaactattcaatacctttgagactcacttagacaactggactcattgtaggttccacagaaaaacacggacaacattctagttgtcactccaaccagccacactaggagggcacagcctctggtaccctttctgttcctgaaggcatgtacagcggcttctacagcaagcttgcttacctcccaggattcacctcatggtttggacactgattcctgagagagccttgagacacacaaagtgaaaaaaatgtcaagcaggaatgaaagctctagttttttgcttgttggtatatgtaaatttgtttaaaaagtatccattctgtcgttggtagaagttttgctttggttgataatagagattctgatgtactcttataacttaggttttctcagaaattaagtagcattgaagatcaatgtaatacagttttaagcaggtacactaattatattattgattctatagaaaactaaaattatagatgaggtatcaggatccattataggttgtaaaaaaattcatgttcttcatagattgagtctaatatttcttctatagattgcatctaatgttcctactacctaaattattacgttcaaagttttgaaaattgaacgaaggtatttttaagtacttaaaacatttctctatcattctgtattacatgtataattataagatattgtttgcttcaactagctgtactttgttttcctgtgaagtttcaacttatgtgttatcgatttaacttaattgttccatctagccatgtataatggaaaaaggaagttaatatttgttattgtgttctatgccagggactgtaccaaactctgattggtacattatttcatgtctcataactctgggatctaagtattgtcacaaagagactaaaaatgagagaaaaaattacttgactaggattatgtaggtggtaataatagaatcaggatttaaactcaggacttcagatgccagcatcaatgatattctctcactggaagtggttctcaaagcaaggtcctgacaaaagcatcagcgttactggggaacttgttagaaaagcaagttcataggctgggcatggtggctcatgcctgtaatcccagcactctaggaggcctaggcaggtgggtcacttgagctcaggagttttgagaccagcctgcacaatgtggtgaaaccctgtctttactaaaagtcaaacaaattagtggtgcattcctgtaggcccagctacacgggaggattgcttgagcccaggagactgaggtgcagtgagccgtgattgctccacttcattctagcctgagcaacggagtgagaccttgtctcaaaaacaaaaaaacaaacaaacaaaaaacaaaaagcaagttcccagaagagaaaaaagaagttccagacctagtgaatcaaaaactctgagcgtggcatctcacaatctgtgtttttgtaatccttccaggtgactgattcatgctaaagtttgagactcattgctctatgccagtcatcattccctttgctcaggttagaatcatctggagagcttataaacgtccccatgcccaggctgcacacagatcaattaaaaggaacctctgagggtgggactcaagcagcagtaaaataaagttcattgagtgattctggtgtgcagccgcagttgaaaatgttatatagcatttaaacaagacactatttaattaaacactatttaaattattaaattacatacattgcttcaggcaaaacaacaacaacaacaacaacaacaaaaacttgggcctttagagcccagcttcctgagcttctgcacgaagtaagtggaacattcatttcttcctgatttgctaaggattgatcaacctccagcaaaatgtatgattagtgagtgtttcagttggtgcatcaattaaatgagaaccaatcatagaacattgaagctaaaaaggaccagagagcttctaggatgaatctgtcttagagatgagaaaaataaaggctcagagagggaagctaacttaactctgatcagacttagtttgttgcagaagtgacctttctgtctcatatttatgtcttgaatatattcactacatgaatacacagactacccattttatcttagtctacttctttcttctctctttgggcctgaataaagaccagaactgatagacagctaaaggatattgcaagcatcattattggaattgggagattccacagaacaatctgagaatgatctcatatcaaatccaatcagatgagttattctgagactaattccaatagttctagagacttttttttttatggtggacattgtttttattgtgtaaataagcaatttttaaagtatatttaaagaaatgaaacataaggaagtgtataggctgtcaggtatgtggggaagtgaagttcatgtagttttcatgtggagcccatacagattttattatagtcaattttagtgaaatttatcgttggtcagatgaaggtttttttccttcattcagcaaataactaatgactgcctactatgtgctaggtgccgaagatagagagataaataacacttagtcactctaagctgaaattgctcagcatatgaaagtggaggaatatttgtaggtgattttgatgttaaagtatttttttaacatcacctggtagtagaagattgagttatgaagctgtctacctctcacctgtaatagttttagagttggttgctattttggtgtaagtcttttttgctgttcctcttttaactgcaaatctttttgagaccagcactcacatccaaaagggcaattgtgataaaaaagaagacagtattttaaggattctgatcagaaccagattcttttcttttcttttttttttttttttttttttttttgagacggagtcttgctctgtcgcctaggctggagtgcagtggcacgatctcagctcactgcaatctctgccgcccgggttcaagcgattctcctgcctcagcctccccagtagttgggattacaggtgtgtgccacaacgcctggctaatttttgtatttttagtagacacggggtttcagcatcttggccaggctggtcttgaattcctgacctcgtgatccacccatctcggcctcccaaagtgcagaaccagattcttaactgccacagactcttgtattatgtaatttatatacagaacacaaagcacttgatttgcttaactgatgtacttgatgatactataaaacctatattatgagaaagcattgctccttcaaaggaatcaagtgatagcaaacactcggtcctgtttccaggttttcctcactgttcattttgcctttgttcttgcagggggagaatgaaaggggcgagagctaaagtgtgttgtcaatgcaagtcaatccttaaccaacaataatttacaaaagaactttatatttgctgtaatcattaaatttagttactaatcccaggaaaagggttagtccttcctcctagtttgtagatttgcaaatggagatgaataattgaatcctattttaatcttttatctgcagtaatctgggcttcttattaccggatatatttgcattttacctccaggccatgttagttcttagaagattattttcctcatgaaccctgttttgttttgcttcctttctgcttcaattctaatgtcacattgcatacctggatgtaaacagcagtcagtttctcagatcaaatagagccctgtagcaacttggaagacacagaagacacacggacataaaactgtatttattatccagggaatgtcactacggattaattatgttaatgaggccatcaaaatctatggtaatctttcaggctttgttgtttgataccagatacagcaaatgagataataatgtgtctaattgtgcctagccagtattggtatttaataaaactttgtcattgaatctttacaaaaaaaaaaaaaaaa

SEQ ID NO: 4685 - DNA, 6514 bp, Homo Sapiens
  NM_018374
aggcgcggacgcaggttacagcagcgcttggcctctgctgatgccgtcgttatcctacccctcccccgtcccagctctacggcggccgcgcgctccaggccggtcgctccaccccccggctcccgggactgtggactccacgaccctgtcctcggccctgtccgcgccgaagcagcccgggactgcgcagcgccccgcgtgccgatcttttcctaattcagcagcgatttaaccaagagcctggaatattttaaggagtaataagagacatttacaaactattctctctgaagcctgctacctggaggcatcatctagataatcagaaccttggcttccacatcctcctcccttgtcttaactacaaacatttctttctgctgacttcaactcctcagacatgggaaagtctctttctcatttgcctttgcattcaagcaaagaagatgcttatgatggagtcacatctgaaaacatgaggaatggactggttaatagtgaagtccataatgaagatggaagaaatggagatgtctctcagtttccatatgtggaatttacaggaagagatagtgtcacctgccctacttgtcagggaacaggaagaattcctagggggcaagaaaaccaactggtggcattgattccatatagtgatcagagattaaggccaagaagaacaaagctgtatgtgatggcttctgtgtttgtctgtctactcctttctggattggctgtgtttttccttttccctcgctctatcgacgtgaaatacattggtgtaaaatcagcctatgtcagttatgatgttcagaagcgtacaatttatttaaatatcacaaacacactaaatataacaaacaataactattactctgtcgaagttgaaaacatcactgcccaagttcaattttcaaaaacagttattggaaaggcacgcttaaacaacataaccattattggtccacttgatatgaaacaaattgattacacagtacctaccgttatagcagaggaaatgagttatatgtatgatttctgtactctgatatccatcaaagtgcataacatagtactcatgatgcaagttactgtgacaacaacatactttggccactctgaacagatatcccaggagaggtatcagtatgtcgactgtggaagaaacacaacttatcagttggggcagtctgaatatttaaatgtacttcagccacaacagtaaaaactggaagagatggatttaaagaagaaatatctattgatatttcctatactctcaatgaagaggtatttcctaataggagaccttaaattgaacaaacctaaagtttacacttctaagagtacagttaaaagtatgtggacctgcagttcttgtaactctccactctgtgttaatgatatatttgtactaggatcttttacttgaatctaaatttactggttgatttccttctccagcctatcccctacagggaaaagctgatacttcccctatagtacaataaataattatttaaaagtcatagctccagtcactactgaaaacataattttggtgataaacataatttgagaaacttaatttctgaatgtttttatagaaaattactgaaagtctattactcatggaagacttttaaagaataaccttttttcctgttttataaattcccattgttatatggtagtatttcagctacacaatattttagcttttagctagacatttatagcttttcatttgttgaaatggtaatcatctgcatgtttttgtcacttatttcaggttagtgattgcctaacacttataagccaaaataatctttgcaaaattccatacctaaaattttgaaagcccctaatgttttcacacatctttctgtattagttatagttttgtgaaatctttgtgtgatcttcaaacattatcatttaatgtacaatactgtaaataaactgtgcatggcttttatacagctttagtaaatgtcaaataaagtggtacagactcattacaacaagtttctcataaaaatacaataaataggaaaatgaaattcagaaacccatagactgggaataggttccagttacagcttggatctggcataaaataaatttgaaataaaatattttgatgctccatttttttatgttgcttttcatactaaagaatggtgtagacatgttttgcaactgttaggtacccagttatcaattttatcaatgttttagaggaggaaattatttttttggtagaaattgttcaagaaatccttaattgaatgtcattaaatgatggtggccaaaataaaacctatttagaaatttaatcactttgcacatcacttggaatatgatgcctctagtagttacttttttatagttttctacttttggttttatttaaaattgttttcaaatatagattattgacttattcaactttgctgttttatattttcagtatcatttttcatttttttttttttttgtcttttcacttaccaagttctagggacatttaaaatatgtactaagtgtaggagtggttatgataccaaaaaatgtagctgggttgagattaatttcgttctgttttctcatgacagaaatcaggtttccctttccccacccctaagtgcctaacttaggtctgaaacagcctgtttattagtctgactctctcaaccataaaacataagctttatttaattctgcctttaaacacactcaggtttccccttaattttcatattattttctgcaagttttcttgagtatcttcaattcgttgaatgtggtttttggtttttttttgttttaacactagtcttcccttaattcattgctaactcaagccatccttactattaaacccaaatcagtcctttaagttcattatggcctttctagtatttaaaaaaaaaaaaatcattttcatttttcttctgctacgtttcctgactactactgcatacttctctgatacaggttctgtttgtattttttatatcattctcattttctcatttgacatgatctatgtctatatatgatataggtccccttttgtctcaaaatttttaattatgtgacttcaaaaatcacctgtatctgtagtagggcttccaaatctgcttctccatatgtgaccagtcacctgtctgctttcacatttagctagtgaactacacatttactaaaatgtgtaaattttacacatttagtgactgtgtaaaataaaaaaaaagttattttatcatatcctttctattatgttcccatcctgtcctcatgtcccatttactttattatcaccattcatttcttcaaaattatcttttagatacgctcatacaaaaatcaatccttgttttcttgcttgtgtcttttaaccttggaaaattacatcgtgtaaattaaacagatttttctgatgatctgtgcttcttatatactattagagtgcatgatagtatctcctgaaaaggatggaaagtagaagcatttgcttttagtcacttaattttgaatcttttttcttcatcttttgaattaattttttttattatatctacttttagtggagtttgagtcagaaaaaaacaagaatttgaaacaagtaaaaagatagaagagaaataaagatggtatgtgactactttcagagagagttaagtaactgtcagaataagcctggaacaaaacaggctgtaaattaataaaactacaaacacacattcaggtgaagcagaagtatagccataaaacatctagaaagagtgaatgaggcttttagcttttcttaggtcaatgtccagtgtgcttttttccatgggaataggataggtattaatacgcttttctaaactgctctcagaccttatccagaggacatggtaaagatatgttacagaaatttttctgatacttcctggaataactttaagttacaccctagtagactggtcattctaataaaatccagtactataacaaacctctgtatgttgatagcacattggccctttttagagttctttcctatgtttttcttacgtgatttcccacagttccatgagtccaacaaaggagagtgataggctccttatcttttagaagaggaaggaaaggcatgaagaagttgagggactggctgaagatcacgtacttactaagtagtacaactggagcaagatcaagtatctctgtctcccatatctgtgttctatcatttaaaatatatattggaaatccctgctgactcagattggtatgattaaaaatgagaggaaagttcaaatagttagtagtgacaaactaatactgctggactaagattttggtagcattgttttctaaaatattttaaatggagaatgaacacttataaaatgctttggaacataatctttagcttaattttctgttaaaatttagtaccccttcatcattccaataaagataagactgatccattgtctaaggaaattatttataaataatagagattaatttatttgagatttgaaataagaatagtatgaaaatattagataccacataaattgtttgaaattactgaataaccatcttaagtatggaacatttaaatggctatattttatttgtgtacagtttttctgtgccttgttaggccagtgaagcaattattttctctaagaaaatgacaataaaatataacacacttcagattgtctgatttacagtttggaaaggacaccgcaatgttcaaataggtaggagaccatcaaaaacacaattaaagtaacatattaggagacttgaaacttcagcctaataaatccttcatggttcttagccttattattgtgatataattctagatattttcttggagggcatgtgcccaactctcccgcaccccattttgtttgtcttttaaagttcttagaataaacagttctttatataataattatattttatttaagaaaatagtttgttaggtactttttaaaagatgtaaatttttaaatttacaaatacatatgggtctttgataagcaataggaattgaattacaagttactagggttataagcaaaaggttgcttaccataatgtcattaggtcacgatttttagctcacatctggaagcagcaactacttggctcaagtacatataagagtaattagttttattctctcttttttataaaatcgggtttcagatgagatgtttatcttagactattttagggaaaaattttacatgtttgagatggtggagtaaaaagactgttaaacatttcttttaaaaaattatttttacattacaacaatatatttatgatgtgttcagatcaaaaatttaacttctgtgtcccagatctactttcaaagtgagattttcacttgtcagcttaaatttctgactagaactaacatttgtgtatttttgtgcttagtcggaatacaaatttcacagtggatttttgaagtttgtccttaaattggataaaatcaagtgattaaagttactaaagagataaaaatggtaatttccatttttaaaagtaatttggttgtgtttatagttatttgtacaagtatttatcacagactctaaattgaaaaatgtagtatgatctatatttgaccctaaaaatgttggattaatttaacaaatatggcagatttttcataactaagtcttaagtcttctaaaaggaagctgttacccttctgtttttaattacattaattgaaatgtgttttaagagatacaatttcagcatattttatatattaaaaaacaaaaaaggattagtattgagccagtggccaaaaggtaatattactaccatgtagactgttatagttcaaattgtcccacttcacccagaattttagaaactagaagtctgggaggtactatatcagctgtagttgggtaattccaagtgctgatagtactattcatcttttttattattgtgtcagatgaaacaaatgccaagttgcaaaatatgcagatttttattatataatggttttaggcataaattattaacaagccatgccttatgtgtttcatcttatatttttctttagaactaaactataacagattttggaaaatgatttgacgtgcttgctcacttgattgacttggtcagatatttgaatgatggtattacctagattctaatccttgattctagttatataataaataatatagaatatgaaaatatgtttgggcatttactgtttatattatgtagtagcctccatcatgacacacttactacatttatgaattgagcagttctgtaattgtaattattattgctgttcatgtaacaaaacatgcttataatagcaaacaaatagaaatgcccccaaaatgctatttttttaattcagttataactgttactcttgtagttgtgtatgacgcaataaaatttgtaaaaaaatttcagcatgaaaaataaaatttgtatcacttatgta

SEQ ID NO: 4686 - DNA, 2610 bp, Homo Sapiens
  NM_018380
gagtagagagtgaaccttggcttaaaaggaaggaaaataactgtgaagaaaagatgacccaacttgaaataaaacctgaagaccttatctcccacttgagagagagaagaagctgaaagccatcagcttgcactctgggctcacagacagagagggtgaggggttgagcccagatctatgacttcagacccctgtctcggcccctaggcctgatcattcattcaaactctcaataaacacggattaccagaccctgcgcagggaacacatctgggaaaacagctgcaacctcggataccagcacgggacaagctatctcagggcaatgaggaacaactaaagagaatcccaggaaccaggtaaccaatcgccagaagccctccgccctcatggtccattgggtcaaggccccactgccgcctcgtatcgccagcctccagtcctgcctccacgacgcgcccttccccaaggctggccgggtctggatgtcgccatcccctattcggagctacagacctcgcagctgaactcttaaaaagaacctcgcttcttcctcacggtgctccagctccacacaccgtactgagcctcgccagccaccgtacgcgaggtcgcggcgcgtccgtgacgtcactgatgtgcgcttctcccgcactaagggaaacatggctctaacgcggccggtgcggctcttttccctcgtgactcggttgctcctggcgccgcgacggggcctcacggtccgcagtcccgacgaacccctgccggtggtgcgcatcccagtggctctacagcggcagttggaacagcggcagagcaggcggcggaacctcccgaggccggtgctggttcgacccggaccgctgctggtttcggcgcggcggccggagttgaaccagccggcgcgcctcacactgggccgttgggagcgcgcgccgctagcctctcaaggctggaagagtcgacgcgcgcgtcgggaccacttctccatcgagcgcgcgcaacaggaggcgccagcggtgcgaaagctctcgtctaagggcagctttgctgacctgggcctggagccccgtgtgctgcacgcactacaggaggctgcgcctgaagtcgttcagcccacaaccgtgcagtctagcaccatcccctcactacttcgcggccgccatgtcgtttgcgccgcagaaaccggcagtggcaagactctcagctacctcctgccgctgcttcaacggctcttgggccagccaagcctggactcccttcctatccccgcgccccgaggcctggtccttgttccttcccgagaattggcccaacaggtgcgggctgtggcccaacccttgggccgctccttgggcctgctggtgcgggacctggagggaggccacggcatgcgtaggatcaggctgcagctgtccagacagccttcagcagatgtgcttgtggccactccaggggctctgtggaaggccctgaaaagtcgactgatcagtctggagcaactctccttcttggtgttggatgaggcagacacactgctggatgaaagcttcctggaactggtggactacatcttagagaagagccacatagcagaaggcccagctgacttggaagaccccttcaatcccaaagctcagttagtgctggtaggagccacatttcccgaaggtgtaggccagttgctgaataaagtcgccagcccagatgctgtcaccaccatcaccagctccaagctccactgtatcatgcctcatgtgaaacagacatttctgagactgaagggagcagataaggtggccgagctggtgcacatcctcaagcatcgtgacagagcagaaaggactggtccctcaggaactgttctggtgttctgtaatagctccagcactgtgaactggctgggatatattctggatgaccacaaaatccaacacctaaggttgcaggggcaaatgccagccttgatgagggtaggaatcttccagtccttccagaagagctcccgagacatacttctctgcacagacatagcctctcggggcctggacagcactggtgtggagctggttgtcaattatgatttccccccaacgctgcaagattacatccacagagcagggagagtgggccgtgtggggagcgaggtgccaggcaccgtcatcagttttgtgacccatccctgggatgtgagcctggttcagaagattgagctggcggctcgccgaaggagaagtcttccaggactagcatcctcggtgaaagagcctttgccccaagcaacctgattttgacaaatctgattaaaatgtgatgctagaacagggatctttcccagtatcttgagtgggtgaccacacttgtcagtgggaggctctgggctgccctgtcggctccttgagggcgggatgaactgctttgtgacttggaaaggtacgctgctggccagcattggagaagaagctgctgagcatggctttctgtagtctttagcaagacacaagtggattttgactttgtatcatgtcatgatttctaacaataaatgatgtttttatgtgcctcccctaagaataattagcaccggggcggaaaaaaaaaaaaaaaaaa

SEQ ID NO: 4687 - DNA, 2139 bp, Homo Sapiens
  NM_018381
gactgcagaggccgcgccgcctcccccgtccgaggtctgcgcgctccgccgcagggtgcagacccggggcgcccgcctgggtttggggcgcaagagcagaggcggagccagggcggagccagcgcgccgggtcccccctgaatcgaaagcgaaacaggggccggggaggaagggcggagccggccccgaggcaccgccccctgccctgcgcggctgctggaccgacgggcgcacccaggtaggggggcggctgagccgcgcagtgcggaccctcgcggggaactgcgccgccgccaccatgtctcaggaaggtgtggagctggagaagagcgtccggcgcctccgggagaagtttcatgggaaggtatcctccaagaaggcgggggctctgatgaggaaattcggcagcgaccacacgggagtggggcgctccatcgtgtacggggtaaagcaaaaagatggccaagaactaagtaacgatctggatgcccaggatccaccagaagatatgaagcaggaccgggacattcaggcagtggcgacctccctcctgccactgacagaagccaacctacgcatgtttcaacgtgcccaggacgaccttatccctgctgtggaccggcagtttgcctgctcctcctgcgaccacgtctggtggcgccgcgtgccccagcggaaggaggtatcccggtgccggaaatgccggaagcgctacgagccagtgccagctgacaagatgtggggcctggctgagttccactgcccgaagtgtcggcacaacttccggggctgggcacagatggggtccccgtccccctgctacgggtgcggcttccccgtgtatccaacacggatcctccccccgcgctgggaccgggacccggatcgccgcagcacccacactcactcctgctcagctgccgactgctacaaccggcgagagccccacgtgcctgggacatcctgtgctcaccccaagagccggaagcagaaccacctgcccaaagtgctccaccccagcaaccctcacattagcagtggctccactgtggccacctgcttgagccagggtggcctcctggaagacctggacaacctcatcctggaggacctgaaggaggaggaggaggaagaggaggaggtggaggacgaggagggcgggcccagggagtgacccctgccaggtgcagatacaaaccagacacggtctgtggctactttgtgttattataagatatgagctcaaaccgagatatgaatgaccttggggagccatctgaggccaagatattgacgggggggattcctgggtcccattttcagcgcccagggtcacagatccacagtgggaagttctgtgggacacattggcactgagccacaaagaaggtgtggccagaacaacttgggctcctgctgaccaatgtcctctagggcctaggggacagaggaacacagagtcacagcttcaggggccgaatgagcatggcggccttcctgagagaatatgccccaccacgaaactcagcccagtagacaccatcctggtagcggcttcggtagtggccgccgtggtgccacacaccgttgaggttggagtgggcacaggcatggtaccaccagcctccccgctggtacagggcacagttacctgaggggagagagagagtccatgtcctctcaccagaataaaagcctctacctgcacctcacagtgcaaggcttttgccaggcatcccctggcccctcccattcttattgaatacaagccctgatcttccatctcctcagcaaaaaaataggagccctggccccccaactttcttcagagtaatagccttaattccttccctatctccttaccaaagtacaagtcacatctttcccaccttttctgcaaactaggagtctaccgttcattcctttatcaaagaaaagtatctacttcctttctagaataagagtactagctctcaccctctgccctttacttgaacaggagtcttgattctttttttgcctcatcagagaaggaatctggactccccatccccccaccaggataaaagtcctgacctttgttctcttgacggaataaaagcttgcttatccttatacttaccaaaaaaaaaaaaaaaa

SEQ ID NO: 4688 - DNA, 6315 bp, Homo Sapiens
  NM_018383
agtgcgtgatgaccccagagcgtgcgttcggtggcccataggggaagatggcggctgctcctttggaggagcgggattgagaggatcggggtggggagaccaaacaagagagacatttctggctctgaaggcgaacgcttcgctggccatttaggagctctgctcaaagccagacgtatcctagaaggaaaacatcaccatggctacagaaattggttctcctcctcgttttttccatatgccaaggttccagcaccaggcacctcgacagctgttttataagcgacctgattttgcacaacagcaagcaatgcaacagcttacttttgatggaaaacgaatgagaaaagctgtgaaccgaaaaaccatagactacaatccatctgtaattaagtatttggagaacagaatatggcaaagagaccagagagatatgcgggcaattcagcctgatgcaggttattacaatgatctggtcccacctataggaatgttgaataatcctatgaatgcagtaacaacaaaatttgttcggacatcaacaaataaagtaaagtgtcctgtatttgttgttaggtggactccagaaggaagacgcttggtcactggagcttctagtggggagtttaccctgtggaatggactcactttcaattttgaaacaatattacaggctcacgacagcccagtgagggccatgacgtggtcacataatgacatgtggatgttgacagcagaccacggaggatatgtgaaatattggcagtcgaacatgaacaacgtcaagatgttccaggcacataaggaggcgattagagaggccagtttctcacccacggataataaatttgctacatgctctgatgacggcactgttagaatctgggactttcttcgttgccatgaggaaagaattctccgagggcatggtgctgatgtgaaatgtgtagactggcatccaaccaaagggttagttgtttcaggaagtaaagatagtcaacagccaatcaagttctgggatcccaagactgggcagagtcttgcaacacttcatgcccataaaaacacagtaatggaagtgaaattaaacctcaatggcaattggctactcacagcatcacgtgatcatctctgtaaactttttgatatcagaaacctaaaagaagagcttcaagtcttccgaggtcataagaaagaagccacagctgtggcctggcatcctgttcatgaaggactttttgccagtggagggtctgatggttctttgttattctggcatgttggggtagagaaggaagtgggtgggatggagatggctcacgaagggatgatctggagtctggcttggcatcctcttgggcatattctctgctcaggctcaaatgaccatactagcaaattctggactcgaaaccgaccaggtgataaaatgcgagatcgatataatctaaaccttttacctggaatgtctgaagatggagtagaatatgatgacctcgaacctaatagcctggcagtaattccaggaatgggaataccagaacaactaaaattagctatggaacaagaacagatggggaaagatgaatcaaatgaaattgaaatgacaattccaggtttagattggggaatggaggaagtgatgcaaaaggatcagaaaaaagtacctcagaagaaagttccttatgcaaaacccattcctgctcagttccagcaggcttggatgcaaaataaagttccaattcctgctccaaatgaggtgctgaatgacagaaaagaagacattaaattggaagagaagaaaaaaacacaagcagaaattgagcaagaaatggctacattacaatatactaacccacaacttctggagcaacttaaaattgaaagacttgcacagaaacaagttgagcaaattcagcctcctccctcatctggcacccctctcctcggaccccagccttttccaggacaaggtccaatgtctcagattcctcaaggttttcaacagccccatccatctcagcagatgccaatgaacatggctcaaatggggcctccaggtccacagggacagtttaggcctcctggaccccagggacaaatgggaccacaaggtcctccactgcatcagggaggtggggggccacaaggattcatgggaccacaggggccccagggcccgccccaggggttgccacggcctcaggacatgcatgggccccaaggaatgcagaggcatcctggacctcatggccctttgggacctcaagggccacctggaccacaaggtagttctggtcctcaaggtcatatgggtcctcagggtccacctggcccacagggtcacataggcccccaaggcccgcctggccctcagggtcacttgggcccacaggggcctccgggtactcaaggtatgcagggaccacctggtcccagaggaatgcaagggcctcctcatcctcatgggatccaaggcggaccagggtctcaagggatccaaggtcctgtgtctcagggacctctgatgggattgaatccaagaggaatgcaggggcctccaggcccccgggagaaccagggtcctgctccccaagggatgattatgggccacccgcctcaagagatgagaggacctcaccctccaggtggactactgggacacggccctcaggaaatgagaggtcctcaggagatccgaggcatgcaggggcctccaccccaaggatcaatgctgggacctccccaggaattgcgagggcctccaggctcacaaagtcagcaggggccgccccagggctctttaggacctccaccccagggtggcatgcaaggaccccccggacctcagggacagcagaacccagcaagagggccacatccatctcaagggccaataccattccagcaacagaaaacgcctctgctaggtgatgggccccgggcccccttcaaccaggaaggacagagcacaggccccccacccctgataccaggcctagggcagcagggagcacaaggtcgcattccccctctgaaccccggacaaggacctggccccaacaaaggtgactcccgcggccctccaaaccatcacatgggcccgatgtcagagaggcggcatgagcagagcggcgggcctgagcatgggcccgagagggggcctttccggggtggccaggactgcaggggtccccctgataggcgtggccctcacccagacttccccgatgacttcagcagaccagatgacttccaccctgacaagcgctttggccaccggttacgtgaatttgaggggcgaggaggacctttaccgcaagaagagaagtggaggcgagggggccctgggcctccgtttccccctgatcacagggaattcagcgagggggatggccggggtgcagcccgaggccctccgggggcatgggaaggccgcaggcccggagatgaacgtttcccccgggatcccgaggacccacgttttcgagggcgcagagaagaaagtttcagaagaggagccccgccgaggcatgagggccgtgctccccccagaggaagggatggttttcctggtcctgaagactttggtccagaggagaattttgatgcttctgaggaagcggcccgaggacgagatctcagaggtcgaggtcggggtaccccacgaggaggaaggaagggtttacttcccactcctgacgagttccctcgctttgaaggagggcggaagccagattcctgggatggaaacagagagcctgggccaggtcatgaacattttcgtgatactccccgccctgatcatccccctcacgacggtcattccccagccagcagagaacgctcctcttctctccaaggcatggacatggcatccctacctccccgaaagcgcccctggcatgatggcccaggcacttctgagcacagagagatggaggccccaggaggcccttctgaagaccgaggaggcaaaggccgagggggcccaggacctgctcagagagtgcccaaatctgggcgttccagctccttagacggagagcaccacgatggataccacagagatgaaccttttgggggccctccaggcagtggcaccccttctcgagggggccggagtggcagtaactggggtagagggagtaacatgaactctggcccgccgaggcgaggagcttcacggggtggtggaaggggtcggtagaagctggaactgagtaccctgaggcctctctggacagtatgtaagaacttcttgtggactcaccaagagaaacaaaaggaagcctgcaccattgtagccctgaactcttttctgggcacctgaatcccaggaaccctcaatgaggtcttcaagatgaagagactgctgccagctaccagcctggctggccctgtcctgtccaccctcattgccccaactcccatgttgttttgtgaagataaaagctgggatctttttcttttttttaagtctcacaagacatggggcatctccacaaatttaagttcctgtccatttggaaatttgtttctatgtgtacagtttgtcagagaaaaacaaagtttttgtatgaatacagaatgtgatttacgcaagaattgacagaaaactagttgtgaagtgcttgccttaaggaaacctttggtttccatcgcatcccatctgccaaggaatgcacggttgttgctgatgttcatgagcatattaaccactaggttatctaaattaatctcagctgtgaactttgtgtttttcaacacattctgtcacaccatttttgtgacagaaaaatacttgaaaattattctaatgtagtttgtagtaggttcaaatttttattcagacatgctctgacagatggaaaattgtactctgaagagaaaatgcaatcttctggatgtccaacgagggagcttccccttggaagcatctcctaagaatcacagtttaggtttgaatcgccttgttatgatgaggagaggaacttgatgttagtcagaaataaagtcacatgccctttagataacttgaaatcacacatggagttgataaggaatggaccaaaataggtcctcaaacaattttgcaacacttaattaagttttcctctcttcctcttccatactatgtggaaataccagtgttacggcagggcgtacttctaactcacagtaagccagatagatcttgtccatggcaaattccttgtttaaaataaacataccatttagcccagtttggattggaagccaaaaattcagtttgttatataccccatgatactttctatactgacctttattttggttttacatggaagcttttattaaaaggactgtcctatggccaccttaacatttcattacattggcagcttcagttttggcatcagtcaaatttatttggcaaatttagtggtgctggaagtttctttttttcttttccttttttgacagagtcttgctctgtcacccagccaggagtgcagtggtgcaatcacggctcacttcagctttgaccctgcctcagcctccctagtagctaggactacaggcatatgccaccatgcccagctaattttttgtgtgtgtgttttttgtagagatggagtttcaccactttgtctatgctggtttcaaactcctgggctcaagcggtccacctgctgtggcctcccaaagtgctgggattgcagatctgagccacagtacctggccgctggtgctggaagtttcaatggttgcttagaaaaggcatactgatatagtttaacaggatatgaaaatttaactggttctctatgaatgtaaaaaacagcaaaagctaattgatttctgtggagtgagaaaatgtcagccatatacactgcttttcagtgttagaatctagagactattttttttttaactttgaaattacagcttatttaatcagcgctccaccataaacatgctattaggaggctcaagattgctttaggttatgggtatttcttcactcacccccaactggtatagcttaaagagagagaaactgtaatcaaatttcatgaagctaaaaccggatccagagaccaaacccatatcaagattagactttttttccctgagattctagtggaaaaattttcattattttgggctttaactttagaaacatagtatctcagtaagcagataaccagatcacatttaaaaattttcattttaccttgaagctctactggacttgacagatcacattttgagagtgaattcatttaaacaataaacctctacattatacttataaaaaaaaaaaaaaaa

SEQ ID NO: 4689 - DNA, 1895 bp, Homo Sapiens
  NM_018384
atgacaggaagtgacccgttaaggaagcagcacatcgctgcattcggctggttttcagggtcttgttcccaatcagtttccagccaacaccagggtgtcctagtccgcagaggtgtgggggacacactccataatctctacttttctttttgtgcagctgagtcatggagctttcagccccagcacatggctcctccttaactgcgtctgctcaacctccctcagccctgtgaacagcatccccgcacacagacgcagagcaggactctctctgctgccacttcaccttcctgagagaggaccagcggccagagcctcagtgactgccaccctggaggacagggcacaacaaccgtttctggagagaatgggaggattccagaggggcaaatatggaactatggctgaaggtagatcagaagataacttgtctgcaacaccaccggcattgaggattatcctagtgggcaaaacaggctgcgggaaaagtgccacagggaacagcatccttggccagcccgtgtttgagtccaagctgagggcccagtcagtgaccaggacgtgccaggtgaaaacaggaacatggaacgggaggaaagtcctggtggttgacacgccctccatctttgagtcacaggccgatacccaagagctgtacaagaacatcggggactgctacctgctctctgccccggggccccacgtcctgcttctggtgatccagctggggcgtttcactgctcaggacacagtggccatcaggaaggtgaaagaggtctttgggacaggggccatgagacatgtggtcatcctcttcacccacaaagaggacttagggggccaggccctggatgactatgtagcaaacacggacaactgcagcctgaaagacctggtgcgggagtgtgagagaaggtactgtgccttcaacaactggggctctgtggaggagcagaggcagcagcaggcagagctcctggctgtgattgagaggctggggagggagcgagagggctccttccacagcaatgacctcttcttggatgcccagctgctccaaagaactggagctggggcctgccaggaagactacaggcagtaccaggccaaagtggaatggcaggtggagaagcacaagcaagagctgagggagaacgagagtaactgggcatacaaggcgctcctcagagtcaaacacttgatgcttttgcattatgagatttttgtttttctattgttgtgcagcatactttttttcattatttttctgttcatctttcattacatttaaatctctggaccctggagcacttctaatgtatcaccccatggagtcattgttctaataatcaccaattcagactcagatcctcgtggtctatggagcatgctgcttgctgtctgtgcagctcccatttccccttcttcctgatagacttggagctgtgtgcctccactccaaggctgcctgcctgctgtaaacactattccactctgtctgccaacaactgcttcaggaatgggcctgagatcccatgcaggtccctgagaagtgagtaaaagtccgcagaggtggggatggaagatctctccttagatagaacctgtcttcctccctggcattgtggggtctgggcgtgacactgggactctcagcagctttgtgctgccaacctgagattgaaggcagtgcctcagagcagcacagagagttggggccccctgagccctgagccaccagccctgcagcctgccctatctccgcatttccagttgtattagccaatagatttcctacttatttaagctatttgagctccgggtctcttctacctgcattctaaaacattcaaagtaataaaaatttctccacattcaaaaaaaaaaaaaaaaaa

SEQ ID NO: 4690 - DNA, 3589 bp, Homo Sapiens
  NM_018385
tctcgccggacgctaaagaccgacgcacaaattaagaatggaccattcttttaactcagtcatttatccaaactcgagacattcgccaggaaatctatcgaaaatttcccagaaccattttttcacttatattctataatactggtaaaatcgagacgtaaaaggagaacttgagaacaagtcattctgctttcccctctcaagtttgagcctgaactacttgggctcgcttatcgtcacttccggggatcgaactgtgaatcccggaaactgcacgcgccgagccgggaagcttcgtccagcggtcgtgttgccatgggccggaggagagccccggccggtgggtcgctgggacgggcccttatgcgccatcagactcagcggagccgaagccatcgtcacactgactcctggttgcacacaagtgaactcaatgatggctatgattggggtcgtcttaatcttcagtcagtgactgaacagagctcccttgatgacttccttgctactgcagaacttgcaggaacagagtttgtagctgagaaacttaatattaagtttgtgcctgctgaggctagaactggactactgtctttcgaggagagccagagaattaagaagctccatgaagaaaacaaacagttcttgtgtataccgaggagaccaaactggaaccaaaatactaccccagaagaactcaaacaagcagagaaagataactttctagaatggagacgtcagcttgtccggctagaagaggaacagaagctgatattgactccatttgaacgaaatttggacttttggcgccagctctggagagtcattgagagaagtgatattgtggtccagatagtagatgctcgaaacccactcctgtttagatgtgaggatttggaatgttatgtgaaagaaatggatgccaataaggagaacgtcattctgatcaacaaggcagacttgctgactgctgagcagcggagtgcctgggccatgtacttcgaaaaagaagatgtgaaggttattttctggtcagctttggccggagccattcccctgaatggtgactctgaggaagaggcaaacagagatgatagacaaagcaacacaaccaagtttggacattccagtttcgaccaggctgaaatttcccacagtgaatccgaacatctcccagctagggattctccttcacttagtgaaaatcccacaacggatgaagatgacagtgagtatgaggactgtccagaggaggaggaagacgactggcagacgtgctcagaagaagacggtcccaaggaagaggactgcagccaggactggaaggaaagctctactgcagattctgaggctcggagcaggaaaaccccacagaagaggcagatacacaattttagccatctggtatccaagcaggagttactggagctctttaaggagctacacactgggagaaaggtgaaagatgggcaacttacggtcggactggtgggctaccctaatgttggtaagagttcaacaatcaacaccatcatgggcaacaagaaagtatctgtgtctgccacacctggtcacacaaagcactttcagactctctatgtggagcctggcctctgcctgtgtgactgtcctggcttggtgatgccatcttttgtgtctaccaaggcagaaatgacttgcagcggaatcctcccaattgatcagatgagagatcatgttcctcctgtatcactagtttgccagaatattccaagacatgttttagaagctacctatggcattaacatcataacgcctagagaggatgaagatccccaccgacctccaacatcggaagaactgttgacagcttatggatacatgcgaggattcatgacagcgcatggacagccagaccagcctcgatctgcgcgctacatcctgaaggactatgtcagtggtaagctgctgtactgccatcctcctcctggaagagatcctgtaacttttcagcatcaacaccagcgactcctagagaacaaaatgaacagtgatgaaataaaaatgcagctaggcagaaataaaaaagcaaagcagattgaaaatatcgttgacaaaacttttttccatcaagagaatgtgagggctttgaccaaaggagtccaggctgtgatgggttacaagcccgggagtggtgtagtgactgcatccactgcgagctctgagaacggggcggggaagccctggaaaaaacatggcaacagaaataaaaaagaaaaaagtcgtagactctacaagcacctggatatgtgaggttgggctgcaacagaaatgtcatctgcattgtgcagatggaaaagagcagaagctgcctgttgcctgtggaaccgtcccaagacactagcactgtagaacgggccctgctcttgcagagcacggctgcacccaacagtctccatgtcaagaccaagggcctcctggaaacaccaactctgacaaaaaggagtcatctgggagcccgagaatcctactcctggccgggcacagtggctcacgcaccaacatggagaaaccccgtctctactaaaaatacaaaaaaattagccaggcgtggtggcgcgcacctgtaatcccagctactcgggaggctgaggcaggagaatcacttgaaccagggaggcagagtttgcagtgaatggagattgcgccgctgcactccagcctgggcgacagagtgagactgcatcacaagaaaaaaaatttgcaagggatggttcacgagacacatttgggacgaaggtgaaagagaaattccccattctgagtgtcctagttgggttcctccgactctaaacaagggacttgggttcagttagtgtacagcgggggctcacgtccactaaggaacatgtagaatgtaaccaccgggtgacagggaagctgcggtatttactacctagcccccatcttcactggttattccacttatttaaaatgtccagaataagcaaatctccatatagaggaagtagattagtggttgcttcgggatgggaggaatgggaagattgaggtctttcttttgcagtgataaaaatgtcctaaaattgactgtagcgatggtcacacaactctgaatatgcttaagaccattgaattacacactttacgttggtgaattgtatggtatgtaaattatagttcaataacatagttacaaaagataatcaaaagcatgaaagcactgttgatgtggtttggatctgtgtcctcaccgagtctcatgttgaaatgtaagccccctggtgggaggcgatgggattatggggcagagtcctcacgaacggtttagcaccacccgctcagtgctgttctcctgatattgagtcctcatcacatctggttgcttcaaagtgtgtggtgcctcccctctgtctccctcctgctctggccatataagatgtgcctgcttctccttcgccttctaacatgattgtaagtttcctgaggcctccctagaagcaaaagctgctgtgcttcctgtaccatctacaggaccgtgagccaattaaacctcttttctttataaattaaaaaaaaaaaaaaaaaa

SEQ ID NO: 4691 - DNA, 1753 bp, Homo Sapiens
  NM_018386
agacggaccgagggccggaagtgacgccagctggcccgcttgaggcgtagggggtggcgctctccgttcggcggcgctcccatggcgcacattaccattaaccagtacctgcagcaggtgtacgaagccatcgacagcagagatggagcatcttgtgcagagttggtgtcttttaaacatcctcatgttgcaaacccacgacttcaaatggcctctccagaggagaagtgtcaacaagtcttggaacccccttatgatgaaatgtttgcagctcatttaaggtgcacttatgcagtggggaatcatgacttcatagaggcatacaagtgccagaccgtgatagtccaatcattcttgcgagcattccaggcccacaaagaagaaaactgggctctgcctgtcatgtatgcagtagcgcttgaccttcgagtgtttgccaataatgcagatcaacagttggtaaagaaaggaaaaagcaaagttggggacatgttggaaaaagcagcagagttactgatgagctgtttccgggtctgtgccagcgacacccgtgctggtatagaggactctaagaagtggggcatgctgtttctggtgaaccagctgtttaaaatctacttcaagatcaacaaactccatttatgtaaacccctaattagagcaattgacagctcaaacctgaaagacgattacagcactgcacagagagtaacatacaaatactacgttggacgcaaggctatgtttgacagcgattttaagcaagctgaggagtacctgtcatttgcctttgagcattgtcaccgttctagtcagaagaacaaaaggatgattctgatctatttgcttccagtaaaaatgctattgggtcacatgcccactgtggagctcctgaaaaagtatcacctgatgcagtttgcggaagtaaccagagctgtgagcgagggcaacctgctgctgctgcacgaggcgctggcgaagcacgaggccttcttcattcgctgcggaatcttcctcatcctggagaagctgaagatcatcacctacaggaacctctttaagaaagtgtatttgttactgaaaacacaccagctgtctctggatgcttttctggttgccttgaagttcatgcaggtggaggacgtggacattgacgaagttcagtgtattctggctaacttgatatacatgggacacgtcaaaggctacatatcgcatcagcatcagaagctggtggtcagcaagcagaacccatttcctcccctgtccacggtgtgttgaaagtacacggagccccgaggacggactcggctggttctggagtctttgtgagacttctttgaaggaggctttgcgtgaaggctgctcggctcacttttcctaagtgtggttcctgaaggctgtctttgtaactttttgtagttctttgtgtaaaaagcgtattctgaatttatacacatggcatgttcttcattatatcttccaggatacatctatttttatatattaaatttgaatgtgttatcaaaatgcttggttaacttaaggcacctttttaaaagcagaatttaatttgatttaaattttccagattttatagcttgcctgtatggatgctcctcaatttatgatagggttacatcccaataaacttattttatttgcctttgcaaaaaaaaaaaaaaaaaaaaaaaaaaaaaaaaaaaaaaaaaaaaaaaaaaaaaaaaaaaaaaaaaaaaaaaaaaaaaaaaaa

SEQ ID NO: 4692 - DNA, 6426 bp, Homo Sapiens
  NM_018387
gcgccaccagggcagcagccgccgcagccgccgccgctgggcagaggagccggagacgcgagcgggcgaggtggcggcggcggcggagcgggagcgggtaccgggcgcgggcagagcgcggcggcgcggagacggggttttgccatgttgacctggctggtctcgaactcctgaacgcaagtgatccgcctgcctcagcctcccaaggtgctgggattacaggcacgagccactgtgcctggcctcaactgttgcttcttataaaggtgtgttccagagaacaagccttcagacatttgctatattgacgctgagctgtcaggggactcaggcttatgaggaggtattgttacacaaaacagtgtctagtgaagacgacaagaaagaggggaaaggatcggaaaaagaagctaaaatactatagaaaaccatgagatctattcgatcttttgctaatgatgatcgccatgttatggtgaaacattcaacaatctatccatctccggaggaacttgaagctgttcagaatatggtatctactgttgaatgtgctcttaaacatgtctcagattggttggatgaaacaaataaaggcacaaaaacagagggtgagacagaagtgaagaaagatgaggccggagaaaactattccaaggatcaaggtggtcggacattgtgtggtgtaatgaggattggcctggttgcaaaaggcttgctgattaaagatgatatggacttggagctggttttaatgtgcaaagacaaacccacagagaccctgttaaatacagtcaaagataatcttcctattcagattcagaaactcacagaagagaaatatcaagtggaacaatgtgtaaatgaggcatctattataattcggaatacaaaagagcccacgctaactttgaaggtgatacttacctcacctctaattagggacgaattggagaagaaggatggagaaaatgtttcgatgaaagatcctccggacttattggacaggcagaaatgcctgaacgccttggcgtctcttcgacatgccaaatggtttcaggcaagggcaaatggattaaaatcatgtgtaattgtcctccgcattctgcgtgatttgtgcaacagagtccccacatgggcaccattgaaaggatggccactagaacttatatgtgaaaagtctataggtacttgtaatagacctttgggcgctggggaggccttgagacgagtaatggagtgtttggcatctggaatactacttcctgggggtcctggtcttcatgatccttgtgagcgagacccaacagatgctctgagctatatgaccatccagcaaaaagaagatattacccacagtgcacagcatgcactcagactatcagcctttggccagatttacaaagtgctggagatggacccccttccatctagtaagccttttcagaagtattcctggtcagttactgataaagaaggtgctgggtcttcagctctaaagaggccatttgaagatggattaggggatgataaagaccccaacaagaagatgaaacgaaacttaaggaaaattctggatagtaaagcaatagaccttatgaatgcactaatgaggctaaatcagatcaggcctgggcttcagtataagctcctatctcagtctggccccgttcatgccccagtcttcacaatgtctgtagatgtggatggcacaacatatgaagcctcaggaccatccaagaaaacagcaaaacttcacgtagcggtgaaggtattgcaggcaatgggatatccaacaggctttgatgcagatattgaatgtatgagttccgatgaaaaatcagataatgaaagtaaaaatgaaacagtgtcttcaaactcaagcaataatactggaaattctacaactgaaacctccagtaccttagaggtaagaactcagggccctatcctcacagcaagtggcaaaaaccctgtaatggagctcaatgaaaaaagaagaggtctcaagtatgaactcatctcagagactggtggaagccatgacaagcgctttgtaatggaggtagaagtagatggacagaaattcagaggcgcaggtccaaataagaaagtggcaaaggcgagtgcagctttagctgccttggagaaactgttttctggacccaatgcggcaaataataagaaaaagaagattatccctcaggcaaagggcgttgtgaatacagctgtgtctgcagcagtccaagctgttcggggcagaggaagaggaactctaacaaggggagcttttgttggggcgacagctgctcctggctacatagctccaggctatggaacaccatatggttacagcacagctgcccctgcctatggtttacccaagagaatggttctgttacccgttatgaaatttccaacatatcctgttccccactactcattcttttagcaaatgacagaagctaattcctattgaacaacaatacagtacaacacagaatgttagagaaaaagcctttttatcctgctttctttgaacacatacttgatcaaaattatttgtaaagaacatctttcctactttttgattttaacaaatgcaaatttagttctctaaaacttgaaaaaaaaaaaagaaaccagttctgtgaaaacggtacctcatttctggaaaataacttataccagcccttctgttctagggaaataaaagtctagcagttcaaagtttaagttttaagagacgtatcagattatgtaaaattaaatttgtgaaggatgtatagagtctcaaacactgatcacaaataaactgctttgttgtaacacagagtactgcctggttcctgatgcagtcactgattcttagttgattgatatgtatttgccccagggcactttaatttgggctgtagttattttttttaatacaatagagacttttcatttaactttaactttgtaaatattgaagtgtgtaataaagccaataaaatatgggtttgaatattgttttagcttattatttttgatatgttttggtatcaaattacaaggaattgaaaactaataacttagccctagaagcccattcacttgtaagcaaagtgctaaaacaaagcaaaggtgattgttagtttgagccagtctactcactttgtaagccctttgtactcctgttgtacaagggccatccccatgataaaggttccattctgttatttgagcattgcttattaaaatgatggcactacccagagatggggaaggagaatgtgattatcctagtttatgaatttccaagtttttaaaaataataaattaatcaatcaatcaccctctcttgttcttgtggccttcttcactctgtaagatattgtgttcactccctggcttttttcatgcagatagaagattagtgattttgctgggattcattgaagggtctcctttcctcttcaattacatcagaatctaaagcagcaacagggtccccataaaaacttgctcttcgattgtcccagttcttgttgagtgctgctgtgaaaagtgacaggtttcagccatgggtcagcatttctttttaagacacctgatgatgctggtggaaatggatcagtgggtaacattgtgctgttctgtaaagggtgcagacctaagtcctccacttgcattctcaccttgtttggaaagccaatgatgttactaggtcaatggtttcattaaggtactcacccccatgaaggagcagcagtgtggtcccctgtcaatatttataaggcaccatgtcttaaaaatgtctgtttttagtatgaattagctttcattttccctattcagttctgcttttgggaacttgacagggcccatccatgagaatgggcttcacaaaatatggcaaatgtatgtaccaaattccttcgggaccactaaataaaggtgaaatgggcaatgtacaacaaatgttagtgtcacttctcagatatatattacacaatgattagtttgtttcttctccttggtcttttgtctttattagtggtgggtgatactttaataaaacctcatcacttgctggaaatagctgtaacttatcattctcatcctgtgcattagtggctagacataaacaagagggcccatttcagctgggagttttcatgtttcattgatgcgttttgctgacctatggatgaaacagagccatcactgagaagaaaaagcatggctgatagtgtccagtttttattaattaaatctttacagtagtcctcattgtctttggaatactattaattggcagctgcggctgtattgttatttgaaattggtcatcaaatttggattccacgttggaatctctagatatttctcgttagaaaattcttttgaagtagctgactctgcttcataactcacgcgctctgtaatggtgaaaagggagctgtgctgttttccaacatgatggcagtcatttcaaatggtttctaccaagtcttttttttttttttttaattttgttgtttgttggaagttactaaccatgttgtaaacctgcccagttgctgcaaacttttacatttctctgctttacttaaaataatcgagctgtcagtcctttgttagaagtggtaaccatgcaagttcaactgtttaaattctgtaatgaattaagtgtccccccacctgttgcccttcccacccttccattttgtaatgaaaattccacttacagctgaaagagcagagaaatataaatgaagctcttggcttcaccaaattgcctgagattaacatgaagttttgcttctctgctcttttctccactgtaggtggttttttcattgacagcccctattgccagcctctgagcgtcgcaccatttattattcacttgggccctcaagatttcttctctgacttctagaaccatcaggttgtctggcttgaaatggcaatttctatgtcttggtcttaagagcaatgtgacaccctgaggctatccagctttcagacactccactctgacaccctctttttgaaagcaatgactgatcattttaaagaagagcaatactttgttcaaagccacggtgtctgttttaaaacttttcctttggaaacctagcaatatctgtacttaacccctttttagcatagtttcttgtcagggagtttacaggtcagtgtagagcttaaaattagcgtgtgagctgtgctatgttctgacagttttttacactttttagcacataaatagttacattcctgactgcgtcagttagcgttactataatttctcagagataggggtcctccttgaagccatatcctctgcacggggactggcccctagccagggatgtggcttgcagcttgtgtttcttcaggctgcaggagtaccccatctcttgtgcaaggtaattggtccagtagatttccaacatacctcatgctgactagatgaagtgcatgggtggtgaagtaaggagttgagtttatatagttctgaagtcgtttgtagtctctctcaaattgttagcctggggaacaaaccactgagagattttgctggtattggccttttctttttttttttttttttaattttgggtgaatgtttgaaaatcatgaatcagccaccattattaattgaagagctgggaatacctcgttaatgtatttttaaaactggtgttggaccctctgtgtatttcaggttaatacttttaagcagttttcagcacgtttatctcactttattctcgttctcctcggaccttcgtagccatatcacttgtataaaataggctgagatatagtgactgtaagctgtgatctcagtatacaaaggtaagctcttttattttctgattaaagagaaaaatagtcaattaagacaacatgcatatatgacaatcatatatgatgtatttgatctcttaggtcatatgtcatcgcattacctttaaaaattgtatggtctaaatgtaaaatagttatttttcaacatttgttttaatacccttgtaactgctttttactcaagacagacatttcacttacactaagtgtgtgtgtgtgtgtgtgtgtgtgtagaaacttaggatataacacgtatgtaaattacacacacatacctgtttaaatgtaagaattcagtgataggaacagttcatctaagaagattttaatgacagggcactcttttggccaaagcagtggaatttcctaagcagcaaggttggtaatagtgctggtaggatctgtatgtgtaagctgttacacaagctgaggatcaaagtgccaatttctcaaggagaaaaacttctccgagaaatgaaagtctctgatctgtgttgtatgccctaatacaacaacagcaagaagccatagaaaaaagcaatagaaaatgaaaaaaaaaaa

SEQ ID NO: 4693 - DNA, 11502 bp, Homo Sapiens
  NM_018388
aattcatttttaatcctttaatagtccacagtaatattgtcctaaagagggtacattggattttaattttgctttcaatatgacggctgtcaatgttgccctgattcgtgataccaagtggctgactttagaagtctgtagagaatttcagagaggaacttgctctcgagctgatgcagattgcaagtttgcccatccaccaagagtttgccatgtggaaaatggtcgtgtggtggcctgttttgattctctaaagggtcggtgtacccgagagaactgcaagtaccttcaccctcctccacacttaaaaacgcagctggagattaatgggcggaacaatctgattcaacagaagactgccgcagccatgttcgcccagcagatgcagcttatgctccaaaacgctcaaatgtcatcacttggttcttttcctatgactccatcaattccagctaatcctcccatggctttcaatccttacataccacatcctgggatgggcctcgttcctgcagaacttgtaccaaatacacctgttctgattcctggaaacccacctcttgcaatgccaggagctgttggcccaaaactgatgcgttcagataaactggaggtttgccgagaatttcagcgtggaaattgtacccgtggggagaatgattgccgctatgctcaccctactgatgcttccatgattgaagcgagtgataatactgtgacaatctgcatggattacatcaaaggtcgatgctcgcgggagaaatgcaagtactttcatcctcctgcacacttgcaagccagactcaaggcagctcatcatcagatgaaccattcagctgcctctgccatggccctgcagcctggtacactgcaactgataccaaagagatcagcactggaaaagcccaatggtgccaccccggtctttaatcccactgttttccactgccaacaggctctgactaacctgcagctcccacagccggcatttatccctgcagggccaatactgtgcatggcacccgcttcaaatattgtgcccatgatgcacggtgctacacctaccactgtgtctgcagcaacaacacctgccaccagcgttccgttcgctgcaccaactacaggcaatcagctgaaattctgaacagcagagttatggagtatcagaatctttccatggaaacctccatatggcctttctatatatattctcgtatgtcttattctaccaacacaacaataagcgtgttgcagtcaatgtattaagcaaagcaaacctgccagccagcaaattcaaataaaaaataaagcattaaaaatcaatggagatgttaaaacaacacaaatagaaaactagtaactaccatccatcctatttgaattatcaagcagaacatgaccataaaatttggtaacttgttacattactctttgtgattttctaataaccatgctaagtgtatttccacagtgagcttttggcttactatatacattcttggtggataaattgttcatctgtttttgaagtgttaccttactattttgtttacaagatagtctattgggttgattcaggatgtaacaaatatattcagtaccatttcttgtgttgtattgtgttgtgctgtgttaggtttttacatactgtagtgttttgctgtatatgtgtggtgtttgatttcaactaaagtgttattagtggggaacagaagtatatgtgcttaagaacatgacaggttcatgcaaatatgctctctttctttagaatatttctgtaggtttcttgggactgacatttaaaacgcctcacttttgaatgtgcacaaaacctgctcattaacatgcatgtgtataatttgtacctgcagatctgatgttgcataatacaatcaaattactagattttttaaagagagaaataattacctgcacaaagcagagaacttcataaaacattaacccctaattcactcttcttaaatagcttggcaaataagactttacctttaaatgaatttctcagcatttatactaaaaattatgtaaagtgctcattagattttttgtgtgtgtggcttgagaatcccatctcctaaattgagtgtctaaaactgagccatttgtcatcttcagctgagaaactggtacttgggagcttaaaaatatgctaattacaagttataaatcaaacggagagatgggggcatggagatagtttttacgtactggaggaaagtgtgtaaaaccatggcaatgtcaccttttacacaaatgccattttccaaatgcaaatggctcatgctctttagactactctttgaataacaagtaagatgcaatctagcaaaagtcagtcagggtgaaagagaattggttgcaaatgaggacttccctccccaaatggacagtcttctctgttgatcacagagggagcctgagtacaggcttggagaaatggctaggacagggaacagggaagcacttacaattattccttgatttattcaaaagaactgggaaagatggttgtagttgtctttagcttcggttcaactgagtttcgttttgttaaacagttcagtgaaggagaaagcacctgtgatatatggcaagtgtccccctgcccaaactttaacatcagaccctctcacatcataaccaagcctcttttatgcttgtttggattcgtttgcctttatatatgtttgaaaatgacaatagaaagggttttatcaccctttgaatgagacagagtggctatactccacagagctcagctgagttcacattactaatatttatgaaagaattttacaaccaaataattcctgtggtgtgtgacatatctcatccactctactcatttattaatgttattatacagtggtggaaacacatgacattttacatcaagtaatagatttaatattttctagtaaataggcgctcttccaccagaaagtataaaaccatcatatacatatatatatatatatataatggtttttctccttcatgaaaatgacaagtaaaaagcaaatctgattgaggataccttaagctggctagaagtgtttgaatcacagaacaatggaattagcaaaatcctttttatagttgatggaactgaatccaggggcatatgacttgcccaaggctaccttagccattgtgggacccagaaatatctcctgcttcccattgttcctccttttcacattgtttttgcttcagaacatttgatgctctcttccaaagcagacccatttggctcagaatataagagagcaaaattagctttctgggaattgatactctgttgatcttaattatccatccaaatcctgatcaacagtgctttctaaacagccttgcttgtattgagtcattgtcagctgttgacaatgttgcgtggaattagagatcaagagttgtcctgacctttacctatggactctttgaaccagttaatttctatttctgaaatcttaacattgctatagaagaaagtagtgtatgcctttttgaaattcatcatgtatggaactgagttttgtatgatccgtgccagtgcctctccagaagggcagatctgattacatgaatccaggagggatgcacctgagctagtctggatatattccttaaaggagacaagaacttttttgtgcaaaatgaacttttgtgtagtttgacatctgcatgcagtgaactgtctcacttaactttttcaactttgggcaaagatatacataaaccatagataatagacctacagtacagctgttttcatgttgcgttaagcactggaagacattaacaatgacttaccttaaagtaaaaggttccgtgaggggtatttagggccactgtatttttggtgccacaattttctacattgttggcattttaaaagttgttttctaaatgaacttaaagaaagaaagctcaaagccctaaagttttgatcaaattcaatagagttttcagaaaaaaatacaattttaagatagcactctttaaactagatgtgcaatgacttattcaaattatctttattcaagaaaagagaaaagaagaaagataagtcattagactataaatttccatttaaaaagacaagtcacaaaactaatcagtgactctaaacaaaaatttactggatgaattgtatatataaaattctaatcacttatgattcttagttaacattttataagctttgtattttacaggggcctctatttatccaaatttattgtttttgtccatttttctcagccttttgcaaaaaatatgcaagagtgctgaaacttggataaaacgggtcatgtatacagagaaaataatctaaaagttatctttaagagggttttagtagtgtcaactttttaaaaaagtactatgtgaccataacatacgtatattttaaagagggattaagattaaattaaaataaatggattcataaaattgctatttaaatacagtatttacttttgtaattgaagcatgattccacaaccagctgtggcattttatttcacttttctagatcagaggctttaatttgtagttaatcatgatgtggaaagtcatcttctctctactccatcaatttttttcatccgtttttgaacatgctgaagcactttgatcttgccataagtgttgtcctataccactaggtggtgttcactaatgggagggcctcagctcaccggctctccaatttgggaaaaagcaagtacctcctccctaccatcagcagaaactgaatgaaattaatctttgcaacttgaatctgttttaagtagcattaccaataagcatagtggtatctgaataaggaatgacatttacattacattttattaaataagagagaaagttaatgtgctacttgaaatgttatttggttctttgtccccctcattgcagagtatagataaggatgctcttaggtaaaatgcagccacaagttttccgagttcctttagtctgtagggtaggctatgaggtacagaatgattagaaactgaaatcctcattatttttctctcaaatacatttcacatacattgaaacagaaataggcaaaatttatgagggaaatctgatttcccaattctgatgaatagatatactaagacagtagccttgtttaaccagtgcctgtagaaggcactagaataaatagcatgtccaagagtataacaactttttttgtaaatttagttactagcctaatcaaactgtaaatataactcactaattggtaccatattttcatttttcttattgttcatctttaaggtttcattttattgcttttttgtagctctaagtaactaatcaatttaatttcaaaggaaagttaaagaaagtttaagcttttactgcatggattctgcccgcctagctaggttctgaactgacactgaagtatgacaagatacagattatagtccaaaactatcctttacagttcacaatttaagaacaaatttaactttatatacaaataataattgttatctaattatatttagttgttgctttggcaacaaaattacaacatggctacctttagacatttgtgtatgtgaacattttacttgtaaactataggtgatttgtgacagtatgagcctgtagaaaatacagctcaaaactatgaaaacagacatggttgagttcttttttaatcccaaaggcccatatataaaagctgaatttgtgtccttgtgtgactttttgtgaaaaagtttataacacatggattctagaatcaggctttatagtttatagaatttgttgtgtggatagggttattccacagtatttagacttcaaaacgcaatcattgcatttttaatacattacctaactttttttataacttaattcaaaattaccccattcaagtggcatagctgtagctgcaaaaattctgttttctggaattacatgagcaaatatagctatatgaggattaatgtatgactaaagcctcttttgaaattaattcatatttttaaaactatacataaagatactgtggaatgaccccttaacagtgtttaagaaacatatgctgcagttaattgactgtctcagttagggtgcggatgtgtgagacacaccttttttgcacttatgtacatagtccatgaaagcaatccttggagctttttttaaatgtaagaagtctgtgataatagtggaaaagttagtaagagagagttatttctaaggctttgaaaaggagggtgtttttgctctaagacttaactaaagcataatgttgctttgctgttacggaggctttctagtttgctacaggtcaccaaaagagaaggctagtaacaggtaacaggtcagcctcagctaacagcactgaacaagagtagaataacttcatcttttaacaagatcattagcaaagattgtttgctttttaaattaatcccccctataaacacacacacacgtgtgcacacacacacacacacacacacaccgggcagtttctagaacaagttttcctttttcagtggttgtaagcagtgaaatacctcatgtattacaagatagatattaccgttatgatagaataagatttcatctttcacagaaagtgatcagctgatatatgtgtcagttaaaatgtttatcaattaataggtatttaagtgacaaattgttaatgttgaccattgttcctcctttaagatccagtaaccaaaaccaaatcggtaaccattgaaagatgatatttaacagttaaggatggccagcatagggccgttcattcccttcaacaaagggaaaaaaaatgctcctggcacaactttataactggcttcatttacattatacctgttcagtggaagctgttttttgacctacctttaccagattacaaagtagttaactgtgccacttcagcctcccactgttttgttttaactaaacagaagagaaccagccaaaatcttacgtaacacaggagctggaagacaatgtttcaatctgaccatctctgccaattttagctcccacgccacctatagatagccagttaactttctttttgcccccaggcaatgaggcctagaagaggtcaaggttagaaaggttaagcatttgatcactacaggtacttgtagtacctagagaaggaacccatcctggggttggtggagttggtattgctactcgttttgatagttctcatttacagagaaagaaaaataagccaaagccagaaagcaatccaagccttacagttgtccaatacctcagggccagttggctagaattttcttttccctcagcccataatcacttagagttagccatacaacaaacagcctgacaatctgaccagcatttccattgatataaaatgtaagcattccttcattctgtagttaggaactccaacttcagccttatctccaacataatttcccaatttaacctatgtactgatatggacatttctttgtgaatatgccagattcaagaatgtatttttctaaggtcaatagagatacgacattttaagtcaggaaaaatcacctataaattagtaggaataactgtagaagcatcacaaaagataccccatgaatagatggcatggtgtgcatgctgacagccacggggtcatactctggagtttcaacatagaggctgtgtttcaataaataagacaaattggggaattaagtaaaacaaatggatgtaactgaggcccccccccaaaaaaagccctctattactaacctcaagaaaatatttagtttgactaatttgtgcagtttccagctcttctacttgttcttgcctgtaagagaatcactaatactcaaaagctggattattgaagagaaattttatctttaaatagaatccatccacaattatggtatatgtaaaaaaaatgtatgactatgaaataagtcgcagctctttgcagatattgcaaaatccttgctaggcatctacatcatattagttttttaaaaaatacctctgtaacaagacctaaaagtaacctaactattaagcagtgcttttttctctgaaaacacacaacctaaagatttatctgtcataaaactgcatggttccagagctttatttctgtgtagagatgctatttgttagtgatggaaacaaattactttgttgctatgtcttttgtgtctagcagttgagagaatgatatgaccatcatatcactggattatgggaatgaatgcccttttcaaaataaacttatttattaatattttaatattattttaatattataatattaataatattttaatattattgttgctgctttaacagaaaatgagccatttgtccccatgctcccaaattacaatgatttaaattaaaaaacttttgaaggattttcctaaatatattcttttttaaaggactaactttgtgcattcatataacaacaatttggaataatgtgaaaaatggaggcacataatttgggtggaaaatggcgattaaaaatatatataagaaaattattagccatgtgtaacatatttaaataatgaccagaatatttcatgagtaccaactcttcccatagtaattttcctccaaaatgcaatagctcattccctcaactgcagacgctttgattttttttcaagttatagtgctgtagtgcttgtttatgtttaaaagtgcacattatgcagctcattttagtatgctacttctatgtttattttttgttcttctaataaaatgcataaacttcttggttatgtctttttttatgaatccatattcacacattaggagttcacttgaaggctattcatgctctagtatattaatcctaatatttagtaattctaaaatgaaatttaaatttctgatttggctcaatgttatatttcatacatagagtaaatttatttccaaatataccatcagtattttgaattatgtagataatatatccgttgtgttagacctattactcttataagattgaagttactgacacaagaaaaacacttctattttaataaaagaatacttaaaattttgagagaatgcttactagtttctcttgtgcctcagaaatcctgaggcatattctaagatgcattattagaagtttctctttcccagttattcatgtctatcctgcatccctagtgtaacatatgaaaccagtgttgtttatttcatactttccagatgggcatcaatcatttcataacaatgagatgcatgaatttttccattaaaatgttttctctcacttaaaattggttatcttcaacaaatggcacagtaataaaaggatgatcatttttgttctttaagaaagtaaatgtaatttagtaatactttattctgccttatttcaaaatgcttcaaaaatgcgaatctggaacttctctgcattgaccactgttctggagttgggctgatagaaaactgcggtgaagagagtttagatcagaggctatggcagagcaaagtattactgatgtgtctcttaacagtgaagagggtcggggaggaggttgggtccttgtcaagtgtcagctgccctatacatagttctcttgccccttgtgccctgttttactatttctaaggtggttcccatgatggcatttcttgataagcccactttgagccgtttaatgttttgtaggtgtttctgtgagtctgataataccagcactaaaaacagttcagtatatagacatttacaagaggtcttaggcctcttcagaattcagttaatgtctttctctttgaggctgctgaatgttaggtaagaattcagggcaagcattcccgaccatcatcaaattggagacttggagtttctattggctggaagaaagttgacccacaggcaaaaccagatgtaaaccaagtttgtcttgggtacttttcaaattcttttcacagcatccttttctcatccctcatggtggcctctggccctggaaaatcctcatgatagcaacttatcaggcctgtttcctctgatagatctggacttttccccttaagtgctttcctgttgggcttctcagactatggagaactgctcatagttgagatctaagagacaaattaccctatggtgttcaagaatggccgtatttagtatactgcctgtcctggaagtgttcacatttaaaaaggcatgactttccaatgggcaaatatcagacacctacatgcatagataagggaaatatgttttacttaagcaaacttctaggcattgaatctcagtgtttaggtgcagagatggaattcctataagcaatgcagtcattcaccacatcaggaaggccaaaaaatgaacactctcgtaattttgttattatctggaaagttctgatatgataatgaacctaaaatactgaatagatagtgaacatcctaaaattccactgaccagaatccattcccatggtcatcatctgtagagggcatgatacaatgacaggcctgaggtatgattataattctggagtaatttaaagcctatatttgttaaactttaacagatggacacacattctctgattttctacttggctctttcctgtactagaaatgcgcatttaactaaaccttcccagcttttctgttcagtgcctgacttacactactcccttaggcaggaggacagtgggtgtctggggaataaaagccaagagctccaaacagaggattttggatacaaagggcagccaccaggaaatagctttgtgagagggacagactatctgattcccatttgtacaaacatgtccaaagcaaaagcacagcattctaaagtggatgcagaaattagtatacaatggcagttctggccagtgcagcccagcatttttctgttgtgcatggaaagaacacagtgaaaaggcaggcagggcatccggtgcaaagtgcaacagacatagacacacaaatccagttttcctgatgagagagggagctatctcttcataagtgatgcaatgcaatgcaggcatgtacaagtacaaggaaagatttatttttaaaaaatcatagtgtaactggatgaataccagcaacagcacctgctaaagcaaacagcctgttcattaaaaactggacttgagggaatggagaaagaatctgaggagcctgcagtcagcatgcttgcagagaccttatggctacagaagacgatgattaacccatagaggttcaatgtagttttcaagaagagggtgggaaagcataagatggggactaagactttgcctttaaccttcatgacatgaagaattgaatgactctttgttggaaaaaatggcagttatgagataattggatccatgttaattatatatatttctgtatatatagtaagtggttattgatgtgcctttgttaaccatttcactatttaataaatgtgtgtgtagtttattcaaaaaaaaa

SEQ ID NO: 4694 - DNA, 3531 bp, Homo Sapiens
  NM_018389
aaggccacgtgggggcgtgtcaggaagtgagtccagggcccgcctcccggggagtcggcctcggatgtccggaggctcctgggctgagccggcgacagagcccgggaaggcagcgagacgtgggcgccggcccagccccctcccgcgtccttcagccccaagccccgagcccctctgacccttccgcagccctccctccagccgcgcccggcctccggcagctccctgtacgcctccctccccctgcccgcccctccctcccacagccgcccatgacgccctctcggcacctcttcccactctgccacgcgtccttttcctgcaccttcgccccgcgtacctactcctgccccgccctgccattcctctcccctcccttctctctgcgacccctccctgttaggccccagcctcttctcccctcacaggtcttctctgtcctggcctcaccgccttatcctattcctctcccttgccctgtgtcttgtctcagagccccctcggggtgggagtaggttgtggagcagcacaactgggctcaccccaaagcagaacttctcaatccatgaggacaatggggaggcctttaggccagcccacatgtgacaatggagggctgcggcttccttgcggagagcacaagtgagctcactgccctggactccagggaatcagagttctggccgcggggtgacccagctcctctgctaccatgaatagggcccctctgaagcggtccaggatcctgcacatggcgctgaccggggcctcagacccctctgcagaggcagaggccaacggggagaagccctttctgctgcgggcattgcagatcgcgctggtggtctccctctactgggtcacctccatctccatggtgttccttaataagtacctgctggacagcccctccctgcggctggacacccccatcttcgtcaccttctaccagtgcctggtgaccacgctgctgtgcaaaggcctcagcgctctggccgcctgctgccctggtgccgtggacttccccagcttgcgcctggacctcagggtggcccgcagcgtcctgcccctgtcggtggtcttcatcggcatgatcaccttcaataacctctgcctcaagtacgtcggtgtggccttctacaatgtgggccgctcactcaccaccgtcttcaacgtgctgctctcctacctgctgctcaagcagaccacctccttctatgccctgctcacctgcggtatcatcatcgggggcttctggcttggtgtggaccaggagggggcagaaggcaccctgtcgtggctgggcaccgtcttcggcgtgctggctagcctctgtgtctcgctcaacgccatctacaccacgaaggtgctcccggcggtggacggcagcatctggcgcctgactttctacaacaacgtcaacgcctgcatcctcttcctgcccctgctcctgctgctcggggagcttcaggccctgcgtgactttgcccagctgggcagtgcccacttctgggggatgatgacgctgggcggcctgtttggctttgccatcggctacgtgacaggactgcagatcaagttcaccagtccgctgacccacaatgtgtcgggcacggccaaggcctgtgcccagacagtgctggccgtgctctactacgaggagaccaagagcttcctctggtggacgagcaacatgatggtgctgggcggctcctccgcctacacctgggtcaggggctgggagatgaagaagactccggaggagcccagccccaaagacagcgagaagagcgccatgggggtgtgagcaccacaggcaccctggatggcccggccccggggcccgtacacaggcggggccagcacagtagtgaaggcggtctcctggaccccagaagcgtgctgtggtgtggactgggtgctacttatagacccaatcagaatacggtggttgagaaggaaccagtgtttacaagtaatatcagaaagttgaaggaaccagtgtttacaagtaataccagaaagttgccaaacccttctctatcctctcgtatttctgagtttttgtccttcccgagggagcaccctagtgagagttgaaccccttccttctgcctccagggcctgtctgcctccacatcactctgaggacagggacaggcaacaaccttgaagggacagcaatggcaaagccacaaaggcttcactgtactcaggggagatggccctaccacagccacctggagagggttgggaagccttccgtctgcggtgggcaggcagcctcaccctgggcccacagaccggccttcctttggaggaaagtgtggcctggactgagggaggaaatgagcgagttccctctgacaccagcagatccccaggggctgctgggcagtggcctgggaatggggtggattgtgagaaagtgctcaccatctatacaccctgtatgtccagcttttgaacacaagggaaccatgcttctcttagaggttaagcagggtcattaacatcctcccccagtccctaacatcacattgtcctgcgtggctcctctggccctgagtggcacctgtccctctggtctcccagcacctggcccaggtaacagccttctgaaagcagagccaaggagctgcttctctcttctcccagttctacctccccagaagccttcctccccaggtggggctgatggagcaagggtccagactaggagccttccaccccagctgtgtctggcgcccctagatctctgcaagggaggtgttacagctggttctgagccgcttgccttgtgatggtaagacaccaacctttacattcttccctgaggttgtggctgacagagcctgcttggccccactgttagtccagcgagctcctatatcaaaatgccgtaggccgggtggcttacaaacaacagaaacgtattgctcacagtcctggggggctgggacgcccaagatcaagaggccagcagattcggactccgctgagggctgtttcccgatccatagatggtgccttctcgctgtatcctcaatggtagaagcacaaacaagcaagctccttcctgcctcttttataaggactccaaccctgttcatgagggttccgcccccatgacccaatcagctccaaaggccccacctcctaatactgtcaccttgggggtgagaattccaatgtgaatttgcagggggagtgggggacacacacaaatttcggggccataccacccttcaccacaccctcctgcgctcagggtggcttgcagtccctggcccttctggtgggcatttggtatgtcctttctcttggggtgatttctgatgtttttactctatatagtgaaaagctagggagagcgggtcttctcccccctccctctccagtcccctcacaatcccagatgggttctaatgcagctgctggggcctgatgccctgagttgtttgtgattcaataaagaatccataagaaaaaaaaaaaaaaaaaaaaaaaaaaaaaaaaaaaaaaaaaaaa

SEQ ID NO: 4695 - DNA, 5320 bp, Homo Sapiens
  NM_018390
gggaagatctgagttcatgtagctggtgttggcttagggtctgggaggaaggcttttgggaagatgtaaataagaacaaaatctgcagccacctgggaagcctggcctcagtgtggaagagaaggcagcaggattattacagaaccttgtgaagccaacgcgggcagccgccaggagctgcagaccgagaggatctcgtcctttcttgcggcccagggagaccaggcctttcattctgggctcgagaccaacaattcgaattccgaactccccctgcgtgtgggactcaaggttgcccagggctcacctctgatgggtgggcaggtgagcgcttccaacagcttctcgaggctgcactgcagaaatgccaacgaggactggatgtcggcactgtgtccccggctctgggatgtgcccctccaccacctctccatcccagggagccacgacacgatgacgtactgcctgaacaagaagtcccccatttcgcacgaggagtcccggctgctgcagctgctgaacaaggccttgccctgcatcacgcgccctgtcgtgctgaaatggtccgtcacccaggcactggacgtcacagagcagctggatgccggggtgcggtacctggacctgcggatagcccacatgctggagggctcggagaagaacctgcactttgtccatatggtgtacacaacggcgctggtggaggacacactcacggaaatctcggagtggctggagcggcatccacgcgaggtggtcatcctggcctgcagaaacttcgaggggctgagcgaggacctgcacgagtacctggtcgcctgtatcaagaacatcttcggggacatgctgtgtcctcgtggggaggtgccgacactgcggcagctgtggtcccggggccaacaggtcatcgtctcctatgaagacgagagctccttgcgccggcaccacgagctgtggccaggagtcccctactggtggggaaacagggtgaagaccgaggccctcatccgatacctggagaccatgaagagctgcggccgcccaggagggttgttcgtggccggcatcaacctcacggagaacctgcagtacgttctggcgcacccgtccgagtccctggagaagatgacgctgcccaaccttccgcggctgagcgcgtgggtccgagagcagtgcccggggccgggttcacggtgcaccaacatcatcgcgggggacttcatcggcgcagacggcttcgtcagtgacgtcatcgcgctcaatcagaagctgctgtggtgctgacgggacccttctgaagttcgggacgcggcggctgcagtttcacccccgaatttccaagtattgtgactttgtttgggccaaatgttggtgatcataggaccgatgataatacgttttcattttctttaaaatagagatggggtggctgggcgtggtgacttcgcctgtcttcccagcactttgggaggccgaggtgggtggatcatgaggtcaggagcttgagagcagcctgaccaacatggtgaaatcccatctctactaaaaatacaaaacttagctgggtgtgtggcaggcgcctgtagtcccagttactcgggaggctcaggcaggagaactgcttgaagccgggagatggaggttgcattgagctgacatcgtgccactgcactccagtctgaatgatagaccgagactccatctcaaaagaaaaaaaaacagccgagtgtgcagtgactcacgcctgtcatcccagcactttgggaggcgaaggcgggtggaacatgaggtcaggagttcgagaccagcctgaccaacatggtgaaaccccgtctctattaaaaacacaaaaactacctgggtgcgtgatgggcacctgtagtgccagctactcaggaggctgaggcaggagaatggcgtgaacccgggaggtggaggttgcattgagctgagatcgtgccactgcactccagcctgggcgacagagcgagactccatctcaaaaaaaaaaaaaaaaaaaaagatggggtctctctatgttggccaggttggtcttgaactcctggcctcaagtgatcctcccacctcagcctcccagagtgctgggatgacagtcaagaaccaccatggcagcccataatatgttttcttatttctgtattctccttgctgtggcgtctggagcccttacagacccagggagacactatcctcccacagctcactaattactaaacacagtgacagcccacttaggagccggcctcccctgtcagccaacccctcagctagttctcacaccaagcctatagatatatatgtgtgtgtatatatgtgtgtttatgtgtctgtgtgtatatatgtgtatatatcggtgtgtatatatgtatgtatgtttatacatgtgtatatgtgtgtgtgtgtgtgtatatgtgtgtatgtgtgtatatatgtatatgtgtgcatatgtgtatacgtgtatgcatacatgtatatgtgtatgcatgtatatgtgtatgtgtacatgtatatgtgtttatacatgtatatgtgtgtatgcgtgtatacgtgtatgtatacatgtatatgtgtgtatgcgtgtatatacacacgtatacatatatacgtgcgtgtgtatgtgtatatatatatatgtgtatatatatattttttgaggagtctcactctgtcacccaggctggagtgcaacggcgagatctcggctcaccgcaacctccgcctccctggttcaagcaattctcctgcctccgcctcccgagtagctgggatgacaggcatgtgccaccacacccgactaatttcatatatttagtagagacggggtttctccgcgttggtcaggccgttctcaaacttctgacctcaggtgatctgcccgcctcgacctcccaaagtgctgggatgacaggcatgagccactgtgcccagccgccgatatttctttaaattatgtttagggacagggtctttttctgtcacccaggctggagggcagtggtacagtcatagctcactgcagcctcaacctcctgggctcaagcgatcctctcagctcagcctcccgtgtagctggggctccagggacacacccccactgctggctaatttttgtatttttggtagagtcagggtttcaccacatggcacagtctggtctcaaattcctgggctccagtgatcctcccaccttagcttccagagtggccaggatcacaggcaggcaccaccatgcccaggtaattttatttttttgtagagacgtggtctggctatgttgtccagggtggtctcaaactcctgggctcaactgatcctcccacctcaacctctgccatagccaggacctcaggtgtcagccaccacacccacagctaattttttttgtagagatggggtctggctctgttgctcaggctggtgtgtagtaggggcacagtcatagctcactgtaaccttcaacgcctgggctgaagcaattctcccgcctcagcttcccaagtaactgggagtataggtgtacaccaccatgcccagctaattatttagtagtagtaggaggagtattatgtttgagatggagtctcgctctgtcgcccaggctggagtgcagtggcgcagtctcagctcactgcaacctctgcctcccaggttcaagcaattcttgtgcctcagcctcctgagtagctgggattacaggcgcccgccaccgcgcctggctaacttttgtatttttagcagagatggggtttcaccatgttgcccaggctggtcttgaactcccgacctcaggtgatccatccgcattggcctcccaaagtgctgggatcacaggcgtgagccaccgcacctggcctcaagccagtatttccctggccctaaatcattcctggctgggtcccagcccagtagagccagccccccagcccggagtgctactgaagtgttcaaaagttgtcaatcctcagccgttccctagtcctgttgcccggttctgccgaagccccttgaaggctgtggcctgggctgttccctcattcattcctgcctcccgagccaaacccaggtatccgcttgtgccctgcgtggtgtggcagcgtcttctctcgggaagggtcaggagtaatttcttctttcagtggcctctctgtgctagtcccggtcacctccgtgaattaaagtcctacaggtacaagggagaccccccccccacggaaggcgcccccagtccgtgtgggagactcgcacaccggttttctgcacaggtttctttctgcctctgaagcgtgaacggtcctagtttcagacgcagatcctgcaaatacttttttttgtttttttgagatggattttccctcttgttgttcaggctggagtgcaatggcacgatctcagctcactgcaacctctgcctcccgggttcaagtgattctcctgcctcagcctcccgaggagctgagattacaggcgcgtgccaccgtgcctggttaattttgtatttgtatttttatttatgttttgagacggagtttcgctctcgttgccgaggctggagtgtagtagtgtgatcctggctcactgcaacctccacctcccgggttccagcaaattctcctgcctcagcctcccaagtagctgggattgcaggcgcccgccaccacgcccggataatttttgtgtgtttagcagagacggggtttcaccatgttggccaggctggtctcgatctcctgacctcaggtgatccacccgcctcggcctcccaaagtgctgggatgacaggcgtgagccaccgcgcccggcctatacctcattttctacatgtcgcttgttggagctgctggttcaagttcccagccagccaatggatgccagcaccatttttactcccctttcccaagcaaatcgtgcatttttgtctaacgagagacatcagtttctcaggatgatcctcaagaacgttatggagtccatgttgcaataggttctctttgggacctaatgactcattttccaaaaatccgcttctacttttggtacccggttgctacggtgaaatgaaggtgccccgcatccagaaagacgcactcctggaccacaaccggcggctacctcagccccacggctctgcaggatcagggctcgggcaggccccgcggagatgaagaatttgcagggagcctccctgacttccgtcggctgtgaatccttgtctgtcaggggcgtatccacaaaatcaccgaattcatacagatcgtttaaataaatgaacatcattaaagtcaaaaaaaaaaaaaaaaaa

SEQ ID NO: 4696 - DNA, 3689 bp, Homo Sapiens
  NM_018398
cggccgctctcgtcgccgccgcagcgggcgcgtcggagggagcccagcatggccgggccgggctcgccgcgccgcgcgtcccggggggcctcggcgcttctcgctgccgcgcttctctacgccgcgctgggggacgtggtgcgctcggagcagcagataccgctctccgtggtgaagctctgggcctcggcttttggtggggagataaaatccattgctgctaagtactccggttcccagcttctgcaaaagaaatacaaagagtatgagaaagacgttgccatagaagaaatcgatggcctccaactggtaaagaagctggcaaagaacatggaagagatgtttcacaagaagtctgaggccgtcaggcgtctggtggaggctgcagaagaagcacacctgaaacatgaatttgatgcagacttacagtatgaatacttcaatgctgtgctgataaatgaaagggacaaagacgggaattttttggagctgggaaaggaattcatcttagccccaaatgaccattttaataatttgcctgtgaacatcagtctaagtgacgtccaagtaccaacgaacatgtacaacaaagaccctgcaattgtcaatggggtttattggtctgaatctctaaacaaagtttttgtagataactttgaccgtgacccatctctcatatggcagtactttggaagtgcaaagggcttttttaggcagtatccggggattaaatgggaaccagatgagaatggagtcattgccttcgactgcaggaaccgaaaatggtacatccaggcagcaacttctccgaaagacgtggtcattttagttgacgtcagtggcagcatgaaaggactccgtctgactatcgcgaagcaaacagtctcatccattttggatacacttggggatgatgacttcttcaacataattgcttataatgaggagcttcactatgtggaaccttgcctgaatggaactttggtgcaagccgacaggacaaacaaagagcacttcagggagcatctggacaaacttttcgccaaaggaattggaatgttggatatagctctgaatgaggccttcaacattctgagtgatttcaaccacacgggacaaggaagtatctgcagtcaggccatcatgctcataactgatggggcggtggacacctatgatacaatctttgcaaaatacaattggccagatcgaaaggttcgcatcttcacatacctcattggacgagaggctgcgtttgcagacaatctaaagtggatggcctgtgccaacaaaggattttttacccagatctccaccttggctgatgtgcaggagaatgtcatggaataccttcacgtgcttagccggcccaaagtcatcgaccaggagcatgatgtggtgtggaccgaagcttacattgacagcactctccctcaggcacaaaagctgactgatgatcagggccccgtcctgatgaccactgtagccatgcctgtgtttagtaagcagaacgaaaccagatcgaagggcattcttctgggagtggttggcacagatgtcccagtgaaagaacttctgaagaccatccccaaatacaagttagggattcacggttatgcctttgcaatcacaaataatggatatatcctgacgcatccggaactcaggctgctgtacgaagaaggaaaaaagcgaaggaaacctaactatagtagcgttgacctctctgaggtggagtgggaagaccgagatgacgtgttgagaaatgctatggtgaatcgaaagacggggaagttttccatggaggtgaagaagacagtggacaaagggaaacgggttttggtgatgacaaatgactactattatacagacatcaagggtactcctttcagtttaggtgtggcgctttccagaggtcatgggaaatatttcttccgagggaatgtaaccatcgaagaaggcctgcatgacttagaacatcccgatgtgtccttggcagatgaatggtcctactgcaacactgacctacaccctgagcaccgccatctgtctcagttagaagcgattaagctctacctaaaaggcaaagaacctctgctccagtgtgataaagaattgatccaagaagtcctttttgacgcggtggtgagtgcccccattgaagcgtattggaccagcctggccctcaacaaatctgaaaattctgacaagggcgtggaggttgccttcctcggcactcgcacgggcctctccagaatcaacctgtttgtcggggctgagcagctcaccaatcaggacttcctgaaagctggcgacaaggagaacatttttaacgcagaccatttccctctctggtaccgaagagccgctgagcagattccagggagcttcgtctactcgatcccattcagcactggaccagtcaataaaagcaatgtggtgacagcaagtacatccatccagctcctggatgaacggaaatctcctgtggtggcagctgtaggcattcagatgaaacttgaatttttccaaaggaagttctggactgccagcagacagtgtgcttccctggatggcaaatgctccatcagctgtgatgatgagactgtgaattgttacctcatagacaataatggatttattttggtgtctgaagactacacacagactggagacttttttggtgagatcgagggagctgtgatgaacaaattgctaacaatgggctcctttaaaagaattaccctttatgactaccaagccatgtgtagagccaacaaggaaagcagcgatggcgcccatggcctcctggatccttataatgccttcctctctgcagtaaaatggatcatgacagaacttgtcttgttcctggtggaatttaacctctgcagttggtggcactccgatatgacagctaaagcccagaaattgaaacagaccctggagccttgtgatactgaatatccagcattcgtctctgagcgcaccatcaaggagactacagggaatattgcttgtgaagactgctccaagtcctttgtcatccagcaaatcccaagcagcaacctgttcatggtggtggtggacagcagctgcctctgtgaatctgtggcccccatcaccatggcacccattgaaatcaggtataatgaatcccttaagtgtgaacgtctaaaggcccagaagatcagaaggcgcccagaatcttgtcatggcttccatcctgaggagaatgcaagggagtgtgggggtgcgccgagtctccaagcccagacagtcctccttctgctccctctgcttttgatgctcttctcaaggtgacactgactgagatgttctcttactgactgagatgttctcttggcatgctaaatcatggataaactgtgaaccaaaatatggtgcaacatacgagacatgaatatagtccaaccatcagcatctcatcatgattttaaactgtgcgtgatataaactcttaaagatatgttgacaaaaagttatctatcatctttttactttgccagtcatgcaaatgtgagtttgccacatgataatcacccttcatcagaaatgggaccgcaagtggtaggcagtgtcccttctgcttgaaacctattgaaaccaatttaaaactgtgtactttttaaataaagtatattaaaatcataaaaaaaaaaaaaaaa

SEQ ID NO: 4697 - DNA, 957 bp, Homo Sapiens
  NM_018405
cctccccaggctgattggcgcttctgcggcggatcctcgggcgggcagccgggccggcgcgtcacgtggcccacggcgtccagggcgaccagccgcgggccgcagggcatggaccttcaggccgccggggcccaggcgcagggggccgcggagccgtctcggggcccgccgctgcctagcgcgcggggggcgccccccagcccggaggctggctttgctacagctgaccactccagtcaggagagagagactgagaaggctatggatcgactagcccgtggaacacagagcattcctaatgacagtcctgcccggggtgagggcacccattctgaagaggaaggctttgccatggatgaggaggactctgatggagaactgaatacctgggagctgtcagaagggacaaactgtccacccaaggaacagcctggcgatctttttaatgaggactgggactcggagttgaaagcagatcaagggaatccatatgatgctgacgacatccaggagagcatttctcaagagcttaaaccttgggtgtgctgtgccccacaaggagacatgatctatgaccccagctggcaccatccgcctccactgataccctattattccaagatggtctttgaaacaggacagtttgacgatgctgaagattgagtgtggagctttctgccttgtaggtgggcgggcctccacgtcaagatctcttttcctgtcttggaggtgaaaagtcatatctgagaaaatgtttgcagtgacccctagtctggggtacacagaccagtgttccttattgacagtgttcaataaggccccgtcattctcgccagtctgttgttgttcttaatgggctcctccttgaaatgtgtgtgtgtttgtgtcaagaggagttgtgttctttgtaaataaaggttaaaaagagaaaccagtaaaaaaaaaaaaaaaaaaaaa

SEQ ID NO: 4698 - DNA, 3065 bp, Homo Sapiens
  NM_018410
ctatttgagtttgtggcgcgcgaggccctgcagtccgggttggcgcttgggtactggctgggtccgatgctgggtacgctgcgcgccatggagggcgaggacgtggaagacgaccagctgctgcagaagctcagggccagtcgccgccgcttccagaggcgcatgcagcggctgatagagaagtacaaccagcccttcgaggacaccccggtggtgcaaatggccacgctgacctacgagacgccacagggattgagaatttggggtggaagactaataaaggaaagaaacgaaggagagatccaggactcctccatgaagcccgcggacaggacagatggctccgtgcaagctgcagcctggggtcctgagcttccctcgcaccgcacagtcctgggagccgattcaaaaagcggtgaggtcgatgccacgtcagaccaggaagagtcagttgcttgggccttagcacctgcagtgcctcaaagccctttgaaaaatgaattaagaaggaaatacttgacccaagtggatatactgctacaaggtgcagagtattttgagtgtgcaggtaacagagctggaagggatgtacgtgtgactccgctgccttcactggcctcacctgccgtgcctgcccccggatactgcagtcgtatctccagaaagagtcctggtgacccagcgaaaccagcttcatctcccagagaatgggatcctttgcatccttcctccacagacatggccttagtacctagaaatgacagcctctccctacaagagaccagtagcagcagcttcttaagcagccagccctttgaagatgatgacatttgcaatgtgaccatcagtgacctgtacgcagggatgctgcactccatgagccggctgttgagcacaaagccatcaagcatcatctccaccaaaacgttcatcatgcaaaactggaactccaggaggaggcacagatataagagcaggatgaacaaaacatattgcaaaggagccagacgttctcagaggagctccaaggagaacttcataccctgctctgagcctgtgaaagggacaggggcattaagagattgcaagaacgtattagatgtttcttgccgtaagacaggtttaaaattggaaaaagcttttcttgaagtcaacagaccccaaatccataagttagatccaagttggaaggagcgcaaagtgacaccctcgaagtattcttccttgatttacttcgactccagtgcaacatataatcttgatgaggaaaatagatttaggacattaaaatggttaatttctcctgtaaaaatagtttccagaccaacaatacgacagggccatggagagaaccgtcagagggagattgaaatccgatttgatcagcttcatcgggaatattgcctgagtcccaggaaccagcctcgccggatgtgcctcccggactcctgggccatgaacatgtacagagggggtcctgcgagtcctggtggccttcagggcttagaaacccgcaggctgagtttaccttccagcaaagcaaaagcaaaaagtttaagtgaggcttttgaaaacctaggcaaaagatctctggaagcaggtaggtgcctgcccaagagcgattcatcttcatcacttccaaagaccaaccccacacacagcgcaactcgcccgcagcagacatctgaccttcacgttcagggaaatagttctggaatatttagaaagtcagtgtcacccagcaaaactctttcagtcccagataaagaagtgccaggccacggaaggaatcgttacgatgaaattaaagaagaatttgacaagcttcatcaaaagtattgcctcaaatctcctgggcagatgacagtgcctttatgtattggagtgtctacagataaagcaagtatggaagttcgatatcaaacagaaggcttcttaggaaaattaaatccagaccctcacttccagggtttccagaagttgccatcatcacccctggggtgcagaaaaagtctactgggctcaactgcaattgaggctccttcatctacatgtgttgctcgtgccatcacgagggatggcacgagggaccatcagttccctgcaaaaagacccaggctatcagaaccccagggctccggacgccagggcaattccctgggtgcctcagatggggtggacaacaccgtcagaccgggagaccagggcagctcttcacagcccaactcagaagagagaggagagaacacgtcttacaggatggaagagaaaagtgatttcatgctagaaaaattggaaactaaaagtgtgtagctaggttatttcggagtgttatttatcttcccacttgctctctgtttgtatttttgttttgtttttgattcttgagactgtgaggacttggttgacttctctgcccttaaagtaaatattagtgaaattggttccatcagagataacctcgagttcttggtgtagaaattatgtgaataaagttgctcaattagaatttttagggttctctttgataggcctgtttttctgatgtgtgtgttttttttgggggggggttatttgtttgtttgtttgtttgtttgtttgtttttgagacagtctctctctatcgcccaggctggagtgcggtggcacaatcttggctcactgcaacttccgcctcccgggttcaagcgattcttctgcctcagcctcccgagtagctgggattacaggcgcgcgccaccacgcctggctaatttttgtagttttagtagagacggggtttcaccatattgaccaggctggtctcgagctcctggcctcgtgatccatctgcctcggcctcccaaagtgctgggattataggcgtgagccactgctcccagccgtgtgttcttttttaaatttagatatgtccagagaatcctctctcctgtttcccatttcattcgagaatattgtttgcttgtgagacgtaagttcgagccctgcatgcaatgacccttgaaggaaaataaacagtcctggtggtcccagacgctcctgcagccacaaaaaaaaaaaaaaaa

SEQ ID NO: 4699 - DNA, 4729 bp, Homo Sapiens
  NM_018420
gccgccagcgcttccatccccgccccggcgggtccaagccggtgccgggcgcccaggggttgccgcgctgggcgggagggcagcgcctgagagggcggtggggtggcggggttcctgcgcgcggcccgccatggaggtggaggaggcgttccaggcggtgggggagatgggcatctaccagatgtacttgtgcttcctgctggccgtgctgctgcagctctacgtggccacggaggccatcctcattgcactggttggggccacgccatcctaccactgggacctggcagagctcctgccaaatcagagccacggtaaccagtcagctggtgaagaccaggcctttggggactggctcctgacagccaacggcagtgagatccataagcacgtgcatttcagcagcagcttcacctccatcgcctcggagtggtttttaattgccaacagatcctacaaagtcagtgcagcaagctcttttttcttcagtggtgtatttgttggagttatctcttttggtcagctttcagatcgcttcggaaggaaaaaagtctatctcacaggttttgctcttgacatcttatttgcaattgcaaatggattttccccctcatatgagttctttgcagtaactcgcttcctggtgggcatgatgaatggagggatgtcgctggtggcctttgtcttgcttaatgaatgtgtgggcaccgcctactgggcacttgcaggatcgattggcggcctgttctttgcagttggcattgcccaatatgccctgttaggatacttcatccgctcctggaggaccctagccattctggttaacctgcagggaacggtggtctttctcttatctttattcattcctgaatcacctcgttggttatactcccagggtcgactgagtgaggctgaagaggcgctgtacctcattgccaagaggaaccgcaaactcaagtgcacgttctcactaacacacccagccaacaggagctgcagggagactggaagtttcctggatctctttcgttaccgggtcctgttaggacacactttgatcctgatgttcatctggtttgtgtgcagcttggtgtattatggcctaactctgagtgcgggtgatctaggtggaagtatttatgccaacctggccctgtctggcctcatagagattccatcttaccctctctgtatctacttgattaaccaaaaatggtttggtcggaagcgaacattatcagcatttctgtgcctaggaggactggcttgtcttattgtaatgtttcttccagaaaagaaagacacaggtgtgtttgcagtggtgaacagccattccttgtccttgctggggaagctgaccatcagtgctgcctttaacattgtttatatctacacctctgagctttaccctacagtcatcaggaatgttgggcttggaacttgttccatgttctcccgagttggtgggattattgctcccttcatcccctcactgaaatatgtgcaatggtctttaccattcattgtcttcggagccacgggtctgacctccggcctcctgagtttgttattgccggagacccttaacagtccgctgctagaaacattctccgaccttcaggtgtattcgtatcgcaggctgggagaagaagcattatctttacaggctttggacccccaacagtgtgtggacaaggagagctctttagggagtgagagtgaggaagaggaagaattttatgatgcagatgaagagactcagatgatcaagtgaagagccccagattccccctaagaagcaaaggatcgtcttttatgcctctggctaaggcaggttcttccatgactcctaagagagttgtaaaaatagaggcttggcttgaatgtacatagatggtacctggcatggactgatgtttttaggcacagaagttggagaagagatttcatgaaagacaacatcactgcattgagagaatagttgttaatttgtttagaatttaagttctactcagaatcataacatctggcagaacagcccaaacccacattccaaagtggtaggctcatttgtttctagagatttcatcatgtcgcttttccttcatcatgatctaaataaaggcagatatgtaaaatttctcaccattttggtggggtaagataagctattattaagatttaatccttataccatgttggacatttgcccctatcagttgctcctcaggaatcttctggtacaggttaacatcagcattttcattttgtgtccagggaaaagcacccagaggtcatctgtgtgtcccgagaccctccagctttttcttagctgatgaaatatgagtcctcagcttggttcccagcctgctgattgacttgggctgctggtgccttgagtcccacagatgattcattaggaaaagccagatataccaaagcggtttactcagagtcaggggtgtagctctggctgcctgtcagctcccttggatactatattgtatgatttcttcctttcccactaatatgcacatccagaaaaatttccatctgagattctagtacttcaaaatcatgcatagtaaatgagaaagctttaagtagagggcagttaaacagtgacatgttgagcacctggaggaaaaaaaaggtgcagtttttaataagagagaaaatgaaattatctttgataaatttttgtttgttttgctttcagcattgtgccatgagggatttggacaatatttaagaacttcttgtcctagatcagccccaatctgtttaatcaaaatggaaggttcagtaatttcatgggaaaccttggtttttcattaagtgctaccaactttcaagtgaatcttgtatttgatttcctaaaatcatgtcttgaaaacatgttttctcatgaaacttgaatactatctcaaataggaatataaacctggagtcaacaagcttaggcagcattgatttaggtcactttcccagtgaggaaaatttctgtgttttcagaatttccatttctactaacctcttggagaaaaagaaattgaattagaggtaaatagaagacgtcactgtggctgcttctggaagtgctggaagcatcaccccaattggctccaaatactgtcatgttttcttgcacactgacttctggtttccactgtatcagtatgtacctttgtaattgttatttttatgtcttttatgcccttgattattagttgggctcttcataaacagaggccatctctactactgtttatttttccctgctgtgcccagaacattggcgtagacacagtaagaacctagtaaatattactgtttctagccatcagggagattgtggaactcctcccagtataatttttacaaactccaagcaaatctgacccaaactcccaaattgtcaagtcctgcttaactttctctggaaaatagaccccttctcaacatcagaataggaagagaggaagaacttacaaagacacttaaaagttattcttaaatggtggttgggcatttaaaacagtgaactaacatatatataatttttgattagttggagctttctttgtattataagagtaatatatctcattacagaaaatttggaaactataaatttagaaacgtatcacccatacgtccaacatcgaaagaaaaccagtgttatgactttgttccatttgaagactaattgggagtccatctctctattggcactgggttcgattgcctctggctaatagagttcaattagttctatccctgggtttcctttcttagctatggggtggaagataggagggggagatctacaatttgaatatgtgttacttaataaggctaggctggccatcagttgcttatttcagatgtgtcactaaattttccttctagatggtccttgagcaaaacttaataattactgttttttatttccactgcctttataaaatcaaaattttctccttttgataaaaactgttgaatactattgatgtagagaatgtgtatatgtgtatatttgcattgattaaattattggaaaacttttcattgacaggtaatgtattttggttgtgcggatggtttgtaaaaagtatcctgtttttttaattctattcaaaattaaaaattttttttcctaaaataaagcaagaaaaataaatgtaagatatataagaaaccccagagtttccagggtgaaagttcacattagcagcttgtccaaaatatttacacctcacaaatattttgaaagaaaccatgttgaaattttctgattttgtgagttacaaccacagcccagtaaaaccaatacttgttatttggctactttcaagcaatgcagatattctttagtatttaaaaatgagcaaataaacaaaatgaggcaaataaatgaagaaaatgagtttctgagacactgtttaggtaaccataaatcagacagatatttttatggtgggcaaattgatgaagatacttttagtaggtgatttatattcataacaaatacatattgaaataattgtcactactgtatcagaattaaaaaccagcttcacattaggacttctccatacaaatgctttatcattggttcttaaattggaaaaatatctataaatgattacatttttaagctaaataaaatgcagatattttggcttcttgtgaatgtaataaagaatcataaaacataaaaaaaaaa

SEQ ID NO: 4700 - DNA, 3330 bp, Homo Sapiens
  NM_018421
atctttgaggcgcgcgcaccgcacccggtcccgactctgtggcttcctgggggcgggttcgccgtcggccccgcccccgcccaggtgtctccctttgggaagctgcccgccgagtctccgagatttgtccctggtggtcccgcggacccctcgtccctccgcagtctccggctggcagcgatggagggcgctggggagaacgccccggagtccagctcctctgcccctgggtccgaagagtctgccagggatccacaggtgccgcctccggaggaagaatcgggggactgcgcccggtccctggaggcggtccccaagaaactctgtgggtatttaagtaagttcggcggcaaagggcccatccggggctggaaatcccgctggttcttctacgacgaaaggaaatgtcagctgtattactcgcggaccgctcaggatgccaatcccttggacagcatcgacctctccagtgcagtgtttgactgtaaggcggacgctgaggaggggatcttcgaaatcaagactcccagccgggttattaccctgaaggccgccaccaagcaagcgatgctgtactggctgcagcagctgcagatgaagcgctgggaattccacaacagcccgccggcacctcctgccacccctgatgccgccctggctgggaatgggcccgtcctgcacctcgagctagggcaagaagaggcagagctggaggagttcctgtgccctgtgaaaacaccccctgggctagtgggcgtggcagctgccttgcagcccttccctgcccttcagaatatttccctcaagcacctggggactgaaatacagaacacaatgcacaacatccgtggcaacaagcaggcccagggaacaggccatgaacctccaggggaagattctccacagagtggggagcctcagagggaggagcagcccttggcctctgacgccagcaccccagggagagagccagaggattctccaaagcctgcacccaagccttctctgaccatcagtttcgctcagaaagccaagcgccagaacaacaccttcccattcttttctgaaggaatcacacggaaccgaactgcccaggagaaagtggcagccttggagcaacaggttctgatgctcaccaaggagttaaagtctcagaaggagctagtgaagatcctgcacaaggcactggaggccgcccagcaggagaagcgggcgtccagcgcatacctggcggcggctgaggacaaggaccggctggagctggtgcggcacaaagtgcggcagatcgcggagctgggccggcgggtggaggccctggagcaggagcgggagagcctggcgcacacagcgagcctgcgggagcagcaggtgcaggagctacagcagcacgtgcagctgcttatggacaagaaccacgccaagcagcaggtcatctgcaagctctctgagaaggtcacccaggacttcacgcacccccctgaccagtctcctttgcgccccgacgctgccaacagggacttcctgagccagcaggggaagatagagcacctgaaggatgacatggaagcttaccggacccagaactgcttcctcaactccgagatccaccaggtcacaaagatctggagaaaggtggctgagaaggagaaggcccttctgacgaagtgcgcctacctccaagccagaaactgccaggtggaaagcaagtacctggccggtctgagaaggctgcaggaggccctgggggacgaagccagcgagtgctcagagctgctgaggcagcttgtccaggaggcactgcagtgggaagctggggaggcctcatctgacagcatcgagctgagccccatcagtaagtatgatgagtacggcttcctgacggtgcccgactatgaggtggaagacctgaagctgctggccaagatccaggcattggagtcacgatcccaccacctgctgggcctcgaggctgtggatcggccgctgagggagcgctgggctgccctgggcgatcttgtgccctcagccgagctcaagcagctactgcgggcaggagtaccccgtgaacaccggcctcgtgtctggaggtggctggtccacctccgtgtccagcacctgcacactccaggctgctaccaggaactgctgagccggggccaggcccgcgagcaccctgctgcccgccagattgagctggacctgaaccggaccttccccaacaacaaacacttcacctgccccacctccagcttccccgacaagctccgccgggtgctgctggccttctcctggcagaaccccaccatcggctactgccagggcctgaacaggctggcggccattgccctgctggtcctagaggaggaggagagcgccttctggtgcctggtggccattgtggagaccatcatgcccgctgattactactgcaacacgctgacggcatcccaggtggaccagcgggtgctccaggacctgctctcggagaagctgcccaggctgatggcccatctggggcagcaccacgtggatctctccctcgtcaccttcaactggttcctcgtggtctttgcggacagtctcattagcaacatcctccttcgggtctgggatgccttcctgtacgaggggacgaagtacaacgagaaggagatcttgaggctacagaatggcctggaaatctaccagtacctgcgcttcttcaccaagaccatctccaacagccggaagctgatgaacatcgccttcaatgacatgaaccccttccgcatgaaacagctgcggcagctgcgcatggtccaccgggagcggctggaggctgagctgcgggagctggagcagcttaaggcagagtacctggagaggcgggcatcccggcgcagagctgtgtccgagggctgtgccagcgaggacgaggtggagggggaagcctgacttggccacctcccctccccacagccttcctcacccttggctggcagacccactggaggtcaggcacggaccagtggcccagccctgggtgtcccatcaccatgtgaccttggacatgtcccttcccctctctggccctcagtttccccactgggacattgtgtgctgcaaagccattggttgggctacttcttcataggcacttacttacccagggatgccaccctttcgtcacctcttccacagagcactttggcatgtaaacaagcaagagcactgcctctatagggtaacctggaacattctctaggttatatcaatataaaacaatgtaaatggtggaaatcattcataagctttggaacttaaacagttctcagttaaaaaaaaaaaaaa

SEQ ID NO: 4701 - DNA, 3783 bp, Homo Sapiens
  NM_018424
caggccgccggcccgggagagcgcgcggcggcggcggcggcgggacggccccgagcgcgccctcccgcctgcggccactcgcagccggcgctggccgggccggcgcgccccgcaggcggctagagcgcggcctcggcctcggcgcgggcttgccccgggccgtagcccgcgagaggcggcgcgggcggccgagggcactgacggcgtcgcgggacgctcccgggcggcggcgcagcggcagcggcagcggcagcggcagcgcagggggcggaggcagggggcgcccccagccaggatgctgcggttcctgcgccggacctttggccgccgctccatgcagcgctacgcgcggggcgcggcggggcgcggggccgccgggctgggggacgagcgcgatggggggccacgggggggcccggccgccgccgcctcctcctcggcgctgcccgccgcgcccgggggcagcgtgttcccggcgggcggcgggcccctgctcaccggcggcgcggccgtgcacatctccgccgccggcgccgccaaggccaccctctactgccgcgtcttcctgctcgacgggaccgaagtgagcgtggacctgccgaaacatgccaaaggccaggatttgtttgatcagattgtgtaccacttggaccttgtggaaacagattactttggcctccagttcctcgactctgcccaggttgcgcactggctggatcatgccaaacccataaaaaagcagatgaaaattggacctgcttatgctttacactttcgagttaaatactattcttcagaaccaaacaaccttcgtgaggagtttacaaggtacctgtttgttttacaactcaggcatgacattctttctggaaaattgaaatgcccttatgaaacagctgtggaattagctgctctctgtctacaagcggagcttggggagtgcgagcttccagaacacacaccagagcttgtgtctgagtttcggttcattccaaatcagacagaagcaatggaatttgatatcttccagagatggaaagagtgcaggggaaagagccctgcccaggcggaactctcctatctgaataaagcgaagtggctggaaatgtatggggtagacatgcacgttgtcaggggaagagatggctgtgaatattctcttggactgaccccgacaggcatattaatctttgaaggagctaacaaaataggcttattcttttggcctaaaattaccaaaatggattttaaaaagagcaaattgacactcgtggtggtcgaggatgatgatcagggacgtgagcaagagcacacgtttgtgttccggttagacagtgccaggacctgcaaacacctttggaagtgtgcagttgagcaccacgcattcttccgactgcggacgccaggaaacagcaaatccaatagatccgactttatcaggctgggctctcgcttcagattcagtgggcggacagaatatcaagctacacatggctccaggttacgaagaaccagcacctttgagaggaagcctagtaaacgttatccatcccggagacattcaacgttcaaagcaagcaacccagtgatagcagcccagctctgctctaaaacaaatccagaagtccataattaccagcctcaatatcatcctaatatccatcccagccagccccggtggcatcctcactctccaaatgtcaggccatcctttcaggatgacaggtcgcattggaaagcatcggccagtggagatgacagccattttgattatgtccacgaccagaaccagaagaacttaggagggatgcaaagtatgatgtatcgagataaactcatgactgcactttgagagactgaagcatctctcttccattcaccttcatagtttcattgcattccatgaaaagtgtcttggcctcagatggatggatgtgtttggacgagtgtctttaaggagtagtcctgaaaggtgtttttggtgtccatgtaaatatttgaagataaaaccactatagcttgtcataatttactgttgactgcattctcattaaaatgaaggtaaaggctcaggaatcatattgatgttctgattttaaaattggagtcaaagtctatgtttatcattttactatgttcctgatgttctttgttatttaattaatgggagcaaataaaaccagaagagcttgggaagattgctcagcatatattcctgtcgtagaagttgagattgctagggtccagtttccctagtgtggcctggacgagtcatttccccttcattgacctcattttccccatctgaaaagagagggttggactaagtgatctccaaggtcctttccaactctaaaattctgcaatttgttaacatttcattttgtttaggttgaggacatacattcaaactaattttatcacaaggaaaactgcaatacccacttccttgacagagttactcctttcagaagctaaataaagtatataacttattagatgttatatagatacagggggactttgaatttcacatcttaaagcagttgagctactttgaatttaagcagtcgtactaatcttaaattgcatagcatttgttttgatcgaatttgctgctcaagtatgggaataatttttaatgtcttaatgattggtgctgctaacttgcgtgatttcagaagacataattgtgaatacacactgtcagaattgggggattggtttttaccctagacttcactcttaaaaagcaacgtgcaatcaagatcatttatggctcaaatgaaagcatataaggttttcttgaagttgtgccaaagcattctgtagagtaggatgagatggttgttgccctagtctgttggtagaaccagaaatcaatatgttgtcttttaggttaaagcttgtaccaaaatatttatttcccccatttcaagccctgagtcaaacatttttttctcttaataatagacctgaaatgttttattagtatttctgtgaaatcagttgattcttgtgccatttttgtatatgtaattgtaattttgcccatgttaggccctctaaaaaatgtttgacatcctttgagatattttattactaaaatctgatcttttttggctactgcaaaaatctattcagcaagaaggtatcagctgcataccttgcacagtggagctgactacctataaactctccctaaggcatttgtttacaggtgtattccattttagcagacgttctgatgctcagtgtatgtgctgcatacaaataaatgtgttctgaatcttttcatcttattgatagcatttttacaaatgtgtttccaaggaataaagattattcttgctttttttttgactccatcttcattttttttaaattgattcttgttgctatgcagaagtctcatttgtgaatgaccttggtaacagaacagttggcttttggaagtctgaaggtgagcattcagttaggtgggtggagcaagatcatcctagaatgaggctgctcttggcaagagtggatcttataggcacagcagctgatgcctttcttcatctggggcaactctggtgaaggttgtcctgcctgtcacaggtgctgagtagagagaagtggtggcagtgggatttcctcagtaatagtcctgtaaaggtacgtgtttgtcctggctacttgtgctcttcctggcaggaaggcatccaaacccttatctgtgggctcctggaaattgtgtatgccatataataccctctaataaatacctctctgcttaaa

SEQ ID NO: 4702 - DNA, 3762 bp, Homo Sapiens
  NM_018427
acagaggctgtggctggaaggagctgggcatccggcctgaggcgcagcggtcgcgttagttcggcccaatggcggcaccgctgcttcacacgcgtttgccgggagatgcggccgcttcgtcctctgcagttaagaagctgggcgcgtcgaggactgggatttcaaatatgcgtgcattagagaatgactttttcaattctcccccaagaaaaactgttcggtttggtggaactgtgacagaagtcttgctgaagtacaaaaagggtgaaacaaatgactttgagttgttgaagaaccagctgttagatccagacataaaggatgaccagatcatcaactggctgctagaattccgttcttctatcatgtacttgacaaaagactttgagcaacttatcagtattatattaagattgccttggttgaatagaagtcaaacagtagtggaagagtatttggcttttcttggtaatcttgtatcagcacagactgttttcctcagaccgtgtctcagcatgattgcttcccattttgtgcctccccgagtgatcattaaggaaggcgatgtagatgtttcagattctgatgatgaagatgataatcttcctgcaaattttgacacatgtcacagagccttgcaaataatagcaagatatgtaccatcgacaccgtggtttctcatgccaatactggtggaaaaatttccatttgttcgaaaatcagagagaacactggaatgttacgttcataacttactaaggattagtgtatattttccaaccttgaggcatgaaattctggagcttattattgaaaaactactcaagttggatgtgaatgcatcccggcagggtattgaagatgctgaagaaacagcaactcaaacttgtggtgggacagattccacggaaggattgtttaatatggatgaagatgaagaaactgaacatgaaacaaaggctggtcctgaacggctcgaccagatggtgcatcctgtagccgagcgcctggacatcctgatgtctttggttttgtcctacatgaaggatgtctgctatgtagatggtaaggttgataacggcaaaacaaaggatctatatcgcgacctgataaacatctttgacaaactcctgttgcccacccatgcctcctgccatgtacagtttttcatgttttacctctgtagtttcaaattgggattcgcagaggcatttttggaacatctctggaaaaaattgcaggacccaagtaatcctgccatcatcaggcaggctgctggaaattatattggaagctttttggcaagagctaaatttattcctcttattactgtaaaatcatgcctagatcttttggttaactggctgcacatataccttaataaccaggattcgggaacaaaggcattctgcgatgttgctctccatggaccattttactcagcctgccaagctgtgttctacacctttgtttttagacacaagcagcttttgagcggaaacctgaaagaaggtttgcagtatcttcagagtctgaattttgagcggatagtgatgagccagctaaatcccctgaagatttgcctgccctcagtggttaacttttttgctgcaatcacaaataagtaccagctcgtcttctgctacaccatcattgagaggaacaatcgccagatgctgccagtcattaggagtaccgctggaggagactcagtgcagatctgcacaaacccgctggacaccttcttcccctttgatccctgtgtgctgaagaggtcaaagaaattcattgatcctatttatcaggtgtgggaagacatgagtgctgaagagctacaggagttcaagaaacccatgaaaaaggacatagtggaagatgaagatgatgactttctgaaaggcgaagtgccccagaatgataccgtgattgggatcacaccaagctcctttgacacgcatttccgaagtccttcaagtagtgtgggctccccacccgtgttgtacatgcaacccagtcccctctgacggcagaaatttgtgactgagatgtgacatttgggattccccatcacttgtcatgccctcagcacccagcttgtgccattgggcattgatggcattgaactagagcgagtgcctgcctcggctgtggcacttccaggttcgactgaatcaagcatctgaagactgggtttttttgttgttgttgttccccttacagacaaaatgaagactatcatgtgcaatcttttacagtggggttgatgatacatttggaaggatttgcttgtttaatatgtacattttttgtgttaacagctttttgacacaattactgggtaatttctaatataggcagcagactgttttacgggttgctgttttaacatgggtttttgtcagatccatggtcttaggacttgactgatgagctttcagtgaagaatcctctaagataaaacttctatttaaagactttaactagaaagtgtttattttggctacattgttcaccttctgctgtattggtatttgtctgttgggatttcaagggagtgtagagaagacagaaggaaagctgagagctggcccgacatggtctgggacacagagttggagctggcactgaagatctccagggacttcagagaccaataaaagcccatagggaagagagagaggatatagggaaacagaatcagatgtgtaatatacttggcacagcgaaaaaatggatttaaaagacaaaaatggaggtccaggtagatgtaattcacacagactgaaagtgagttcgggcttgtgtaaaacacatgagattggatttgaccccttggctctcaagtgtccccttagatctagaactgctccttggtggccattagatcgagtcagttttgatctgcatcacttagttattgggaatttctttgttggaaacaggaaaatttttttagattatttggtgtacggttttgctcacaacaataggtggaagttgctagtgcagtcttggtctgatggctgtgtgcatcgcacattcggcttggtgaaatccttctctaaagcctctttttgtatttttataactaaacagaggaagtcttcagaagacctcgctttaaaacaaatttgtgcaaacactgctagagtcattttgaagctcaagcattttcactttgtttcttacatgtgtacttttttgtttacttgtgaaaatggccatctttaagcatatttattttctgccactttatttaaaggcaagcaatattttcttgatcataaatattttgtaatgaaatacttcctcttttccagggctttgtatgcacttgtataattacattgatggcaatgtagagtttgaatttcagtctgtaaatacttttttggaaaatagaaatttttattgctttaaagttttggatatgggtggttttcttttccgggtttggtggaaagtaatttgagaactttaaggttgtctttttaactgctggcaaaatgttgattttttaatattagataaaacgagtaaacgaaattccccagaaattagtagtaagtggggtctttgtgggttgggaagtagttttaatgtagaaagacatttacatataagtctgtttaatttcaaaggagtttgtgaaaaaaaatccatggtgaaaatgaaacaatgacatggttaatctggaacttacgttcttataccaataaaaggtacctcaatacatgttctttcaaaaaaaaaaaaaaaaaa

SEQ ID NO: 4703 - DNA, 2065 bp, Homo Sapiens
  NM_018428
gggtctccgaacctgaaaccgggagcttcctgctcgtgttcgctgttgagaagctacccgcggggttgtagacctcggacctcatggcagagataattcaggaacgcatagaagatcggctcccggaattggaacagctggagcgcattggactgttcagtcatgcggagattaaggctatcattaagaaggcttccgatctagagtacaaaatccagagaagaacccttttcaaggaagactttatcaattatgttcaatatgaaattaatcttttggagctgatccagagaagaagaacacgcattggatattcatttaagaaggatgagattgagaattctattgtacaccgggtacaaggtgttttccagcgtgcctcagcaaaatggaaagacgatgttcaactttggctctcctatgtggctttttgtaagaagtgggctactaaaactcgacttagcaaggtattctctgccatgttggcgattcattccaacaaaccagctttgtggattatggcagccaaatgggaaatggaagatcgattgtcttcagaaagcgcaaggcaactatttcttcgcgcactgcgctttcatccagagtgcccaaaactttataaagaatactttaggatggagctgatgcatgctgaaaaactgaggaaggagaaggaagaatttgaaaaagccagtatggatgtggagaatcctgattattctgaagaaatccttaagggcgagttggcatggatcatctacaaaaattctgtaagcataattaaaggtgcagaatttcacgtgtcactgctttcgattgcacagctatttgactttgccaaagatctacaaaaagagatttatgatgaccttcaggctctacacacagatgatcctctcacttgggattatgtggcaaggcgagaattagagattgagtcacagacagaagagcagcctacaacgaaacaagccaaagcagtggaggtcggccggaaggaggagaggtgctgtgctgtgtatgaagaggcagtgaagactctgccaacagaggccatgtggaagtgttacatcaccttttgcttggaaagatttactaagaagtcaaatagtgggttccttagagggaagaggttggaaagaaccatgactgtattcaggaaggcacatgaactgaagcttctgtcagaatgccaatacaagcagttgagtgtttcgttgctgtgttataacttcctgagggaagctctggaagtggcagtagctggaactgaattgtttagagactctgggacaatgtggcagctgaagctgcaggtgctgatcgagtcaaagagccctgacatagccatgctttttgaagaagcctttgtgcacctgaaaccccaggtttgtctgccattgtggatttcctgggcagagtggagtgaaggtgccaaaagccaagaagacactgaggcagtctttaagaaagctctcttagctgtcataggtgccgactcagtaaccctgaagaataagtacctggattgggcttatcgaagtggtggctacaaaaaggccagagctgtgtttaaaagtttacaggagagccgaccattttcagttgactttttcaggaaaatgattcagtttgaaaaggagcaagaatcctgcaatatggcgaacataagagaatattatgagagagctttgagagagtttggatccgcagattctgatctttggatggattatatgaaagaagaattgaaccacccccttggtagacctgagaactgtggacagatctactggcgagcgatgaaaatgttgcagggagagtcagcagaggcatttgtagctaaacatgctatgcatcagactggccatttatgaagatgaagaatacagtcagctttgtgaaatagtattgcaagcaagccccgtgggcaaatttgtattgagtccatctgtaatttgctcagtgatggcagacaagatggctgtctggttttgagacacactttaattttatgttaacttgttaaatctttttaaaaattaaaaaatttttatgattgaga

SEQ ID NO: 4704 - DNA, 11097 bp, Homo Sapiens
  NM_018429
agttgcggcgtcctgtgagcgcggggatgctgggaggagggtgaaatttagccatcggtgtgtggcagggtcatgaaaaagcggcggcggcgggagagaggaggaggcggcggcggggcagtgaaactacggtagctgccccctgagctggtggtgtggctttgtggggagggcgtagttcctaatcccctttccgggcagccgccggggctcggggctgtgagcggccgtgaggctgcctccccgggccccctgcctccgccatgttccgcagggcacgccttagcgtgaagccgaatgtcaggcctggtgtaggcgccaggggctccacagcttccaatccccagcgtggacgggagtctcccaggccgccggatcctgccacggactctgcttccaagcccgcggagcccacagatgtgcccacagtcgatttcggtggagcggagccccaagaaaaggctcctaggagcagtactgaaaagactggtggtgacaatgatgttgaagaatccagtagatcttcctctactgtttcacagagaagaaagcgaatatcaagtacttctagcctggttaagtctagtgtcagtgttccttcagaatctcatcccttatctacaattaatcaagaggctccacagccaactgccacttcaacaaaagagaaacagccatgctcagacagataccgaatatacaaagcccagaaactgagggaaatgttaaaagaagaattgagaaaagagaagaaacaatggaaaaacaaatatgctataaatgaaagtcagaggccaccagatcgttcaaaaatgactatgagagacttcatatattatctaccagataataatccaatgacttcttcactggaacaagaaaagaaaactgaaaagccatcgactccagtccagacaagagagcaagaaggtaagagtactcctaatgctgaagataatgaaatggaagaagagacagatgatgggccattactggttcctcgagtaaaagtggcagaagatggttccattattttggatgaagaaagtttaactgtagaagttttaagaacaaaaggcccttgtgttgttgaagaaaatgaccccatatttgagcgcggttctacaactacatactccagctttaggaaaaactattactctaaaccatggtcaaataaagaaacagatatgttttttttagccatcagcatggtaggaactgacttttctatgatcggacaactttttcctcacagagcaaggatagaaattaagaataaatttaaacgggaagagaaaacaaatggatggagaatagacaaagcattccaggaaaagcgcccttttgacttcgatttttttgctcatttgcttcagaaagttcttgctgaagaagagaaaagaaaacaaaaatctgttaaaaatcacagtttaaaggagaagaaatccaccaaaccacggaaaaatgtaaaagtgaaaaaagttgcctgtgaaggagtgaataatgatccagatgagtctatgagttctagaatttcagacacggaaagatctcagaaggatgctcagacagttgaagaagagtctctgaccttatcaagggaggatgcagagcaggttgcattagaagtagacctaaatcaaaagaaaagaaggaggaagaagcaagatggagctaatgaactgggagtaaacaatcttttagaaaatgccactgttcaggcgggtccttctaaaggagaaaaacacaagaataaatgtcaggctataaggcctgagctaaaggaaggtgaatgcagtaaggagcagatgctttcctgcacacaaaacatagatggcattgtgggttttgcctccactgaaaaagttgagaaaagaactgaccccatcctttcattaagtaatcaacaagatgccacatcagtagcaactgagtcttcagaatcaagcacttcagatttgccttcattcgaagttggaattagagcattgtgtgaggtgaataatgctgagggtagttgtatagaagaaagaaatgttgacctaaaaaataattcactggaaattgatcaaacagaaaatgttaaaccaatgttgagaggtcgcttccaaagacctaaacccaatttgtcaagggctgggaagaaatcagttctttcacaaggcaaaacagagtcagagagcaagaattcacattcaaaaacttcagttgaaaagaaccacgtggaaaaagataaaatgaatacattggacattttgagaatggagactacagagagagagaatccagaagctgaaactgtatctgttttgggtgaaaaaaattgtctgcaggaagggagtcaactaaaggctttaagacctgtacaagtgaggggccgattgcaaaagccaaagccaaatgcaggtaaagctgctgaaagaaaagaaattctcatatcacaggaagaaattggggccaatgtagagaagaatgaaaatgaatcctgtgctgatagagatactcctcaacacatggaagatcaatcgcgtaaagattttgaagaggaagatgtcatattacagcctgagaaaaatgattcttttcaaaatgtgcagccagatgagcccaaggttcttaatgaatgtctaagcgttcaagagaataataaggcaaataaacttaaccaagtcccaattctaaggactcgatttcagaaaccaaagccaaatataggaagaggaactggaaggagagaaatttcctcaaaggaagaggtactagagaagattcttgtctctggggaaatggcggcagcattgagagaaactgtaagactagacacctcaccaaaggagatggtaccagcagagattaatactaaagaaatgcagtcagatttaaaagaaactggaagaagagccatttctcccagggagaagattctagatgtgattgatgacaccatagaaatggagacaggtctgaaagcaatgggaagagagatttgtctaagggagaagacgccagaggtgattgatgccactgaggaaatagacaaagatttggaagaagctggaagaagagaaatatccccacagaaaaatggcccagaggaggttaagcctctaggtgaagtggagacagatttgaaagcaactggaaatgagagttccccaagggagaagacaccagaggtgactgatgccactgaggaaatagacaaaaatttggaagaaactggaagaagaaaaatatccccaagggaaaatggcccagaggaggtcaagcctgtagatgaaatggagacagatttgaacgcaactggaagagagagttctccaagggagaagacaccagaggtgattgatgctactgaggaaatagatttggaagaaactgaaagagaagtatccccacaggaaaatggactagaggaggtcaagcctctaggtgaaatggagacggatttgaaagcaactggaagagacagtttcccaagggggaagacaccagaggtgattgatgccattgaggaaatagagatagatttggaagaaactgaaagagaaatatccccacaggaaaatggcctagaggaggttaagcctctaggtgaaatgcaaacagatttgaaagcaaccggaagggagatttccccaagggagaagacaccagaggtgattgatgccactgaggaaatagacaaagatctggaagaaactggaagaagagaaatatccccagaggaaaatggcccagaggaggtcaagcctgtagatgaaatggagacagacttgaaaacaactggaagagagggttcctcaagggagaagacacgagaggtgattgatgctgctgaggtaatagagacagatttggaagaaactgaaagagaaatatcgccacaggaaaatggcccagaggaggtcaagcctgtaggtaaaatggagacagatttgaaagaaattagagaagaaatttcccaaagggaaaaggtgctagcagagttcagtgctataagggaaaaggagattgatttgaaagaaactggaaaaagagacattcccatcatggagaaagtatcaggaaagatggctgttgttgaagaaatggaggcagatttgaaagaaactggaaaagaaaattttagagagagaggatctgaagagatctgtgttactgaggaaaaggtggcagaattgaaacaaactggaaaaacagacatttctccaagggaaaacgagctagaggagaccagtacctcaagacaaactgacacacatttaatgcagagcggtagcaatgacttcagtgctgtgccttcactagatattcagaacattagcagtgaagtactgtcgatgatgcatacacctgtagaagaaaaaagaaattctgaaaaagaagtatcaagtcacttcagtcatttcaagatttcttcacagactcatgaatctgataaaacagaagtccaggggattcaatctccagatgttccagagcagttttcagatattaatttaagcaaatctcttcctcaagaacagaagccacttgaaattaaaccagcaccttttgtgaggagccgattcaaaagaccaaaaccaaacttagcaagagcagctttgaagagagagactacagaatcagaaaaatatatatatgagaagaaatcagaaaccaagaaaatggagactattgtgatgcaagaaaataatgaacaaactgatactctcccttctcaacatgatgaagcttccctaatgatatcaagagaaaaagacacattaggtcacaggaatgaggaggctgtgatattgccatgtacacagactgaaaggaacctttcaccttcaaattcttgtgaacctaaagaggagtctcagtcagcaccagtccagaaaaatgactcagttgtttctgtggggactaataatgtaaacactttccagcaagaaatgaaggaaagtgttatccaaactgctcgacaagtaaggggccgacttcagagaccgagaccaaatataagaaagacaggacagaggcaaatagtagacaaaggtgaagccaaaggcataattaaggaaggaagaacgatattaccaaaagatgaaactgaaaagaaagtcttaactgtgtcaaattctcaaattgaaactgaaattgaagttccatcgtccgcagttccagaacacagaatgtatgaaaatcaaagtcaggtggttcttgtagaaaaccttcatgttaacaaaacaaatgaaacaatcagacatgaaaataaaccgtatgttcctagttcagcacaaatgacaagaaggaaattccaaaaggctaagccaaatttgggaagagcacacagtaagaaagaggaaccagttttagaaaaagtcacaacagatcagagcaaggaaggcaagccagaagatcatttgctgcagaaaggagcttccaacacccagctccttctaaaagaaaaagctgagcttctgacatctctggaggtttcagcaagaaaagattgtgtaggttccaaagagtctgctttggcaaaaatagatgcggaattagaagaagttggaccatcaagaagggttggagaggaaactgtaggagataattcaccatcttcagttgttgaagagcaatatctcaataaactaacaagctgtccacaaccgttaaacgaaacaagttactctaaaattgccctggatgggaaaacaactatctcttctacatctgagtatgagagaaatcgtggtgaaaggagaagtcataaaaagttcaaaccaaatgtcaccagaggtcgtggatcaaaacgagttcggggtaagacctctaagaaggaacctagagcttccaaggccatgctggtgactcttcgggcttcccaggaagaagatgatgatgctgacgattttgagtctgactatgaggaagaaagctatcatcttgctcccgaagaagtaaacaaagctccagtatttgtacctgttggtctcagatctcctgaacctgtttctgctcagattgaggaaacaatggaagagcttgaaataactgtgaatgtcccagatgtaggatgcatagctgttgttgaacatgagctaccaaacacagatgtgactactgaagaaatgaaacaagaagaaaatttgagtgtaccgtttgaaatgaccacaagtgaacatatccaagatgaaccaggtaccaatgatggaagcaccgaagctgcaataactttacttacaatgggagatctagtattgcagtcagagatcagtagtgaacagggtgatgtaggagtatgtataattcctcatgttcattcaaaggataaaagccatattccttctagcctagataatgtaaatcacaaaattgttcatgaatgtcaggaactttcttcacctgtcattactacatctcctgcatcatttgaagaaaacaagattgtattggaggaacaaagttccagagaagaaataagtttaatggagaaagtaaaggagaatgctacaccaaccaggaatacaatttctaaagtgaccagtaatttgagaataagaagtaggcttgctaagcctaaaccaaatcttgagaagactttagggaccaacaggcttgatgattatcaggaagtttccagtttgtgtgtaaccaaaggggcagaaatggaaactcaaagagaaacagagaaaaatgcttccaaagcaacagaattggaaaataaaaacctcggaccagttacaacagcagagaataaggatcagagcaaattggcatgtgtacatggtatcaaagggaccagtatttcttcagaagtaaacctaactgaaagaaacgaaaatcaagaagagagctctcaggaggttcacatgttgtcagttgctccagttgcttcctctgagacagggccctgcacacttggtttggataggggtcttggtgaaaattctgttgaagagccccagataaaggactctaaaggagacagtgtgcttacacttcctgtgccagagtatacaccaacaagtattccagaagtccaacaagagaatataatcaatcctcaagacctaacagtgaatctagttgctaatgtacctcaagatggagaagatgaacaagcctttattttaactctggtggaaatcccagccaatgcagtagaagaatttactgatgccactgcacagttcatgccaaaccctttactgccagctcccatattggtcaaatcagtgaataccgaagaaaggggtgacatgagtatttgtttaccagcaacttcagttggtcaagatgccatgggtttatctatttctggaagagataattctaaaaagccgcctgataatttggatcttgtatctaggaagagatttcaatgcaggcttgataaaaatgaccacattcctcctgccaaaaaacgttcactcactttaagagatgactgtcaagaatataccactgaggtgcactcaaaggaattaacaaatgtttttgaggaaacaggggagtctcacaagggacaagatatttttcttacctcaggaagcacactgacaactccagaacctcaaagacagcaagttgaagcagcttttcagagtagaggatctagatctcctgatgcatgcatggacaagaatgtgcctcagttacctcaggatgaaatgattgtgtctgataaggaagaaagaactgatgctgctcctaagtctcagcaaatggatagcagaacatcgtcttctaaagcctcactatccagacctggcagaagacccctgggatttttatctttaatatgctcaaagaatagtttggagtctgatgaacctatgcaagtccatagtaagaaacgcctaaaacctcttatacctggattaagaaagaaattgaaaagatctaatccattcaatgaaagccaggaaaaaaatcgagagtcctctgatctgcttccatctccaagtgttattactactcaatctgagaatattagcagctcagcaactcaggtttcttgtgatcagcccttactgaaagaaggatataaaagtgcccaaaagcgggcccctcaaggggaggcaaccacagtctctgaatatttcttcaatgatatcttcattgaagtggatgaaacagaataaaacaatcttttctctttttcttttttaaattaggtctaggatttccagagtcaattacatcaacaaaacagtatttagagcaaaatatcactgtcttatttttctttaggttgattttgaatacttaatgagcttgatttgaagcttttataatcagtggaaaacatttctgaggttcctttcattctgactgattcagcattttgcaaatagcaagcaattaagactgctttctcagacagaaataacaactcttgtttacattttgactcttcctgtgctaagcacacatggacatttgggaatgttgtggatatatgtctctgtatgaattgcagtgcagacagatttgggggttaattgtatcatatttaacatttagcaacttcttttgtgaagattttttatttttagggggagatgatgaaggatgaaggctttttcatttgcttctaagtacagtcatgtatcacataatgaagtttaagtcaatgatggaccacatatattacagtggtcccatgcaattaaaatggagataaattcctatcaactagtgacattatagccatcataacacagtgcattgcttttttatgtttagatatgtttagatacacaaatacttactattgtgttacaactgcctacagtattcagcatagtaacacattgtagaggtttgtagccgaggagcaataggctataccacatagcctcagtctgtacggtgtgtagcagcctgtaccatctcagtgtttgtaagtacactctgcgttgtttcacacaagatcacctaacaaggcaattcttagaacatgtagttaagggacacgtgactatatgtgaaaacaaattgtcaaacttcactttagtatggcaaatgttaaagaacttttctattatcagctgtttgtctgactgaaaaatacatatttttctaattcatggtgatgtaacattagtcctaattgaaaaactagtatttaaacataattatttataaagatgacacatcaaagggcttatttatttttaaattttttatttaaaaggatattcagttttagctatttttacccctcagattgtagataaagaaggcattaaatttatgtttgtctcctttttctgtttaattttaaagatatttaaaatgatataactaaaaatgtttagctggtgtatatgttttgaatacctttttcccctcagtttagtatattgactttgtactgtaaatttttctgcttttcttggataatctcaggattttcatgaggatagggggaactcaactttatttatgagacaaaatttccatacaaagctcaatctcctttatacacccacagacataatattagtttttaaaaagccaatttcttcatagttttttcccattaaattctcaaggaacacttggatctttaagcacggaacataatcatgatgttaaaaacagagaaaataaggctttataaagttaatgattatcatcagtatgaatttaaggtttgttttaatttcaagatttgattttttatacgtgtaattctattatctacccaagcagatctgtagtggttccaattagacttctcaaacagcaaatttatcctgattttatttgaaaagcctcttggattgatagtatagtagctcaggcattggaaactttctgcaaactgttttgggtttgcaggccagatggtctctgtggcagctactcagctctgcaatttcagtgtgaaagaagccatagacagtacttgaatgaaggactgtggctggattggccttttagtttgaccccctacattaggccccaaattttcttaccctgaggtgctgatatctgtatggatgagttatttgtcactaaagttatgagttgtgcctaaaagttaaaactgttgactgtattatgtaatgatcagtatttcagttgggaagatattttagagtctagataattatgtttgtatattgaaaaaatggtggccagtttttaagttccttaatagaagagaattatgtctcagcacatataacagtaatgctaatttattgaaactactgctgttagagcacttcttattcattgtcttttagtgaaatttatggcgtaacactttgtcagagaggaggctatataattcggagcggaaattgtctataagtaggcatttatttcatgattgatatgtcacagaaatcatggtagtaaatcacattgctatttgaataccctgtttttgtaagtttttaaaactcatattctgaaaagatttcattctcttagtgttagcttgggagttagattgccatgattaaactattatttatccttgtgtaatattagtttttaactttaacatctgtttctttttaatctataatgagctagttttatggaaaatggaatttcttactatataaagaatacagagactcattgtattagagaatcaagtcagccagctaaagtatcctactgttaaatccttaaacctaattttggaaaagagaaagttaatcaatgtatttaccttacatgttggaaagaactatgttaggtctgattcatgtgaagaagatgttgcaaaggatttatttcacaaattttaaaggagatatgagtaaaagtttttatcttttcttgactttttctcctgaacacttatgtcttagcaagtggtcaacatgaggatttgaacgcctaattgttggtaaatggttgaggcatgacaaaaatattaatatccactgtttaccatcatgttatttgaaacaaaagtgaccatgtatactatcttgcttgaagaagtctttgacagaaaaagcaatatcatgtcatttataaattttcttgttctaaagaaagcagttatatatatatataaattatgtaaataaaagttattttatatcattaaaaaaaaaaaaaaaaaaaaaa

SEQ ID NO: 4705 - DNA, 1865 bp, Homo Sapiens
  NM_018434
cgcgagagggactttgtgttccgctgaccctcctcggggcgcttcctcccgtgccgcccttcccctcccccgccgcgtccttgcgaggcgcctcccattcggtgggaccgacccggggggatggagggggcacgcttctacaaccctcctgggaccccgaagagacgcccgcgtgcgacctgagacgccgccctcgccgagggcccatgggcgcgtccccacaggcgggcagtggacgtgagggcggcgagcggcggggccgcggcgtccaggagggccgcgctcgggctcggccccgcgcaggccgcgcgcgcgcgctcccgccgccgcccgggccgcgcccgccccgcctctaggcgccggccccggagcccggtccgcgagcagcggcggctgccggagggacgatgagctgcgcggggcgggcgggccctgcccggctcgccgcgctcgccctgctgacctgcagcctgtggccggcacgggcagacaacgcgagccaggagtactacacggcgctcatcaacgtgacggtgcaggagcccggccgcggcgccccgctcacgtttcgcatcgaccgcgggcgctacgggcttgactcccccaaggccgaggtccgcggccaggtgctggcgccgctgcccctccacggagttgctgatcatctgggctgtgatccacaaacccggttctttgtccctcctaatatcaaacagtggattgccttgctgcagaggggaaactgcacgtttaaagagaaaatatcacgggccgctttccacaatgcagttgctgtagtcatctacaataataaatccaaagaggagccagttaccatgactcatccaggcactggagatattattgctgtcatgataacagaattgaggggtaaggatattttgagttatctggagaaaaacatctctgtacaaatgacaatagctgttggaactcgaatgccaccgaagaacttcagccgtggctctctagtcttcgtgtcaatatcctttattgttttgatgattatttcttcagcatggctcatattctacttcattcagaagatcaggtacacaaatgcacgcgacaggaaccagcgtcgtctcggagatgcagccaagaaagccatcagtaaattgacaaccaggacagtaaagaagggtgacaaggaaactgacccagactttgatcattgtgcagtctgcatagagagctataagcagaatgatgtcgtccgaattctcccctgcaagcatgttttccacaaatcctgcgtggatccctggcttagtgaacattgtacctgtcctatgtgcaaacttaatatattgaaggccctgggaattgtgccgaatttgccatgtactgataacgtagcattcgatatggaaaggctcaccagaacccaagctgttaaccgaagatcagccctcggcgacctcgccggcgacaactcccttggccttgagccacttcgaacttcggggatctcacctcttcctcaggatggggagctcactccgagaacaggagaaatcaacattgcagtaacaaaagaatggtttattattgccagttttggcctcctcagtgccctcacactctgctacatgatcatcagagccacagctagcttgaatgctaatgaggtagaatggttttgaagaagaaaaaacctgctttctgactgattttgccttgaaggaaaaaagaacctatttttgtgcatcatttaccaatcatgccacacaagcatttatttttagtacattttattttttcataaaattgctaatgccaaagctttgtattaaaagaaataaataataaaataaaaagtctgtaaaaaaaaaaaaaaaaaa

SEQ ID NO: 4706 - DNA, 2210 bp, Homo Sapiens
  NM_018437
agacatatgacagaagactgaacaaccagaagttatgaagataggtactgtgggtgttagaaagattcacggcaaaacagggaagcatctaggctgcttgtggaagtcagaccaaaatagcaggaaggtattgcagcaagatggatttgggaaaggaccaatctcatttgaagcaccatcagacacctgaccctcatcaagaagagaaccattctccagaagtcattggaacctggagtttgagaaacagagaactacttagaaaaagaaaagctgaagtgcatgaaaaggaaacatcacaatggctatttggagaacagaaaaaacgcaagcagcagagaacaggaaaaggaaatcgaagaggcagaaagagacaacaaaacacagaattgaaggtggagcctcagccacagatagaaaaggaaatagtggagaaagcactggcacctatagagaaaaaaactgagccacctgggagcataaccaaagtatttccttcagtagcctccccgcaaaaagttgtgcctgaggaacacttttctgaaatatgtcaagaaagtaacatatatcaggagaatttttctgagtaccaagaaatagcagtacaaaaccattcttctgaaacatgccaacatgtgtctgaacctgaagacctctctcctaaaatgtaccaagaaatatctgtacttcaagacaattcttccaaaatatgccaagacatgaaggaacctgaagacaactctcctaacacatgccaagtaatatctgtaattcaagaccatcctttcaaaatgtaccaagatatggctaaacgagaagatctggctcctaaaatgtgccaagaagctgctgtacccaaaatccttccttgtccaacatctgaagacacagctgatctggcaggatgctctcttcaagcatatccaaaaccagatgtgcctaaaggctatattcttgacacagaccaaaatccagcagaaccagaggaatacaatgaaacagatcaaggaatagctgagacagaaggcctttttcctaaaatacaagaaatagctgagcctaaagacctttctacaaaaacacaccaagaatcagctgaacctaaataccttcctcataaaacatgtaacgaaattattgtgcctaaagccccctctcataaaacaatccaagaaacacctcattctgaagactattcaattgaaataaaccaagaaactcctgggtctgaaaaatattcacctgaaacgtatcaagaaatacctgggcttgaagaatattcacctgaaatataccaagaaacatcccagcttgaagaatattcacctgaaatataccaagaaacaccggggcctgaagacctctctactgagacatataaaaataaggatgtgcctaaagaatgctttccagaaccacaccaagaaacaggtgggccccaaggccaggatcctaaagcacaccaggaagatgctaaagatgcttatacttttcctcaagaaatgaaagaaaaacccaaagaagagccaggaataccagcaattctgaatgagagtcatccagaaaatgatgtctatagttatgttttgttttaacaatgctcaaccataaagttgtggtccaatggaacatacagcttaatagtttatgcgtgattttctcaaaatattgtaaaacttttgacaatgctcattaatattattttttctatttgtagaccatatctgaaagaaataacattttttaaggctctaccacatagacaatatcatgctagaatgtgtgtgtgtgtgtgtgtgtgtgtgtgtgtatgtatgtataggtcggggagaggatagtggtgggaacagacaaataaggaagcggggaggactggataattggttttcccccctaagaacatttatttacgtcttaagagcagataagtgactaagactgaacacatacattttgtggagtatatagttttcttgtaaatgctgttcaattattaatgtaacagtagcatcaaaattttattcaggctttagttgactcttttggtcagttttaacaattctccttaaaagatattttggagtgatgaatgtagtttacttttgtatttgaattttgattttctatttttattttttaaatattgtatttgtgcacaatgtacattaaatcattattacatgcttaaaaaaaaaaaaaaaaaaaaaaaa

SEQ ID NO: 4707 - DNA, 1565 bp, Homo Sapiens
  NM_018438
aggaactagtgcggaggtccggggagcggccgcgcgttcgggagcttcggccctgcgtaggaggcgggtgcaggtgtgggtgctgagccgcccgccgcctggagggggagacagcttcaggacacgcaggccgcagcgagggcccgggccctggggatcccaggccatggatgctccccactccaaagcagccctggacagcattaacgagctgcccgagaacatcctgctggagctgttcacgcacgtgcccgcccgccagctgctgctgaactgccgcctggtctgcagcctctggcgggacctcatcgacctcatgaccctctggaaacgcaagtgcctgcgagagggcttcatcaccaaggactgggaccagcccgtggccgactggaaaatcttctacttcctacggagcctgcataggaacctcctgcgcaacccgtgtgctgaagaggatatgtttgcatggcaaattgatttcaatggtggggaccgctggaaggtggagagcctccctggagcccacgggacagattttcctgaccccaaagtcaagaagtattttgtcacatcctacgaaatgtgcctcaagtcccagctggtggaccttgtagccgagggctactgggaggagctactagacacattccggccggacatcgtggttaaggactggtttgctgccagagccgactgtggctgcacctaccaactcaaagtgcagctggcctcggctgactacttcgtgttggcctccttcgagcccccacctgtgaccatccaacagtggaacaatgccacatggacagaggtctcctacaccttctcagactacccccggggtgtccgctacatcctcttccagcatgggggcagggacacccagtactgggcaggctggtatgggccccgagtcaccaacagcagcattgtcgtcagccccaagatgaccaggaaccaggcctcctccgaggctcagcctgggcagaagcatggacaggaggaggctgcccaatcgccctaccgagctgttgtccagattttctgacagctgtccatcctgtgtctgggtcagccagaggttcctccaggcaggagctgagcatggggtgggcagtgaggtccctgtaccagcgactcctgccccggttcaaccctaccagcttgtggtaacttactgtcacatagctctgacgttttgttgtaataaatgttttcaggccgggcactgtggctcacgcctgtaatcccagcactttgggagaccgaggcaggtggatcacgaggtcaggagatagagaccatcctggccaacacggtgaaaccctgtctctactaaaaatacaaaaaattagccgggcgtggtggcgggcgcctgtagtcccagctactcgggaggctgatgcagaagaatggcgtgaacccggaaggcagagcttgcagtgagccgagatcacgccactgcactccagcctgggtgacagagcgagactctggctcataaaataataataataataaataaataaaaaataaatgttttcagtaaaaaaaaaaaaaaaaaa

SEQ ID NO: 4708 - DNA, 10759 bp, Homo Sapiens
  NM_018440
attctccgcggcgcggcggcgagtgctggctgcggtaccctcccgctcgcttgtccgtctgcgcgcccgcgatgtgaccagccgactgggggcgggctggcggctctgcctgcggcagcgcatcggtttttctcctggcaggtccctaattgagccgtgattcccttggagccagagacacccaccaggggctcggagcgccgcgctccggggctggaggcagctgcagcgctcgggtccgcgcggccgggtgcagtagcctcagtcccagccgccgcctcgctgagtcgtgtgccctggcgaatgcccggcgcccggcacagctgagccaaggcgactggtgcagagcggcggcgcctggtcctgcacttgccgctgctgccgggctgtgccggggcggcggcgctgcgcgccggagtttgcagaggctgcctccgagcgccgtccgccaggaagactccctgcctcctgagtcccaaaaacacgagatttttctcctatttcagcagttggccacaacttcattgctgggaaaaggccaagaaagaagagagaactctcaccacaacatttcaaagggaatacattgccagaacttggaatactctactggacaaacatttcctccaaggacacagctctctgcctccatgtcaccacctttgaaggactgactgattccctcggctggtgccagtgcctgctcctgccatggggcccgcggggagcctgctgggcagcggacagatgcagatcaccctgtggggaagtctggctgctgtcgccattttcttcgtcatcaccttcctcatcttcctgtgctctagttgtgacagggaaaagaagccgcgacagcatagtggggaccatgagaacctgatgaacgtgccttcagacaaggagatgttcagccgttcagttactagcctggcaacagatgctcctgccagcagtgagcagaatggggcactcaccaatggggacattctttcagaggacagtactctgacctgcatgcagcattacgaggaagtccagacatcggcctcggatctgctggattcccaggacagcacagggaaaccaaaatgtcatcagagtcgggagctgcccagaatccctcccgagagcgcagtggataccatgctcacggcgagaagtgtggacggggaccaggggctggggatggaagggccctatgaagtgctcaaggacagctcctcccaagaaaacatggtggaggactgcttgtatgaaactgtgaaagagatcaaggaggtggctgcagctgcacacctggagaaaggccacagtggcaaggcaaaatctacttctgcctcgaaagagctcccagggccccagactgaaggcaaagctgagtttgctgaatatgcctcggtggacagaaacaaaaaatgtcgtcaaagtgttaatgtagagagtatccttggaaattcatgtgatccagaagaggaggccccaccacctgtccctgttaagcttctggacgagaatgaaaaccttcaggagaaggaagggggagaggcggaagagagtgccacagacacgaccagtgaaactaacaagagatttagctcattgtcatacaagtctcgggaagaagaccccactctcacagaagaagagatctcagctatgtactcatcagtaaataaacctggacagttagtgaataaatcggggcagtcgcttacagttccggagtccacctacacctccattcaaggggacccacagaggtcaccctcctcctgtaatgatctctatgctactgttaaagacttcgaaaaaactccaaacagcacacttccaccagcagggaggcccagcgaggagccagagcctgattatgaagcgatacagactctcaacagagaggaagaaaaggccaccctggggaccaatggccaccacggtctcgtcccaaaggagaacgactacgagagcataagtgacttgcagcaaggcagagatattaccaggctctagcaacccagaagacaaccctgggtagcctgtgatcagtgtctggagacgtttcttctgtggaagagaagaagtgacacaaacctatacttcatatgctgctttagtcacctgaagatggttggagaggccctgtcgactgttctcccagttgttcagtttctgagacagagaggtacggactaggctgcacctgagtgtgcccctgcctgccagatggacaggtacacccaagcacatctccctgctgcaccctcaccacccacaaaagatcccagctgtcagtggtctcatctcattagtgaggaaagccaagctgtatggaaaagctgcactcaccaaggaccacaatgcccccggcctaaagtactgccattcagaaaagcaggtttttcttcctctctttccttttctctgtctgctactgactttaaggctttttcccccttgaaatgtccagattcctgtggttcatcccaaggaaattttcacacaaagcttggcctttgccctcaatataggtgttttaggatggtgacaaaccatggctgctgctttctgcccagctcgccagtcctccccaaagagttgcgcatcagcacctggggatctggaccctgcgggtgaagggatggggagggacgtccctggagtctcttctgtctttgttccttcttattttggcattcgatatcagcagcctctccccaaagtacttgaagtcagttttagatgctttattttatttttctagtcaaaaacgtgtttcccccagtgtttgaaaactcgtccgaatcttttcagtattttccatgagtattgtggtacttctagacttgtttaagcccagaactcattccttcaaaacagagagccttaatctttatgttgggacacagaccacatatttggacggcagccatgcatccatcgctgaagggctgtggacatgaatgtgtatttcccatggtctccgctgcccacaccaacagtgtggcatctcataagttaactgctaccctaaggtaatctaagattaaaatgtaaacatttatttttgttatgtaagtttataagatgttttatgttcaatgcctaatttctcaaaagtgccagaaaaaaatgtatattagctattttgattttatgtacaatgatttatactctccttttgaaaagataccataaagcacataagctagatcactacaaggagctgttatcttttttctaatcaagtgtttaaaacactgatggtttttaaagactcacctttttaaatggtacttggagctcctgattcaaattacctagaccccctagagaaataaatggaatatacataaataatcattttcagtggtttatggtgggcaatattgcaatatttgaaatggtaaaaatggaaagaagaacaaaatatgatgagaggtggctgtgaattataaacctcataaaagtgtcataattccattaaggtttaattatattttttcagaaaacagtgatgaattctgtagtccagtgcttgccaatgcaaattgcctattggaatcttcttcctatattttacaaacatcagtggctgaaatagctcagagtaagagctcagcctggtttgaatttaatcatctctttagatcttataaggccagcattaggaaacttgttcacttttcattttcaaaggagcctagttgaagtgctattatgagtgtgggctatggaaagacagcttttcctacactgataaagaaaaaaaatgaggaaattatttcatccccttgtgacatctgtgactttttggatttaataatcttgctgtttttcctctttatgacaaagaatataattgggaggatgaagtgtcttaaaaattgtagagaccagctcactggaatgtttttccatccctgtattcatggcttgactttgtgactgctctacactgcatgtctgacattgcagagtgagctatgttgaggtaaactggttggttgtcattattttgcaatcagcctggtctctcccatgaagatgtcgtgtgcataagcacaatcatcactgattagaagatcacagcagaatacccttggattagagagaagttcgtaccttgcatttctctgaattctagtctctcataagcactgctttgctggatgattttcactgctttgtgttaatgactttgagcgatctctcacatgatggggttctttagtacatggtaacagccatgtcatcttacacacctagcattgtgaatgctgtagtgacatcctttataggcaccttacagctcaaaacttttgtttcatttcatgccttacttatcaaaaaggcaggaaagtaggtatgatctctaaagtaaaaaaaaaaaaaaaaaaaaaactttttatagaaagctcataaataatcatgtcattttgcaattttgttaccaaaatttcccccaagagttttcaaatattagttctgcaatgtggctatgaaatatgcactgaaatataccttttaatttgagaaccagtggttagaataagctgtgatataaagtattttcagtgtacttttaaaggaactataaggccctccagcataaacgctaaaagaatagatggtagcacaggccatgagggctgggggagagaagcagagtgaaccttagaaagatggctcagctatttggagcactggatattttactgaagttatttactgaggcaccatcactgttttgactgtacagtatagtttttcataaatttcatcacatttactttgttcagaatctgggcttgaatctttgagttggacaaaagcctatggtttcttttaaaaagtttcatcttgagctaatgctacagtttaaataaaatgtatgaaaggtagttatcaaaaacaatttgtatatttaaaattctattttgacatccattttttacagcgaattatagcaggttatgtgaaatttaaaaataaattttaggaaatttttttatcttgtaagtaagaattataaatctatctcagttaaaagtaggatctttgtttttattcagatattttgaaagtttagaagcattttgtatgctactttggtatttcttaagtatagtcagcaggaaagggtaacctgttttatgcaaaatttttttaatttgtcaaatgtttttagtgtgtctactttctgaaatagtctcaatatcctgtctgtatcctaggcagataactacacaagaacaaaacgctatatagaaaagaaaatatttgaggaaatcttaaattccataagaaagtaattcttgcaagaatgttggctacatatttttttttctgtcctgaataaattacatcattaggtctgttgaagcttttgaagctaccactattctttctgggataaaggctaattactgatttatctgccctcaaaatcccagagttaattctaattgagtactaaattaacagtaagtagttaacacagagaactaaaatttaaccgcattatatcactgtatatatttctcatgatttttgctaattagagcatttacttaaccagtaataaactacacacacacacacacacacacacacgtatacgtgtgtgtgtgtatatacttggctctgacacaactctggtgcttaattaggatatgttctattatgtattttgaatgtttatcctgctagtgtgatgaacttttgttggaaaagcagaattagaaggaacagtttttcaatcagtttcatttggtaattacaggaaaaccttgagttgctctaatttaatttttccaattaatacatttagactttaaattgcatccgtaattctcttggctgaaaaacagtggtattttaagacagttttgttatacatgtgacttacttttgactcagcctgagaggaggaaatgtaaagagataagagatttggcccaaagcagcaagagactagtaaccttgagccaggacgaagccaagacaacgtgactcccaagtagcaggagcagaggtcggtcacctgtggcattctgtttcattcccttttaaaattatgagactttataggcagtgtaaaacatcagcaggcagcgatgtgataggatgtgcgaaaaagctggtctgataccatggctataattacagagctttagttcaattaggattttgtaaatgagcaaatgacctttttttccagtgccccttgtaatagttaatatgagtccatgcaatcttgtgatgccattctcctgaaggtgttgatttctggtacccagccagcttagctttggctgctggaagcacagtaggtactgatgattacttcctggaaatcttgacaggcttattgtactgtgtaatggggaaaagttaaagtataatgtttggtgttaataaatgactgatgtgaaaataggaacatgtgtctttaatatcaaatatggctttatttgcagtgaaatctaaattccttattctacagtagtattttcttgccctgtgttgtatattttcctaaatacatttttcctgacagtggctttaggccagttgaacacacttagactgaaagtgtttaacttaaagagatcagtccagaaaccatgataaattagaatctttatctggaattaccaaattaaaatttaaaatcatggtccagaagagaacaaacattcatggttttttttatcctactgctcatttttaggtctgtgtttacatctagtctctactatttgtgaagtatgtcattatttttttcaagttcttctttgacttaactgaaaaataatattccaaattcttaatgtaacatgaaaagagaaatacaatttttgcttaaaagacattttttaaaaagcgttcaattcagtaatcatttctgttaatacaggaagtttttttggcttgccagttatatactgtgggtattttttaaaatgtgctacccttgggttgtctcatatcaccttgcgtaatcatgtattacaaaggttgataattgtcatttctcagatgtctgtatgttacattggcagcagtaaaatgttttaatgttgttaccttttaaataattgtgttgtattaacatgcctcatattttctggggaaacttgaaatatatctaaacaaaaaaggtctgttataaataggaattggcatttcattgttaatgttttttcctcataaaaatagttacaccaaaagtgacatattgtctattacatgggcccaatcagtattaaagtactccccttactcaaaaatattaaaaaataattcatgacacttagtagcattttcattgattgtttcaaaagatcttcataatggtcaaattgtccaattcacaaaagagtgagaaagttgttttcagtactgggaatttttaaaccttagttttaagaccaaaaatatctcttattagcttgaacattttgtgattacttttccctccccggatctagtccttttaaggagtaagtctaaagaatgaggccatgaagtcactatttcctcccacctcagtttgtctcctggtacttagctggcctatcgctttgtgtggcaatacccctgggtcgcttccccactcagccttctgtatctgctgttcacaggacatgccattatgtctttccagtacggatcacagtgctgccatatcacagaccctgccagccggcacagaaccatgcctcgtcacagctctgcccaactcacaggctgccaagatgaggccacaggtccacctagggcggcagatgctggtgctatttgtcacgacttttgccaaaacatgtacactgttgctcacatctttcgtaagaatggttgacactaaggggccatggaaaagcacttttaaaaaattatgtggtggaatcaaactcacagaggcagaaatgttagtgccgtgctctaaccaagtaagcttagtgttccccacagtgatctgtatctggcctgagtctcctcaagcagcaacccccactgtccagcatgtggaaggtagatccttatgacaacaccagacccatagttaccaggaaagaaaaaggaagctgagtgttgtgaaggggaagaaatcctttttataagaagtaatcatttttaggccgggtgcagtggctcatgcctgtaatcccagcactttgggaggctgagacaggtggatcacttgaggtcaggagtttgagacctgcctggccaacatgatgaaaccctgtctctactaaaaatgcaaaaaaaattagccaggcatggtggcatgtgcctgtagtcccaactactcaggaggctgaggcaggagaatcacttgaacctgggaggcagaggttgcaatgagctgagatcgcaacactgcactccagcctgggcgacagagcaagactccatctcaaaaacaaaaacaaaaaaaaaacctttttaaagtaaattgagtgtaaaatgttttcaccatgaagccattgcaccctctcccccaggaaacagtgcctaaggatgatgtcaagttacagccagtttgctctgatcccccaggacctaagaaaactgtgagtgcttcagcatgcaaaggtagagctaccagataaggagaataacttggccatttatagcaaactgcctgactttggagtgagaaaccaagcaccttctaggtcctaggataggtgaattggaggtgcagctgctgaagttcccattttctacatacttcaggagccagggtgtttcatttggttttgtaaaactttgctgtaagtcatcacagttaattctttgaatggacattttagagtgtaactttttttcaaaattagcagaacagatatctctgctcattctctttatacatttagttttttaaagttcccctagtatacctgttaggcactctaaataggacacagttaaagctaaaagaaggaccagttgctccctagagcctacagttcagaactatcttgttgtcatgtcctggtttggtttggtttgtttttaactcaacaagttggaaaccatgagtttaaagcaaactatttccttttcttaagcttaaagagaattttttttttaatctttagctcctcatttaggtagtgaaggcttccctgaaagacagcagtgcccttctctggaagaagaggctgggaccaaaagcctgagtctatgggttgaggattttgagcattcctttgacaagcttctatgtatttttaatataagactcataaatgaacctgatgtggtgttcatgacccatcccttaagcatgcttgctttttttaactttactttttgagtatagtacttgtcttgtttttcctggagccatgctaggatttaattcctatgtgccactacccgcccatgtcctggaagatggccatgcctgcagcaatgctcatgtcttgaggagaagcaatgtgaaaagcatcaggaaagctgaaccttacgttcaagtcagcaaacatttgtgagcattctagtatgcttgcgaccttgacactttttaaaaattatctttttatttgcttcgagtatcaaccgtatagttgactctagtggggcgaagggagcagagatgagagcaaaattcagacttgctgcccctgtgtgtctcagttctcatgtctctctgagaaatgtgttggcccaattccctatctgccactctgagtctcttgagtaaatgtgtgtaaatgagaaaaattatctcaaagatttaacttattatttagatattttcttctttttaaactcaggaataaacctggtttgtagataatataatatggctactagagctataattgagtaggtgactagaagcattttttcaaatatatttcttgtaaagacatctactttgttttaactaggaaaagaaactcctcatattaaaataaacatttccataagcactttctagaagagtgtagcatccatctaccatccatcccagaatgtttgtatcttgctcatagtatttcaaaaatttttatgggtgaaaaaaatgcacttttttatttattggaaaagtgtagagttattgaattaaattctcaagtgggacaatttagtgtaaagggaaacatgggttttggagacaagagcacagggctgtggtccctgttccagcattgactttactatgtgacctcgagcaaatgatttaacttctctgtgcctcagtttctccatatacaaaatggggataatgatactaaccattgcctacctcatagagatgttatggggacaaacgaaataatagagataagcacgaatgctttcaactcttcggaagaaaggtgctatataaattgaagttgtgtttttaatgatccaattattaattatgtttagggtttaaataacaatactgttagtcatgttaagaataagttttgttttgatgcatatttccacttctcttctgtggccagatcttgatcattcaaccagtaatggtacctgaggaactgaaatgggtatttgttttcgtatgtttctgccagtagtatttcaattgaatatccagaaaagactggagtttaacttgtaatatcttatagtttacatgtaataaaacttattcaagctatatataaaagtatgattacatgtaaatagcaggtatgttgtaattaaaggcacttatcaaattgtctttgttcttttttaattgtaataaaagtcagttttacataaaaaaaaaaaaaaaaaa

SEQ ID NO: 4709 - DNA, 1874 bp, Homo Sapiens
  NM_018441
tccgcccgcccgcctcgaatgtccctgagacccagaagggcctgcgctcagctgctctggcaccccgctgcagggatggcctcctgggctaagggcaggagctacctggcgcctggtttgctgcagggccaagtggccatcgtcaccggcggggccacgggcatcggaaaagccatcgtgaaggagctcctggagctggggagtaatgtggtcattgcatcccgtaagttggagagattgaagtctgcggcagatgaactgcaggccaacctacctcccacaaagcaggcacgagtcattcccatacaatgcaacatccggaatgaggaggaggtgaataatttggtcaaatctaccttagatacttttggtaagatcaatttcttggtgaacaatggaggaggccagtttctttcccctgctgaacacatcagttctaagggatggcacgctgtgcttgagaccaacctgacgggtaccttctacatgtgcaaagcagtttacagctcctggatgaaagagcatggaggatctatcgtcaatatcattgtccctactaaagctggatttccattagctgtgcattctggagctgcaagagcaggtgtttacaacctcaccaaatctttagctttggaatgggcctgcagtggaatacggatcaattgtgttgcccctggagttatttattcccagactgctgtggagaactatggttcctggggacaaagcttctttgaagggtcttttcagaaaatccccgctaaacgaattggtgttcctgaggaggtctcctctgtggtctgcttcctactgtctcctgcagcttccttcatcactggacagtcggtggatgtggatgggggccggagtctctatactcactcgtatgaggtaccagatcatgacaactggcccaagggagcaggggacctttctgttgtcaaaaagatgaaggagacctttaaggagaaagctaagctctgagctgaggaaacaaggtgtcctccatcccccagtgccttcacatcttgaggatatgcttctgtactttttaaaagcttatagttggtatggaaaacatttttcttatttttaagtgttattaattatatctatggaaaaactattcctgaaatatatacagtcttatgtcccaatcagagtcttttaacctatgatttaaaaatgtataagtaacagaaattaacatattttaatgactttactttttatttctaagaaaagtatttgaaaaatggaataattttaaatcaatgataattctagggatcatgaactcccagaagattttattatttaattgtaaaggtagaggccagacgcagtggctcacgcctgtaattccagcactttgggaggccgaggtaggcgggtcagttgaggtcaggagttcaagaccaggctggccaacatggtaaaaccctgtctctactgaaaaacaacaaaaacaaaaacacaaattagtcgggtgtggtggcacacacctgtagtcccaggtacttgggaggctgaggcaggaggatcgcttgaacccaggaagcagaggttgcagtgagctgagatcatgctactgcagtccagcctgggctacagagtgagactgcatctcaaaaaaaacccaaaaaacaaaaacaaacaacaacaacaaaattataaaggtagaaaataaacctaaattgtgtcgtaattaagattattaaaattagaattatacaatgacttatttttggtggcaaatactttaggagcaataatgccttatggtaattattgatgtatagtttcttttgtttatgaagtcaaatttgtataaattctcttaattcaaagaaaaagttttatgtgattta

SEQ ID NO: 4710 - DNA, 2665 bp, Homo Sapiens
  NM_018443
gtgggcggtgcactgggtcagtcccgcgatagcttcaggcctggcggcggcttccaagctaaggaacggtttggggcagtgtcgttcccggaggtcggccgccgttacccgctcaccagctacgcggcgcgtcaggtccgcggaggcgcgggctcggggcgcctgcgggacggtgaggccctgctgaggactccggacactgcccatctctaagataagaacctggaaaggggactctgttggccattggaaattgcagaataatgtctcaggtgacatttagtgatgtggctatagacttctctcatgaagagtgggcatgcctagattctgctcagagggacttatacaaggatgtgatggtccagaattatgagaacctggtctctgtaggtctttccgtaactaagccatatgtgatcatgttattggaggatggaaaagagccctggatgatggagaaaaaactgtcaaaagattgggaatcaagatgggaaaacaaggaattatcaacaaagaaggatatttatgatgaagattcaccccaaccagtaacaatggaaaaagttgtaaaacaaagttatgaattttcaaattctaataagaatttggaatatacagaatgcgacacatttagaagcacctttcattcaaagtctactctttctgaaccacaaaacaattctgctgaagggaattcacacaaatatgatatattaaagaagaatttatcaaaaaagtcagttataaaaagtgagagaataaatggtggaaagaaacttttaaattctaataaaagtggggcagccttcaaccagagcaaatctcttacccttccccagacttgtaatagagagaaaatctatacatgcagtgaatgtgggaaagcctttggcaaacagtcaatcctcagtcgccactggagaattcatacaggagagaagccctatgaatgtcgtgaatgtgggaagacttttagccatggttcatcccttacacgacatcagataagccatagtggagagaaaccttacaaatgcattgaatgtgggaaggcctttagccatggctcatcacttactaaccatcagagcactcacacgggagagaaaccgtatgaatgtatgaactgtggaaagtcttttagtcgtgtgtcccttctcattcagcatctaagaattcatacgcaagaaaaacgctatgagtgtcgtatatgtggaaaggccttcattcatagttcgtctctcattcaccatcagaaaagccatactggagagaagccttatgaatgtagagaatgtgggaaagctttctgctgtagctcacaccttactcaacatcaaagaattcacagtatgaagaaaaaatatgaatgcaacaaatgtctcaaggtctttagtagcttctcatttcttgttcaacatcagagtattcatactgaagaaaaaccgtttgaagtttagaaatgcaggaaatccttcaaccagcttgaatcactgaatatgcatttgagaaatcacattagattgaaaccctacgaatgcagtatatgtgggaaagcctttagtcataggtcgtccctgcttcaacatcacagtattcatactggagagaaaccttacgaatgtattaaatgtgggaagaccttcagctgtagttcaaaccttactgtacatcagagaattcatactggagaaaagccatataaatgtagtgagtgtgggaaagcttttagcaaaggctcgaatcttactgcccatcaaagagtacataatggagagaaacccaatagtgtggtaagtgtggaaaagcctttagatcatatgaatccctatacatgtgagaaatcttacagaagagaagcagtgtttatcacggtaaacttcattcatagatcctcccttatttaacatcagaaaaatgtatactggggaaaagttgtatgaaggtggtgaacatgggagacttttagcaatgatgcagatttttttattagagtttatactgtagagaaatcatatgaagtcaataaatgtgggaaagcctttgtcagtattaatcccttaattgacctaagtatactcacactaggaaaaatctgtgtacatgtagcaaatgtgggaaagactataggcaataggaatctcctgcaaactcctacaggagaaaagttgtatgaatgtggaaactttagaaattgaaggaatttttcagttccaagtgcatcccttattctataggaaataaactggagacaaatctcatttaagagatgcagcaaagtgttcactaagagtgtttatcttgccagacataagaagatgaatggtagagcaacctgaaggatttagaaattacatataaatctttgcagttatgctatttgtaaacaggattatataggagagcaaataaacataagtatgcatttcttagagcagtagcttgcagtttcagttgagttctacttagaaattctttttagctagtgggcatgtgaagatatttagtcacccagaggagccagtaaatgttataatgttaaaaattaaagctgcaaaagaaataaaatggtgttaataaaaatttggcatctaataaaatcattttgtatatcatgaacaaaaaaaaaaaaaaaaaaaaaaaaaaaaaaaaaaaaaaaaaa

SEQ ID NO: 4711 - DNA, 2118 bp, Homo Sapiens
  NM_018446
gcgcttttgccgcgccgtgctgcccgcgagggcagctgaggtggtggtggcggccgccttgtcgaggcatcgcgcgcccgtgaagtgttcgccgtcagtgctgttgggtgcctggagccgcgtcccccgtcccgaaaactgtccttgacagtacttgcgcggcccaacggccgccggcgcccccgcgtctccatggcgacggcctttttccctgcgaggaccccggcggcagggctgccccgcggcgcctgcttggcgcgacgctctagcggttaccgctgcgggctggctgggcgtagtggggctgcgcggctgccacggagctagagggcaagtgtgctcggcccagcgtgcagggaacgcgggcggccagacaacgggctgggctccggggcctgcggcgcgggcgctgagctggcagggcgggtcggggcgcgggctgcatccgcatctcctccatcgcctgcagtaagggcggccgcggcgagcctttgaggggaacgacttgtcggagccctaaccaggggtatctctgagcctggtgggatccccggagcgtcacatcactttccgatcacttcaaagtggttaaaaactaatatttatatgacagaagaaaaagatgtcattccgtaaagtaaacatcatcatcttggtcctggctgttgctctcttcttactggttttgcaccataacttcctcagcttgagcagtttgttaaggaatgaggttacagattcaggaattgtagggcctcaacctatagactttgtcccaaatgctctccgacatgcagtagatgggagacaagaggagattcctgtggtcatcgctgcatctgaagacaggcttgggggggccattgcagctataaacagcattcagcacaacactcgctccaatgtgattttctacattgttactctcaacaatacagcagaccatctccggtcctggctcaacagtgattccctgaaaagcatcagatacaaaattgtcaattttgaccctaaacttttggaaggaaaagtaaaggaggatcctgaccagggggaatccatgaaacctttaacctttgcaaggttctacttgccaattctggttcccagcgcaaagaaggccatatacatggatgatgatgtaattgtgcaaggtgatattcttgccctttacaatacagcactgaagccaggacatgcagctgcattttcagaagattgtgattcagcctctactaaagttgtcatccgtggagcaggaaaccagtacaattacattggctatcttgactataaaaaggaaagaattcgtaagctttccatgaaagccagcacttgctcatttaatcctggagtttttgttgcaaacctgacggaatggaaacgacagaatataactaaccaactggaaaaatggatgaaactcaatgtagaagagggactgtatagcagaaccctggctggtagcatcacaacacctcctctgcttatcgtattttatcaacagcactctaccatcgatcctatgtggaatgtccgccaccttggttccagtgctggaaaacgatattcacctcagtttgtaaaggctgccaagttactccattggaatggacatttgaagccatggggaaggactgcttcatatactgatgtttgggaaaaatggtatattccagacccaacaggcaaattcaacctaatccgaagatataccgagatctcaaacataaagtgaaacagaatttgaactgtaagcaagcatttctcaggaagtcctggaagatagcatgcgtgggaagtaacagttgctaggcttcaatgcctatcggtagcaagccatggaaaaagatgtgtcagctaggtaaagatgacaaactgccctgtctggcagtcagcttcccagacagactatagactataaatatgtctccatctgccttaccaagtgttttcttactacaatgctgaatgactggaaagaagaactgatatggctagttcagctagctggtacagataattcaaaactgctgttggttttaattttgtaacctgtggcctgatctgtaaataaaacttacatttttcaataaaaaaaaaaaaaaaaaaaaaaaa

SEQ ID NO: 4712 - DNA, 4299 bp, Homo Sapiens
  NM_018449
gtgacgcgaggtcacgtgacgggttgggcagcctgtgccgccgccgccgctttgtaagaggcacattggcagattttctattttgtacatacattattttgtatatactgtatatgatgacttcagtgagcagtgaccattgtcgaggtgctcgggaaaaaccacagatttcagcagcacaatcaacgcaaccacagaaacaagtggtacaggcaacagctgaacagatgcgtctcgctcaagtgatctttgataagaatgattcagattttgaagctaaagttaagcagcttatggaagtgacagggaaaaatcaggatgaatgcatagtggccctacatgattgtaatggagatgtgaacaaagctatcaatatattgctggaagggaattcagacacaacttcatgggagactgtagggtgtaagaaaaagaattttgcaaaagaaaattcagaaaacaaagagaatagagagaagaaaagcgagaaagaatcgagtcgtggacgtggaaacaacaaccggaaaggaagaggcggcaatcgtggcagagaatttagaggtgaagaaaatggaattgattgcaatcaagtggacaaaccttcagatcgtggcaagcgagcccggggtagaggatttggacgtggcagagggagaggggcaggaaggttctcaacccaaggcatggggacatttaatcctgcagactattcagattctacatctacagatgtgtgtgggacaaagctagtagtttgggaagctgctcagaatggtgcagatgagggaactgaactggcatcaaatactcacaacatagctcaggatctgtcaaacaaaagttcttatggactcaaaggggcttggaagaattctgtggaagagtggacaacagaagactggactgaagatctttctgaaacaaaggtcttcactgcctcatctgctccagcagagaatcacatcttacctgggcaaagcattgatctggtagccttgctccagaagcctgttcctcacagtcaagcctcagaagccaactcctttgaaacttcccaacagcagggctttggccaagcccttgtcttcacaaattcgcaacacaacaatcagatggcaccagggactggcagctccactgccgtcaactcctgttctcctcagagcctgtcatccgtccttggctcaggatttggagagcttgcaccaccaaaaatggcaaacatcaccagctcccagattttggaccagttgaaagctccgagtttgggccagtttaccaccaccccaagtacacagcagaatagtacaagtcaccctacaactactacttcttgggacctcaagcccccaacatcccagtcctcagtcctcagtcatcttgacttcaaatctcaacctgagccatccccagttcttagccagttgagccagcgacaacagcaccagagccaggcagtcactgttcctcctcctggtttggagtcctttccttcccaggcaaaacttcgagaatcaacacctggagacagtccctccactgtgaacaagcttttgcagcttcccagcacgaccattgaaaatatctctgtgtctgtccaccagccacagcccaaacacatcaaacttgctaagcggcggatacccccagcttctaagatcccagcttctgcagtggaaatgcctggttcagcagatgtcacaggattaaatgtgcagtttggggctctggaatttgggtcagaaccttctctctctgaatttggatcagctccaagcagtgaaaatagtaatcagattcccatcagcttgtattcgaagtctttaagtgagcctttgaatacatctttatcaatgaccagtgcagtacagaactccacatatacaacttccgtcattacctcctgcagtctgacaagctcatcactgaattctgctagtccagtagcaatgtcttcctcttatgaccagagttctgtgcataacaggatcccataccaaagccctgtgagttcatcagagtcagctccaggaaccatcatgaatggacatggtggtggtcgaagtcagcagacactagacactccaaagacaacaggccctccctctgccctcccgtctgtgagctccctgcccagcaccacctcctgcactgcacttctgccgtccacatcccagcacactggcgacctgactagcagccctctctctcagcttagcagttcgctctccagccaccagagcagcctctctgcacatgcagccctctcctcgagcacgtcacacacacatgccagtgtggagagcgcctcttcccaccagtcctcagccaccttctccacggcagcgacctccgtctcaagttccgcatcctcaggcgccagcctgtccagtagcatgaacaccgcgaacagcctctgtctgggtgggacccccgcgagtgcatccagcagcagtagcagggccgcgcccttggtgacctcaggcaaagcacccccaaacttacctcagggggtgcctcccctgctgcacaaccagtacctcgtaggtcccggaggactgcttcctgcctacccgatctatggctatgacgagctccagatgctgcagtcacggctgccagtggactactatggaattccctttgctgcacccacagcgcttgccagccgagatgggagcctagctaataatccatatccaggtgatgtcacaaagtttggccgtggggactctgcatcccctgcacccgctaccacaccagctcagccacagcagagccaatcacagacccaccacacagcccagcagcccttcgtgaatcctgcactgccacctggctatagctacactggtcttccctactacacaggcatgcccagtgccttccagtatggccccaccatgtttgtccctccagcctcagccaagcaacatggggtgaacctcagcactcccacacctcccttccagcaggccagtggttatggccagcacggctacagtacaggttatgacgacctgacccaggggacagcagcaggagactactccaaaggtggctatgctggatcatcgcaggcaccaaacaagtctgcaggttctgggcctggcaaaggagtatcagtgtcttcaagcaccactggtctacctgatatgactggttctgtctacaataagacacagacttttgacaagcagggatttcatgcagggacgcctccacctttcagcctgccctcggtcttgggctccactgggcccctggcctcgggagcggcccctggctatgcacccccaccattcctacacatcttgccagcccaccagcagccccactcacagctgctgcaccaccaccttccgcaggatgcacagagtggctcgggtcagcgcagccagcccagctccctgcagcccaagtctcaagcctccaaacctgcctacggcaactctccatactggacaaactaaacccagaagagaggggtgggctggggcaaggcttatcctgggcaggagagaacacacgagcacgtatttgggagcccagtgccctttcctagaattcccgacatgtgtcagccatgcctctgtggggagtctgcctcccagactggctactgtatgtaatgtatttatgtatgtatttgtaaatgtgatagaagtctgggggggagttgggggatggcggcagatgttagccaggtctgccctccccattcaagccccttctccactgtagcaaaataagcacccccaccccatctgccttcaggtcttcttcacagcctgcactgcccagtgggccactaggggcagtctctggaagggctggttcaaggctgtttgggtataggggtcaggtaccaatgaagaatcacgacttgtctcactcctttggaaattgttttctttcctgtgtaattacttcatacctctgtttttgagaaactgttccgtttgtcatctgtcatggtctccttccaccaaatcttcatctgggaatagcagcggtatccctccacccaagtatggccacctgtttgtcttcatatagaacaggggcttctggtctggtcatgtccctagagacttactagagactggctgaccatgaaaaaaaaaaaaataatctgagttattcagccagtcagctcccctttaaaaatctaaggtatctccaagcaacacatctccattctagttgtcttgaaccacgtgggcaactgtttcaggggttttctcttgcccaatccccacctaataaagttctgagagcatgaaaaaaaaaaaaaaa

SEQ ID NO: 4713 - DNA, 5187 bp, Homo Sapiens
  NM_018451
agtttcactgggctcagcggtgcctgcgctttagcgcagacgcgcgggtgagatcctcacttcccacaggacctcgggacgggggcggggctccgacagaggcggcgattgtggcggcccatttgtaaatgctgcggagattgaggtgtcggttcgtgctgctgagctgcccaggcttcacggagcggtgttggaaatcaatagctcttctagcctttgcattgtttaaatataatagtgtcattggactaagatgttcctgatgccaacctcttcagagttaaacagtgggcagaacttcctaacccagtggatgaccaatccttctcgggctggggtcatattaaatcgtggatttcctattttggaagcagacaaagagaagcgagcagctgtggacatttctaccagctttcctattaaaggcacacatttttctgatagcttcagctttataaatgaagaagattcacttcttgaagaacagaagttggagtcaaacaacccttacaaaccacagtcagataaatctgaaacccatacagcctttccttgcattaaaaagggaccacaggtagcggcatgtcacagtgctcctggacaccaggaagaaaacaaaaatgacttcatcccagatcttgcgagtgaattcaaagaaggggcttataaagacccactttttaaaaaacttgaacagctgaaagaagtacaacagaagaagcaggaacaattgaagaggcaacagttggagcaactacagagactcatggaagaacaagagaagctgctcaccatggtgtctgggcagtgcacacttccaggtttgagtttactgcctgatgatcagagccagaagcacaggtctccaggaaataccaccactggagagagagccacatgctgcttcccatcatatgtctacccggacccaacccaggaagaaacatacccgtccaacattttatcccatgagcaaagcaacttctgtagaactgctcatggagattttgtcttaacttcaaaacgtgcgtctcctaatttattttctgaggcacagtatcaagaagcacctgtggaaaaaaataatttaaaagaagaaaaccgtaaccatcctacaggagaaagtatcttatgttgggagaaagtgacagaacagattcaggaagcaaatgataagaacttacaaaaacatgatgattcctcagaagtggctaatattgaagaaaggcccattaaagctgctattggagaaaggaaacagacctttgaagattacttagaagaacaaattcagttggaagagcaagaactgaagcaaaaacagctgaaggaagcagaaggaccattgccaatcaaagcaaaaccaaaacaaccatttttaaaacgaggagaaggtttagctagatttactaatgccaaatctaagtttcaaaaaggcaaagaaagtaaactagtgactaaccagagcacttccgaggaccagccgctgtttaaaatggatagacagcaactccagcggaaaaccgctcttaaaaataaagagctgtgtgcagacaaccctatccttaaaaaggacagtaaagctagaaccaagagtggttctgtcaccctcagtcagaagccgaaaatgctgaagtgtagtaacaggaaaagtctttctccgtcaggattgaaaatacagacggggaagaaatgtgatgggcagtttagagaccagatcaaatttgaaaacaaagtcacatctaataataaagaaaatgtaactgagtgtccaaaaccttgcgatactggctgcacagggtggaataagacacaaggtaaagacagacttcctctttcaacagggccggccagccggctggctgctaagagccccataagggagaccatgaaagagtctgaatcttctcttgacgtttctcttcagaaaaagttagagacttgggaacgagaaaaggaaaaggaaaatttggaattagatgaatttttgtttttagaacaagctgctgatgaaatatcattttctagtaattcctcatttgtactgaaaatcttagaaagggatcaacagatctgcaaaggtcaccggatgtcttccacccctgtcaaagctgtgccacagaagacaaatccggcagatcccattagtcattgtaaccgcagtgaggatttggaccacactgcacgtgagaaggagagtgagtgtgaagtcgcacccaaacaacttcattcattgtcctcagctgatgaattgagggaacagccttgtaaaatcaggaaagccgtccaaaagagcacttctgaaaatcagactgaatggaatgcacgtgacgatgaaggtgttccaaatagtgacagtagcactgactctgaggaacagcttgatgttaccataaaaccatcgactgaggatagagagaggggcatcagcagcagagaggatagcccacaagtctgtgatgataaggggccttttaaggacaccaggacccaagaagataaaaggagagatgttgatctggatttgtctgataaagattacagtagcgatgagtctatcatggaaagcataaaacataaagtgtctgagccctcgagatcctcatccctaagtctgagtaaaatggactttgatgatgaaagaacttggactgaccttgaagagaatttgtgtaaccatgatgttgttcttgggaatgaatccacttatgggacgccgcagacatgctaccctaataatgaaataggtatcctggacaaaacaataaaaaggaagattgcaccagtcaagaggggagaagacttgagcaagtccaggaggagcagaagtcctcctacatcggagctgatgatgaaattctttccttctttgaaaccaaaaccaaagtcagattcacacttgggaaatgaactcaagttaaacataagtcaagaccaaccacctggtgacaatgctcgatcccaggttttgagagagaaaattattgaattggaaacagaaatagaaaagtttaaagctgagaacgcatctttagctaaacttcgcattgaacgagaaagtgccttggaaaaactcaggaaagaaattgcagacttcgaacaacagaaagcaaaagaattagctcgaatagaagagtttaaaaaggaggagatgaggaagctacaaaaggaacgtaaagtttttgaaaagtatactacagctgcaagaacttttccagataaaaaggaacgtgaagaaatacagactttaaaacagcaaatagcagatttacgggaagatttgaaaagaaaggaaaccaaatggtcaagtacacacagccgtctcagaagccagatacaaatgttagtcagagagaacacagacctccgggaagaaataaaagtgatggaaagattccgactggatgcctggaagagagcagaagccatagagagcagcctcgaggtggagaagaaggacaagcttgcgaacacatctgttcgatttcaaaacagtcagatttcttcaggaacccaggtagaaaaatacaagaaaaattatcttccaatgcaaggcaatccacctcgaagatccaagtctgcacctcctcgtgatttaggcaatttggataagggacaagctgcctctcccagggagccacttgaaccactgaacttcccagatcctgaatataaagaggaggaggaagaccaagacatacagggagaaatcagtcatcctgatggaaaggtggaaaaggtttataagaatgggtgccgtgttatactgtttcccaatggaactcgaaaggaagtgagtgcagatgggaagaccatcactgtcactttctttaatggtgacgtgaagcaggtcatgccagaccaaagagtgatctactactatgcagctgcccagaccactcacacgacatacccggagggactggaagtcttacatttctcaagtggacaaatagaaaaacattacccagatggaagaaaagaaatcacgtttcctgaccagactgttaaaaacttatttcctgatggacaagaagaaagcattttcccagatggtacaattgtcagagtacaacgtgatggcaacaaactcatagagtttaataatggccaaagagaactacatactgcccagttcaagagacgggaatacccagatggcactgttaaaaccgtatatgcaaacggtcatcaagaaacgaagtacagatccggtcggataagagttaaggacaaggagggtaatgtgctaatggacacggagctgtgacgatcctcatgtgatcatgaagtaacagtaactgactttttatgttaaaaaatgtacatttactgtggattctgtttaatttattgtgtatgtgtggggaaaagattagattctaaaataaaagtttaccctgtggcatcttcatttttatattctttgaaatgcaatgatagctctcatttataattcactaccctgtctttcaatagactaaggaaagcattttgactgtttagaaattgtgtacaggtttttacagtaagtgggtgtgtttattggttagaaatggctataaaaaaaaaccaagaagtacaggaagtacatcacctagatgtcccacagacacatcagccgtagagcactggacttgtacagaaggtgtactcaaggagtaaacacgtgtctctgtagccaaaatattactatgttcagttagtaccaaaattagaccatttgatcttctacagaggatcattaattattataacagaatgggaagttacaacagtggatgaatataaataggtcacacacaacaggtagtaatcatggtgaagagaaagcagttataacaaggctgactttgtaatgtaatgtctcaaaatgggatacttgagagtggaggggggcatgaacgatgactagccagtgttaacccatggaccacagctaccctgatgttaccacagtgagattactgtagcctcatggaagcaagatgtccctgaaggatgggcaagtcacttacttacttacttgtaaatttatataataaataattacagattggtctagatagaccttacctgtcacatatactatgaatcaggttttgttaatgaaatctatcaattccaggtgacttaactgaatatgaaaaataaaactttttgaagaatataaaaaaaaaaaaaaaa

SEQ ID NO: 4714 - DNA, 2434 bp, Homo Sapiens
  NM_018454
aagtgtgaaaaaagcgcgcctctgttgggacgggaaatcagcctttctattggtcagggttagaaaccccgcctttgaggcattttcaaccaatggaagcgcggcattcttcatttaaactgtctataaatttctgcctagtcaaagttaagagtggcgccagggatttgaaccgcgctgacgaagtttggtgatccatcttccgagtatcgccgggatttcgaatcgcgatgatcatcccctctctagaggagctggactccctcaagtacagtgacctgcagaacttagccaagagtctgggtctccgggccaacctgagggcaaccaagttgttaaaagccttgaaaggctacattaaacatgaggcaagaaaaggaaatgagaatcaggatgaaagtcaaacttctgcatcctcttgtgatgagactgagatacagatcagcaaccaggaagaagctgagagacagccacttggccatgtcaccaaaacaaggagaaggtgcaagactgtccgtgtggaccctgactcacagcagaatcattcagagataaaaataagtaatcccactgaattccagaatcatgaaaagcaggaaagccaggatctcagagctactgcaaaagttccttctccaccagacgagcaccaagaagctgagaatgctgtttcctcaggtaacagagattcaaaggtaccttcagaaggaaagaaatctctctacacagatgagtcatccaaacctggaaaaaataaaagaactgcaatcactactccaaactttaagaagcttcatgaagctcattttaaggaaatggagtccattgatcaatatattgagagaaaaaagaaacattttgaagaacacaattccatgaatgaactgaagcagcccatcaataagggaggggtcaggactccagtacctccaagaggaagactctctgtggcttctactcccatcagccaacgacgctcgcaaggccggtcttgtggccctgcaagtcagagtaccttgggtctgaaggggtcactcaagcgctctgctatctctgcagctaaaacgggtgtcaggttttcagctgctactaaagataatgagcataagcgttcactgaccaagactccagccagaaagtctgcacatgtgaccgtgtctgggggcaccccaaaaggcgaggctgtgcttgggacacacaaattaaagaccatcacggggaattctgctgctgttattaccccattcaagttgacaactgaggcaacgcagactccagtctccaataagaaaccagtgtttgatcttaaagcaagtttgtctcgtcccctcaactatgaaccacacaaaggaaagctaaaaccatgggggcaatctaaagaaaataattatctaaatcaacatgtcaacagaattaacttctacaagaaaacttacaaacaaccccatctccagacaaaggaagagcaacggaagaaacgcgagcaagaacgaaaggagaagaaagcaaaggttttgggaatgcgaaggggcctcattttggctgaagattaataattttttaacatcttgtaaatattcctgtattctcaacttttttccttttgtaaattttttttttttgctgtcatccccactttagtcacgagatctttttctgctaactgttcatagtctgtgtagtgtccatgggttcttcatgtgctatgatctctgaaaagacgttatcaccttaaagctcaaattctttgggatggtttttacttaagtccattaacaattcaggtttctaacgagacccatcctaaaattctgtttctagatttttaatgtcaagttcccaagttccccctgctggttctaatattaacagaactgcagtcttctgctagccaatagcatttacctgatggcagctagttatgcaagcttcaggagaatttgaacaataacaagaatagggtaagctgggatagaaaggccacctcttcactctctatagaatatagtaacctttatgaaacggggccatatagtttggttatgacatcaatattttacctaggtgaaattgtttaggcttatgtaccttcgttcaaatatcctcatgtaattgccatctgtcactcactatattcacaaaaataaaactctacaactcattctaacattgcttacttaaaagctacatagccctatcgaaatgcgaggattaatgctttaatgcttttagagacagggtctcactgtgttgcccaggctggtctcaaactccaccaaatgtacttcttattcattttatggaaaagactaggctttgcttagtatcatgtccatgtttccttcacctcagtggagcttctgagttttatactgctcaagatcgtcataaataaaattttttctcattgtcatagaaaaaaaaaaaaaaaaaa

SEQ ID NO: 4715 - DNA, 1465 bp, Homo Sapiens
  NM_018455
gagcgacgcccacggcctgtctcggccaccagcgtgttccagcgagcgcccagccacctcgctcgcagcctccccagcgcagcagcccggctgtgggcctgcggcagccgggtcttcctggtccccacctcctggggccgacgggcggcaggaaggggctcggcgggacgcgccatcagggacctgaggaggaacaacggaacgcgttcggaacggcctggactcccgagactcacccgactcgtggccacaccgggagaactgaagcggcagtagccggcggagacgcccgacccgaaggccggctgctagggagcagacagctgaaccgcttgccagacgccgaaacccagtgacgccctccaccgctccaccgtgctcccggctcctcgcccccgccgcccgcgggccccaaggcgcatgcgccgcctgtcctggaggggcccatttccgtccgtcgtggggggaggcacagtgagtccactggggcacggcagcgtctaagccacaagccgagcacataagccaggtcctaacggagcctatgtgtaagtccactactggtgcaaggttgcacacttctaagaagagcggcgtggggggctcggcgaccttcgcttcagtcgctcccccgtgcagtcccctgtgcccaagacacagcctgatgcttgtgctccggtgggcggagcttggaggcggcgggaactgcaattggtggctttgaaggcgcggcgagcgggaacagctcttgaggagtgagactgcaggagatgtgggccgtgccaaagagatggatgagactgttgctgagttcatcaagaggaccatcttgaaaatccccatgaatgaactgacaacaatcctgaaggcctgggattttttgtctgaaaatcaactgcagactgtaaatttccgacagagaaaggaatctgtagttcagcacttgatccatctgtgtgaggaaaagcgtgcaagtatcagtgatgctgccctgttagacatcatttatatgcaatttcatcagcaccagaaagtttgggatgtttttcagatgagtaaaggaccaggtgaagatgttgacctttttgatatgaaacaatttaaaaattcgttcaagaaaattcttcagagagcattaaaaaatgtgacagtcagcttcagagaaactgaggagaatgcagtctggattcgaattgcctggggaacacagtacacaaagccaaaccagtacaaacctacctacgtggtgtactactcccagactccgtacgccttcacgtcctcctccatgctgaggcgcaatacaccgcttctgggtcaggagttagaagctactgggaaaatctacctccgacaagaggagatcattttagatattaccgaaatgaagaaagcttgcaattagtgaacatgaaaggaaaataaaaattcctcacagtcatctttttaaaaaaaaaaaaaaaaa

SEQ ID NO: 4716 - DNA, 1024 bp, Homo Sapiens
  NM_018456
gggtgacttggctggcgggatcaagtgcagctgcttcaggctgaggtggcagatagtgagcgctggtggcggagttaaagtcaaagcaggagagtaattatgaatagcgcagcgggattctcacacctagaccgtcgcgagcgggttctcaagttaggggagagtttcgagaagcagccgcgctgcgccttccacactgtgcgctatgacttcaaacctgcttctattgacacttcttctgaaggataccttgaggttggtgaaggtgaacaggtgaccataactctgccaaatatagaaggttcaactccaccagtaactgttttcaaaggttcaaaaaaaccttacttaaaagaatgcattttgattattaaccatgatactggagaatgtcggctagaaaaactcagcagcaacatcactgtaaaaaaaacaagagttgaaggaagcagtaaaattcagtatcgtaaagaacaacagcaacaacaaatgtggaattcagccaggactcccaatcttgtaaaacattctccatctgaagataagatgtccccagcatctccaatagatgatatcgaaagagaactgaaggcagaagctagtctaatggaccagatgagtagttgtgatagttcatcagattccaaaagttcatcatcttcaagtagtgaggatagttctagtgactcagaagatgaagattgcaaatcctctacttctgatacagggaattgtgtctcaggacatcctaccatgacacagtacaggattcctgatatagatgccagtcataatagatttcgagacaacagtggccttctgatgaatactttaagaaatgatttgcagctgagtgaatcaggaagtgacagtgatgactgaagaaatatttagctataaataaaaatttatacagcatgtataatttattttgtattaacaataaaaattcctaagactgagggaaatatgtcttaacttttgatgataaaagaaattaaatttgattcagaaatttcaaaaa

SEQ ID NO: 4717 - DNA, 1262 bp, Homo Sapiens
  NM_018457
tttgttgtctaatcatcagtcgagcggccacataattaccaattaggcagtagcagaggcgggtgccgaagcacggggtctgggtgactaggaagagccgagactgcgaaggagaacgcagcaagcccaggcggcggtggaaaggctggaggacacacctaaacatgtggaatcccaatgccgggcagccagggccaaatccatatccccccaatattgggtgccctggaggttccaatcctgcccacccaccacctattaatccaccctttcccccaggcccctgtcctcctcccccaggagctccccatggcaatccagctttccccccaggtgggccccctcatcctgtgccacagccagggtatccaggatgccaaccgttgggtccctaccctcctccatacccaccgcctgcccctggaatccctcctgtgaatcccttggctcctggcatggttggaccagcagtgatagtagacaagaagatgcagaagaaaatgaagaaagctcataaaaagatgcacaagcaccaaaagcaccacaagtaccacaagcatggcaagcattcctcctcttcctcctcctcttccagcagtgattctgactgaatacaggccctggacccttccctcaagtctcaccagttctgctctcccatcaagcttcagatgccatgttgtactgggggaatgtagcccttgtgctccccaccccctacctccacctgagcctcaccctgctgttgagccctgagtggctaggggaaatgggaagaggattgccatggcctggccatcttgttgctgcttggttagatcatatagctaatgaattaggcaggggagctattttttgaagatgatgaactaaatgttgaagacaagtttgagatctgtaaaatgtgattttttacttccacttataatacttgtgattggggaggtttgtggaaattcaattatgatgaaaaacctatcttttttgtaatgttggcatacttggggaatttagtggcaaatacattccccagcaggccttttgttggttgcactaactgcaaggttgctgggaagtagagtccatttggttgatgagctttgactgcggttttggaaccttacctctcctccttagcccaatatgctgtcttgggtcctattcaaataaagttatttctcctggtctcagctcaaaaaaaaaaaaaaaaaaaaaaaaaaaaaaaaaaaaaaaaaaaaaaaaaaaaaaaaaaaaaaaaaaaa

SEQ ID NO: 4718 - DNA, 1774 bp, Homo Sapiens
  NM_018460
agtactgaaattaagcagcatccaacacaggcctactcttacgacatgtgactttactgttttccgtttttgttgaaagagtcattaacagttaggagttgatggcagtttcaataacaggtcattgccgagaaaaggatagcactataatatgcagaaatctacaaattctgatacttccgtggaaacactgaattctacccgccaaggcacaggagctgtgcaaatgagaatcaaaaatgccaacagccaccatgacaggctcagccaaagtaaatccatgatcctcaccgatgtcgggaaggtcactgaacctatatccagacacagaaggaatcattcacagcatatcttgaaagatgtcattcctccattggaacaactgatggttgaaaaagaaggttatctgcaaaaagctaaaattgcagatggaggaaagaaactaaggaaaaactggtctacttcctggattgttctttctagtcgaagaattgaattttacaaagaatccaagcaacaggctctgtccaatatgaaaactgggcacaaaccagaaagtgtggatttgtgtggagcacacattgaatgggccaaggaaaaatcgagcagaaagaatgtctttcagatcacaacagtatcaggaaatgagttccttctacagtcagatattgacttcatcatattggattggttccacgctatcaaaaatgcaattgacagattgccaaaggattcaagttgtccatcaagaaacctggaattattcaaaatccaaagatcctctagcactgaattgctaagtcactacgacagtgatataaaagaacagaaaccagagcacagaaaatctttaatgttcagactgcatcacagtgcttccgatacaagcgacaaaaatcgagttaaaagcagattaaagaagtttattacccgaagaccttccctgaaaactctgcaagaaaaaggacttattaaagatcaaatttttggctctcatctgcacaaagtgtgtgaacgtgaaaattccacagttccgtggtttgtaaagcaatgcattgaagctgttgagaaaagaggtctagatgttgatggaatatatcgagttagtggcaatctggcaacaatacagaagttaagatttattgtcaaccaagaagagaagctgaatttggacgacagccagtgggaggacatccacgttgtcaccggagcactgaagatgtttttccgggagctgcctgagccgctcttcccttacagtttctttgagcagtttgtggaagcgatcaaaaagcaagacaacaacacaagaattgaagctgtaaaatctcttgtacaaaaactccctccgccaaatcgtgacaccatgaaagtcctctttggacatctaactaagatagtggccaaagcctccaagaacctcatgtccacgcaaagcttggggattgtatttggacctacccttctgcgagctgaaaatgaaacaggaaacatggcgatccacatggtctaccagaaccagatagctgagctcatgctgagtgagtacagtaagatcttcggctcagaggaagactgacagacaagacaagctactgaatacgttcacatctgtcttgatgcctaatatttttacatttctgtaaacatatttctgaaatattttttgcctttcaagcgacagatgcctcattttgtgaaaacttaatgatgattttgtgtttaagttccaaacatttgaataaaataattgacaataaaaaaaaaaaaaaaa

SEQ ID NO: 4719 - DNA, 2379 bp, Homo Sapiens
  NM_018463
ggaggaagaggcagagattggaggttcaggcagtgacgtaacttgctgccttaggtggccttccgctctggcggctgtcgcgacgggggttcagggaatatttactgggcctctccgctccctctgctcttggaggtgccatgaggtcagttagctacgtgcagcgcgtggcgctggagttcagcgggagcctcttcccgcacgcaatctgcctcggagacgttgataacgatacgttaaatgaactggtggtgggagacaccagcgggaaggtgtctgtgtataaaaatgatgacagtcggccatggctcacctgttcctgccagggaatgctgacttgcgttggggttggagacgtgtgtaataaaggaaagaacctgttggtggcagtgagtgctgaaggctggtttcatttgtttgacctgacacctgccaaggtgttggatgcttctgggcaccacgagacactaatcggagaggagcagcgtccagtcttcaagcagcacatccctgccaacaccaaggtcatgctgatcagcgacatcgatggagatgggtgtcgtgagctggtggtgggctacacagaccgtgtggtgcgagctttccgctgggaggagctaggtgagggtcctgaacatctgacagggcagctggtgtccctcaagaaatggatgctggagggtcaggtggacagcctctcagtgactctggggccactgggtcttcctgaactgatggtgtctcagccaggttgtgcgtatgcaattctactgtgtacctggaaaaaggacactgggtcccctcctgcctctgaagggcccacggatggtagtagggagaccccagctgcccgagacgtggtgctgcaccagacatctggccgtatccacaacaagaatgtctccactcacctaattggcaacatcaaacaaggccacggcactgagagtagtggctctggcctctttgccctgtgcaccctggatgggacactgaagctcatggaagaaatggaagaagcagacaagctgctgtggtcagtgcaggtggatcaccagctctttgccctggagaaactggatgtcaccggcaacgggcatgaggaggtagttgcatgcgcctgggatggacagacatatatcattgatcacaaccgcaccgtcgtccgcttccaagtggatgaaaatatccgtgccttctgtgcaggcctgtacgcctgcaaagagggccgcaacagcccctgcctcgtatatgtcactttcaaccagaagatctatgtgtactgggaggtgcagctggagcggatggagtctaccaatctggtgaaactgctggagaccaagccggagtaccacagcctgctgcaggagctgggcgtggatcctgacgacctccctgtgactcgtgccctgcttcaccaaacgctctaccatccagaccagccaccacagtgtgctccctcaagcctccaggatcccacctagctgtacttgcctcatagctggtgaaggattcttctgaacccccaccctaccccctaaaggtatctgtggtattggcaggatagggaatatgcattacagaaatgcaggatttgactctgggcatgaaagatggcagcagccctagggtgaccgtgaactatagacctcgcagtcttttcggtgaaagaagagacaagttgaccctctgcccatttccttatggacctcacccatcatgccagcagggtcataggaccctggccttgttccaaatcatctgggacatgacccactccccactgtcactgtgttgaaaacagagacttgtttgtgtggccccaacacccataaggaaaccaggctttaggcccaggggagcagtggaggtaagggctccaccccatcttaagctctgtcttccgtggcacaattccaagttcttgacgttagtaattgttaaaggaatggcaaactgttttgttttgaaggatctttctacagtctggtcttacccatgttcctagcaaccctgagatgattttcttccatttaccaaagcagccgggtcagtgctttctcacgttgccgtattcttcaggtattagtcagcttcagaagccctgctcccatttttccacccacccattcccccataaaacagcttattgtctccaagacaatagacatttaaaatgtgatgcgggtttatgatccagaccacaatcagaattatatcttgggtcatttatgtgccgtctgttcttgattctctatgctctaaatcggtgtttttcaaactgtggttgcagtcctttggtggattatggccagcattttttaaataggtagaatagaataaagtaaaatagaaaatagcaaaaaaaaaaaaaaaaaa

SEQ ID NO: 4720 - DNA, 926 bp, Homo Sapiens
  NM_018465
gcagcgggcgaaaggagccggggcctggaggtttgcgtaccggtcgcctggtcccggcaccagcgccgcccagtgtggtttcccataaggaagctcttcttcctgcttggcttccacctttaacccttccacctgggagcgtcctctaacacattcagactacaagtccagacccaggagagcaaggcccagaaagaggtcaaaatggggtttatattttcaaaatctatgaatgaaagcatgaaaaatcaaaaggagttcatgcttatgaatgctcgacttcagctggaaaggcagctcatcatgcagagtgaaatgagggaaagacaaatggccatgcggattgcgtggtctcgggaattcctcaaatattttggaactttttttggccttgcagccatctctttaacagctggagcgattaaaaaaaagaagccagccttcctggtcccgattgttccattaagctttatcctcacctaccagtatgacttgggctatggaacccttttagaaagaatgaaaggtgaagctgaggacatactggaaacagaaaagagtaaattgcagctgccaagaggaatgatcacttttgaaagcattgaaaaagccagaaaggaacagagtagattcttcatagacaaatgaaatcatgcttaccaatcaaatctcaaagcacagaattattgacttgaatcatggtttttacagttttttaaatgctcaagattttgatattatagattttattttaaaatattaaaatgcaagatagttttgagctattttaaaataaaatttataacattcaacacaaaatcatggaggtgctctaaataacttttagatttcctctctctgtgtgcattaccaatatctaagtgtaaaattaataaattgttttgaattcctggaaaaaaaaaaaa

SEQ ID NO: 4721 - DNA, 2993 bp, Homo Sapiens
  NM_018466
acggatttccgcctccctcacagaaggcagtcactgcaacgtgcgtggcctcagttgcgtcatatccggcccttgcgatcagggcttgaggaacccgcgccatgaagtgcgtgtttgttaccgtagggaccaccagctttgacgacctcattgcgtgtgtgtcggcgcccgacagtctgcaaaaaatcgagagccttggttacaaccgacttatcctgcaaattggtagaggaacggtggtacctgaacccttcagtactgagtcgtttactctggatgtttacaggtacaaggattccttgaaagaagacattcagaaagcagatcttgttattagtcacgcaggtgcaggaagctgtttggagactctggaaaaaggaaagccactcgtagtggttataaacgaaaagttgatgaacaatcatcagctggaactggcaaagcagctacacaaagagggtcatctcttctattgtacctgcagcacgcttcctgggctgttacagtcaatggacttatcaacactgaaatgttatcctcctggccagccagaaaaattttctgcatttttggataaagttgttggattacaaaaataaacactaaactctcaacactttaaaagcaacccccaaattcaacctatgtaatgtgattaaatcaaattaaatacataatatatatttacaaaataatataattaataaacttcctacatctatagaatgtataggaaattttatgttgtgcacatttgcattgggtccaaatcctaattgcagtttagtgaaattactagatttttttctaatcttcagtatgtagtgagcattcacaggttttctcctagaatctcaagtggaattggaatcataaaaatgaatgagatttgaaaactttcacaaagattataaatgtagttagtttgatactccttagaataaaaaaatgaaacagtaacaacttttatgtaaaaaaattttacataagagttagcatctttagctttataatctaaggaaccaaatttaaaaaatgatggattatgctctgtgaaatgaaaagttcaatcattgcctaaaaaagatgatcaagttagttgatctcttgtacttggaaaagctacttttttcctaaagaacagagtggagtggatatattcactttttttttctaaaacatacaaagtgataaaataatcgtgcctaatgtcaaaactttactggtttgagaagaataatcaaaaaggacttataccaataggacttactattgttttttaaggatctcctctcacagtggtaatgaaacattaactgtaacagaaatttacaatttatgtgcttataaaattagttttatgaatgaacaataaactgatgcatataatggcttaaatatatggttttaaaattgacttaacttgagcaagatacattatgaagttctttctgattagagtgtgtggtctcaagacctttacagtagattatccttaagtgtccatagctctctggtacaatgtttagatatagtttatctatcaaaatagaacattcactataaagacctctcttccattccaatcatattatcccaacatgctaaatgttccaaacattttatttggaatgcattttatcatgtttttataggtttatttttctgattgtgttttatttaggctaatattaaaaaaatgcttactagtggtagaaggtggtgacaaagaaatactctgggtagcaggaggaagccaacttggattaaaattttgctgagaataatctaaaaagtgagtaatctggttgagaattcacagcaccataatcataattgtatatcaatgttatgttttaggaaaggtcctattcaaatccagggagagaatctttagtgttttctgggccctcataaatacgtttttctcatttgagaaaattgtgactttatgttggtcacttagtttttatagtttatgatgaagaattaaagagaaacaaatgaaaggcaaggtctactcaaatatcagacaactaaaaggctatacagcccctaaatcctttgctatctacttccccagaataatgcataacctaaattccattatttcatttagcagaggtttaagccgttgttgtcaattgtgtgcagtaacgcctctgacttcccttttgtggaattttgtatcgattttggatttttaagtcaaaggagactttaaaatcattttgatttggcacggattcttgagattatctagtccaattccatcatattcagattttaccatttgcttaaagtatagcttttggcagaactgcccctaggagcagctccttgattcccagtcccctgctctttctaccctgcataatatatgttgtaagctttttgtttctttatagttgtttgcctagtgttcattttagttactcgaattccttgcaaggtaggttttgtttgtttatttatggaagttatttagtaggaatttcacacttaactgggttttcctttggcgtatgacaaccttacctaggacttagaaatctgtgatttctgagtttttggaatttaggaaaatgctctgggtaggattgatagtagattgaataaattaagactttaagacagaattgtagacttttggagttgggagataatttaaagaatattttaaaccaccagttttacagatgaggaaacatgctaaattaatcaccacatttacatcttattagtccttattaaagaatggtaaccaaaagtctgtttgaaatgtttgctctatttgtttggtttcattacatgacagagctgcaggttcttgatattaatgagtaagtggaatgcagtttatttagcagtgttctattagaggtactgaaattttcagggataaggaaatgaaagagagtttagcattgggaaatttgcaccatggatagattaagaggtagacagttaatagaacatttacgggttggagt

SEQ ID NO: 4722 - DNA, 877 bp, Homo Sapiens
  NM_018467
gcacttccgccctctcttaacatggagccggcggaaggggtggtgtagggccgggcgataatggcggcgtcgaggctggagctaaacctggtgcggctgctatcccgctgcgaggcgatggcagcggagaaacgggacccggacgagtggcgcctggagaagtacgtgggagccctagaggacatgttgcaggccctgaaggtccacgcgagcaaaccggcctctgaggtgatcaatgaatattcctggaaggtggattttctgaaggggatgctgcaagccgagaagctgacctcctcctcagagaaagcactggccaaccagttcctggcccctggccgtgtgccaaccacagccagagagcgagtgcccgccacaaagacggtgcatctgcagtcacgggcgcggtacaccagcgagatgcggagtgagctactaggcacggactctgcagagcctgagatggacgtaaggaagagaactggagtggcagggtcccagccagtgagtgagaagcagtcggcagctgagctagacctcgtcctgcagcgacatcagaacctccaggaaaagctggcggaagagatgctaggactggcccggagcctcaagaccaataccctggccgcccagagtgtcatcaagaaggacaaccagaccctgtcacactcactgaaaatggcggaccagaacctggagaaactgaagacggagtcagagcgtctggagcagcacacgcagaagtcagtcaactggctgctctgggccatgctcattatcgtctgcttcatcttcattagcatgatcctcttcattcgaatcatgcctaaactcaaataaagacccccgcccacctaaaaaaaaaaaaaaaaaaaaa

SEQ ID NO: 4723 - DNA, 5105 bp, Homo Sapiens
  NM_018469
gtgtgcccgggggcgggcgggcggcagggcagcaggaccgcggccggtgccccagccgaagccggagtcgcgcggccgggagcacgggcgccggcatagtacaatgaggcagccagcggatcttggagcctgagcccttgtgaagccggcaatgacaagtctgtatggtcgccatgccgagaaaaccactgacatgccaaaaccatcagcccctaaagtgcacgtgcagaggtccgtgtcccgagataccatcgccattcacttctcggcatccggcgaggaggaggaggaagaggaggaggagttcagggagtactttgaggaggggctggatgaccaaagcattgtaacagggctggaagccaaggaagacctctatcttgaaccccaagttggccatgaccccgccggccctgctgcctcgcctgtcctggcagatggactgtccgtgtcccaggcccctgccattttgcccgtctccaagaacactgtaaagctgttggagtcccctgttccagcagcacaagtattaagtacagtgccattggctgtgtccccagggtcgtcttcgtcggggcccttagctagctctcccagtgtgtcatccctttctgagcagaaaaccagttcttcctccccattgtcctctccttctaagtctcccatcctctcatccagtgcctcaacctccaccctttccagtgcaaaacccttcatgagccttgtgaagtccctgtcgaccgaggtggagccaaaagaatccccacaccccgcaaggcacaggcacttgatgaagacattagtcaagtctctgtccacggacacttcccggcaggagtcggatacagtgtcctataagccacctgattccaaactgaacttacacctgttcaagcagttcacacagccccgaaacacaggtggagattccaaaactgcaccttcttccccactgacttctccctctgatactcgttccttttttaaagtgcccgaaatggaggctaaaattgaagatactaaacgacgcctttcagaagtcatctatgagccttttcagctccttagtaaaattataggggaagaaagtggcagccataggcccaaagccttatcttcaagtgcttcagaactctccaatctgtccagcttgaatgggcacttggaaagcaataacaactacagcatcaaggaggaggagtgtgattctgagggggatggctacggaagtgattccaacatccccagaagtgaccacccaaagtccactggtgagcccacaagagagatagaactgaaaagttcccaggggagcagtctgaaggatttaggcctgaagacaagttctctagttctggagaaatgttctttgtctgccttagtgagcaaagaagatgaagagttttgtgaactgtacactgaggacttcgatttggaaacggagggggagagtaaagttgataagctctcagatattcctctcaagccagaggtgctcgcggaagatggtgtggtccttgacagtgaggacgaggtggactcggccgtgcagcacccggaattgccagtgaagacgttgggcttctttataatgtgtgtctatgtgtacctcatcctccccctcccccactatgtgagtggactctttctgggaattggccttggattcatgactgcagtttgcgtgatttggttttttacaccaccaagtgctcataaatatcacaagttacacaaaaatctgcgacactggaacacaagatctctggatatcaaagaacctgaaatactgaagggatggatgaatgagatttacaactatgatccagaaacctaccatgcgactttgacacattcagtctttgttcgacttgagggtggaaccttaagactttcaaagcccaataaaaatatatccaggagggccagctacaatgaacccaagccagaggtcacctacatcagccagaaaatctatgacctctcagacagcaagatttatcttgtacctaaaactttggctcgaaagcgaatctggaataaaaagtaccccatttgtatcgagcttggtcagcaagatgactttatgtctaaagctcagactgataaggagacttcagaagagaagccgccagctgagggaagtgaggaccctaagaagccaccccgccctcaggagggaacaagatctagccagcgagatcagatactctatctctttgggagaactggccgagaaaaagaggaatggtttaggagatttattctggcatctaagctaaagtcggaaatcaagaagtcatcgggtgtctctggaggtaaaccagcccccgtcttcttggctccagggcttttgcctgcacacagcagacacaacagtccgtccgggcacctgacccacagccgcagcagcagcaaaggcagtgtggaggagatcatgtcacagccaaagcagaaggagctggcaggcagcgtgcggcagaagatgcttctcgactacagcgtgtacatgggcaggtgtgtcccccaggaaagccgaagcccccagaggagccccctgcagagtgcggagagcagccccacagctgggaagaagttgccagaggttccaccctctgaggaggaagaacaggaagcctgggtgaatgccttgcttggaagaatattttgggacttcttaggagagaaatactggtctgatctggtgtctaagaagatccaaatgaaactcagcaaaataaagctcccctactttatgaatgagctcactctgacggaacttgacatgggcgtggctgtgccaaaaatcctccaggccttcaagccttacgttgatcaccaaggactctggattgatttggaaatgtcctacaatgggtcctttctgatgactctcgagaccaaaatgaatttgaccaaactaggtaaagagcctcttgttgaagccctgaaggttggagaaattggcaaagaaggttgcaggccccgggcattctgtctggcggacagcgatgaggaatcctccagcgctggctcctccgaggaagacgatgccccagagcccagcgggggagacaaacagctcctcccaggggctgaagggtacgttggaggtcatcgaacaagtaagattatgaggtttgttgataaaattaccaagtcaaaatatttccaaaaagcaacagagacagagtttattaaaaagaagatcgaagaagtctccaacacacccctgctgctcactgttgaagtacaagaatgtagaggaaccttggcggtcaacattccaccacccccgactgaccgagtatggtatggtttccgaaagccaccacatgtggagctgaaagctcggccaaaacttggagagagagaagtgactttagttcatgtgacagactggatagagaagaaactggagcaagagtttcagaaagtttttgtcatgccaaacatggatgatgtttatatcactataatgcactcagccatggaccctcgctctacttcctgcctcctgaaagacccacctgtggaggctgctgatcagccatgatgggtgatgtcagatgttccccatattgtgacatcgagctggatgtgtggggttcttggccgccatctgtactgtagcactggcctctgtgccacagctactgtttcttaaaggactgcttctgccctctgcctgccagtgcccattccactgtgaggtgtcattccctgcatctagtgacaactgtctggattgcctgctgcaaagctttgatttggcaaaggagaccatggaagaatcatggtggatccagaagttatacgtgacccacaccatggcttttaaaagtctacccatgtttgtggcagcaaatgagcacagtaagagcaaagctgaacaacttgcctcctctactcctccaaagcttttcttcaggcagccggtgcacagtggactttttcacttctatactttgtatgcggccttccacacttccagagaatgtcagtgtgcaatgtgtctggagggtggggagaggaattctgtgagccttttcatttcggtgacagaagagatgggcagagcaacttattttccacattaaattgtgcatttgggaagcaagtagccatagtacacacacaacacgctatcagcttgggtaaggacagtgggatttatgtgaacatcaggcaaagccatgagatcaaaccatcccaagcctttcaccaatgaggtacaaccacctgggggctagctaatcttgaatgttttcctgagacaggagcgtatgtgaaaacatcaaacactgcacatgacaggatgggtcctctcatacagatgggatggggttagaaagccagagccagtttttccatctggcgtttcctgtgtcctccaggtttatatgggaatcgaaacagtttgttaatctgattgggagagttccatgggcagatttcccttcctgaaggccaaaacggagaactgctctctttaattatttcaagagtcaagaccaaaagtttgctcagcatcacactacatctcaaaattaatgttgccaacttaattttgtgcatttgtgtcagaatgtttagtttacaaggttgggggctctctttgcttcgagaagtaaacctaataccatttttttattgtttaaagctgcattcaacgtcaaaattaccttgggtaacttttgataacttacatgtgtggacaaagctaatagtggttttttaaacagcaccttgcctgaacatgactttaaagaaattaatatattgaaaacatgtttgaacccttattttaattgcaccattaaaacatttgacttaaattgtttgaccattccagttggtgtactgttctgatttttcgttgtgtaggccgatctgcctgtcagagtccacgtgtcctggtcactggtctttataattgttgtgcaataactaaaggctaaggactagatgcactatcgtgtaaagagattacacatgactgtaccatgttgcacttaatcaaatagtatgtggggatttaaaatcgcttgcattgtttcacaaaataaatatctcaatgtcaaatactaaaaaaaaaaaaaaaa

SEQ ID NO: 4724 - DNA, 4118 bp, Homo Sapiens
  NM_018473
aagcgcgcatgcgcgcttcgtcacaagggtgcgaggaaagtcagtgagcaaatcgcggaccaccggggctgccagctcgcctgactcccggcctcttgcgctcctaggggcggagaagggtgcgggctcttcgccctttgtgtcctccttctttcactaacttctggactttccagctcttccgaagttcgttcttgcgcaaagcccaaaggctggaaaaccgtccacgatgaccagcatgactcagtctctgcgggaggtgataaaggccatgaccaaggctcgcaattttgagagagttttgggaaagattactcttgtctctgctgctcctgggaaagtgatttgtgaaatgaaagtagaagaagagcataccaatgcaataggcactctccacggcggtttgacagccacgttagtagataacatatcaacaatggctctgctatgcacggaaaggggagcacccggagtcagtgtcgatatgaacataacgtacatgtcacctgcaaaattaggagaagatatagtgattacagcacatgttctgaagcaaggaaaaacacttgcatttacctctgtggatctgaccaacaaggccacaggaaaattaatagcacaaggaagacacacaaaacacctgggaaactgagagaacagcagaatgacctaaagaaacccaacaatgaatatcaagtatagatttgactcaaacaattgtaatttttgaaataaactagcaaaaccagaagcagctagaaatattcttggaggaaaaggacctggatatcaagtagggtaaaggtgggggtgtcttttttcactttaagcatcttgttttctaatcatgtgtgataattgggtgaaaaattcttagctcaaagtgttttaaaaacaggtaaagcaaagaaactagcaggaccactctcagttaagattaaaactaaagtccagtgttaagctaaaggagaaatagaaattaatggttctaattctgtttgggctgctaggaacaacagaaatttttcatggttctagaagctggaaagtcctgggtcaaggcccagcagatcctgttaggtgagggcccgcttcctggctcatagatggtgccttctcactgtgtggtggaaggggcaagtgagccctctgggttctcgtttttgaaatggagtctcgctctgttgcccaggctggagtacagcagcacgatctcggctcactgcaatctctgccccctgggttcaagtgattctcctgcctcagcctcccaagtagctgggactataggcatgtgccatcacacctagctaatttttgtagttttttgtagaaacagggttcaccatgttggccaggctggtctcgaactcgtgacctcaggtgatccgcctgccttggccccccaaagtgctgggattacaggtgtgagccaatgtgcccagcctgggttctcttttgtaagggcacttactccaatcttgagggttctgccctcgtgatctaataacttcccaaagacccccacctgctaatatcaccttgggggttgggattttaacatacaaatttaggggaaacacatggagaccacagcaatggccaatccttagcgaatcttaggtccttcccagatctaaaatgccaagctacacttgcatttcctttttttaagattatgaaacttcaaaatatatgaactacagcccatattgaaaaataaaatagattgagccatatgcctaaaaaagacctcaagaaaagtttgaggctaagcatgttagtgttacaggaaatggtccaatagagggggaagaaaaaaagcatgctactagccccttttcttgtaccgagaataaaaccatgcagatctcaaacctccaagtctatagtattgaaaagaccaagttcacttctcagaagtctccaagttcagttgactgtggcactctgagacagcttctgtcactcaggctggagtgatacaatcacagcttcccatagcctcaaaatcccaggctcaagacattcttccacctcagtctcctgagtagctggaactacaggcgtgtgccaccacgcctaattttatttttgtagaaacaaggtctcactgttgcccagcctcgtctcaaactcctaggctcaagcaatcctcctgccttggccccccaagtactggacttacaggtgtgaaccactgcacccagctgactcttacttgatttctgtcagggaatcttaatgaacatttcatgactaaagactaaaaaggatgcagctttaagtaaatttaagtcaagttaacagttaaagacaaatcctttccctacattagatcgcctgctgatctgtccactgtgaaagggcagaagactccacagtagcaatagcagcagtgagcatacaggagtcccagatgtttacttctagtatttcccactaaaaggaagctgggctccttggagaaacagctgactccagggcttgaggctgggacagaaaggttacagtatcttatgcatgaaaggagatgctcaaaataataaaggcatgcaaattatgatttggagggaaaaaatatgaggccatagtgtttaggtagataataaatggcagagatagaacactctcttacaacaaatgctgtaaatggacaaagcattagatttggaaaatcactattttgtaaccatcatagttaaagactggtttgggttttagtctggaaagaatcgccaagggagctcctgataaaggaacagggtatttgcacattgcttcccagagattgctagtagtaagtaccacacatagggcaaaaccaggacaccttgaccaggcgctcaaaagtaacatcaatgaagagcagatggagagtatacttgagaagggcgttaagcatgaataaacaattcaaatgcaaaatgagtaacaatttacaagaaaaattgccctgtactccaaaaaacatagaggtcatggaacacataaaggctaaggaactgttccacattaaagacaactgagaacaactaaattcaatgatcctgtactctagagggggggatctaaaacaagctaccaaggatactgggacaacaaaacgaatatggatgataaagagtatcaacattccctgagtttggtaattttactctagttatatgaaatattcttgtacttggaacatatgccgaagtactaaggaaggggtaaggaagcacaaagtgtgcaacaaactcaaatagctcacaggtataagtgtacagagaaaatgaaaaaaatgtggcaaaataataaaaatgagggtaaagattacacaacagctttcatattactctggtaacttttctaaattattccaaaataaaaacgtaaacaatggctgccaaaatgcctaacttggtgaacataagtgtaattcaatatggtaaattaattcaacatggtaaattaagagcataggccttaagagccagccagcctggttttaaatcctccactacttatgatctgagcttgagcaagttacttaacctctgcatctatttccaccaaaggttgagaggttaagacaagagcttagaagagtacctggttataataaacattcaaaatgttatttcaaatagattctaatttttaaataagaggacacatgaaagcattttgaaatttaagaatggccctttcccatgaagcaaggcataaggccaggttgctaactgttgaaagctgacagtatgttcttgattcctgttcttgttgaagttacacactcaattgccaggtatttttcttctgaatttactatttagccacagactatgaaataattctctaaggtgaccagtaacatcagtgaaatggaaagaaaaagttaacacttcaaactttgtgtattcacctgaatagtcagggaactttcacctattttatttaggttttctttttctttttttctttttttttcaaattccaaccagaagctaaatacaattggaaactggtaagcactagttttactccaaaggagtaggatcattcagatttactccaataaaagtatgcaacccttaagcaaagcttttcttcatttaaaaaaaaaaaaaaaa

SEQ ID NO: 4725 - DNA, 2329 bp, Homo Sapiens
  NM_018474
ggcgtcttgccccgcctcctgcaggcggcccggcgcggtgtttacccgcggtgcatggtggggcggtctccttcggcaaccccggccgaacggccacccagaggctgtgctgagctggcgcagcggcagcagcatgagccggaccctcgcatcggccgtgcccctgtcgagtcccgactactacgagaggctgggccaactccagcacgggctgcgggacagtgaaaagaagagattggacctggaaaagaaactttatgaatataatcagtctgatacatgcagagttaagctgaaatatgtaaaactaaagaattatctgaaggaaatatgtgaatctgaaaagaaggctcatactcgaaaccaagaatatttaaagcgatttgagcgtgtccaagctcatgttgtacacttcaccacaaatacagagaagcttcaaaaactgaagctcgaatatgagactcaaattaagaagatgctatgctcaaaagatagcctgggactaaaagaggaactgacagatgaagacagagaaaaggttgcagtgcacgaggggattaactcaggaacagccatgtcaagaggattgtatcaaccagcaacaatctttatgggccgccaaatgtcagccatcttaagcatgagagatttcagtacagagcacaaatctccccagcccacaaagaacttttcaattcctgacccacattcacaccgacagacagcccagagcagtaatgtgacagacagctgtgtagtacaaactagtaatgacacacagtgcttaaataagtctgacaacatagatggaaaggcatctcttcagattggtgagaaaatgccagtcacagccagtgtattgtctgaggaggaacaaactcattgcttggagataggaagtaacacacgtcatggcaagagtaatttatctgaaggcaaaaagtctgctgaactcaattccccgttacgggaaagattaagtccagagaacagaaccactgatttaaagtgtgacagttccagcggatcagagggagaaatactgacacgggaacatattgaagttgaggaaaaaagagccagcccgccagtctctccgataccagtttcagaatactgtgaatctgaaaataagtggtctcaagagaagcattctccttgggaaggtgtttcagatcatcttgctcacagggaaccaaagtcacaaaagcccttcagaaaaatgcaggaagaggaggaggaaagttggagcaccagcagtgaccttaccatttcaataagtgaagatgatctgattttagagagcccagaaccacagccaaatccaggtggcaagatggagggagaagatggaatagaggccttaaaattaatccatgctgagcaagaaagagttgccctatccactgaaaaaaattgtattttgcaaaccctaagctctcctgattcagaaaaggaatcctccactaacgcaccaacaagagaacctggacaaacaccagactcagacgtaccgagggcacaggtgggtcagcatgttgccaccttgaaagaacatgataattctgtcaaagaagaggcaacagcattattgagaaaagcccttacagaagagtgtggccgtaggtcagctattcacagtagtgaatcatcttgcagcttgccatctattctgaatgacaatagtggaataaaggaagccaaacctgctgtatggctcaacagtgttcctacaagggaacaagaagtttcaagtggctgtggagacaagagcaagaaagaaaatgtggctgcagatatcccaatcacagaaacagaagcctatcagttgctgaagaaggccacccttcaggataatacaaatcaaactgaaaacaggtttcaaaagacagatgcttctgtgtcacacttgtcaggtttgaatattggcagcggtgcattcgagacaaagacagctaacaaaattgcttcggaagctagtttttcatctagtgaaggaagtcctttgtcaaggcatgaaaacaaaaagaaacccgtgatcaatttaaaatctaatgccctctgggatgagtctgatgacagtaactcagaaattgaggctgctttacgccccagaaaccataacaccgatgattctgatgatttttatgactaacgtgctgtgacattggtttcaaataaagtctttaaacaaactaaaaaaaaaaaaaaaaaaaaaaaaaaaaaaaaaaaaaaaaaaaaaaaaaaaaaaaaaaaaaaaaaaaaaaaaaaaaaaaaaaaaaaaaaaaaaaaaaaaaaaaaaaaaaaaaaaaaaaaaaaaaaaaaaaaa

SEQ ID NO: 4726 - DNA, 1983 bp, Homo Sapiens
  NM_018475
gagtcggggctgggccgcgccgaggcagctggctgactccagtttagccgccgccggagaggacgggcgccgagccggggctgcggacttcggcctgcccctcacctcactcccgctgcttgcacctcccggatggtgctgactgctccctaagcggcggcggcggcgagtcgtgaggacgcgccgcggaggctgttcggggtcgaggcttcccgtcgccggcacttcctcttgcggcgcccgtgcgcggccggcccggcaggcgggatggcggccgcggctccagggaacggccgcgcatcggcgccccggctgcttctgctctttctggttccgctgctgtgggccccggctgcggtccgggccggcccagatgaagaccttagccaccggaacaaagaaccgccggcgccggcccagcagctgcagccgcagcctgtggctgtgcagggccccgagccggcccgggtcgagaaaatatttacaccagcagctccagttcataccaataaagaagatcctgctacccaaactaatttgggatttatccatgcatttgtcgctgccatatcagttattattgtatctgaattgggtgataagacattttttatagcagccatcatggcaatgcgctataaccgcctgaccgtgctggctggtgcaatgcttgccttgggactaatgacatgcttgtcagttttgtttggctatgccaccacagtcatccccagggtctatacatactatgtttcaactgtattatttgccatttttggcattagaatgcttcgggaaggcttaaagatgagccctgatgagggtcaagaggaactggaagaagttcaagctgaattaaagaagaaagatgaagaatttcaacgaaccaaacttttaaatggaccgggagatgttgaaacgggtacaagcataacagtacctcagaaaaagtggttgcattttatttcacccatttttgttcaagctcttacattaacattcttagcagaatggggtgatcgctctcaactaactacaattgtattggcagctagagaggacccctatggtgtagccgtgggtggaactgtggggcactgcctgtgcacgggattggcagtaattggaggaagaatgatagcacagaaaatctctgtcagaactgtgacaatcataggaggcatcgtttttttggcgtttgcattttctgcactatttataagccctgattctggtttttaacaagctgtttgttcatctatatttagtttaaaataggtagtattatctttctgtacatagtgtacattacaactaaaagtgatggaaaaatactgtattttgtagcactgattttgtgagtttgacccattattatgtctgagatataatcattgattctatttgtaacaaggagttttaaaagaaacctgacttctaagtgtgggtttttcttctctccaacataattatgttaatatggtcctcatttttcttttggtgcagaaccgttgtgcagtggggtctaccatgcaattttctttcagcactgacccctttttaaggaatacaaattttctccttcatcacttaggtgttttaagatgtttaccttaaagtttttcttggggaaagaatgaattaatttctatttcttaaaacatttccctgagccagtaaacagtagtttaatcattggtcttttcaaaactaggtgtttaaaaaaagagacatatatgatattgctgttatatcaataacatggcacaacaagaactgtctgccaggtcattcttcctcttttttttttaattgggtaggacacccaatataaaaacagtcaatatttgacaatgtggaattaccaaattaaaagagaatactatgaatgtattcatattttttctatattgaataaacaatgtaacatagataacaatataaataaaagtggtatgaccagtgaaaaaaaaaaaaaaaaaa

SEQ ID NO: 4727 - DNA, 862 bp, Homo Sapiens
  NM_018476
cttggcggtgacgcacggccctcacgtgaccgggagctgcagagctacgcagccttcggtgcagtcgtcactcgtgtctcgctaccagctccccgctgccctgcgctcggcgggctggcatccggcccgggggaaagcggaccagcccttctgcaggtctgcggggccaagtgtcccggcggcgcacctcgtggcgagaatcgggagaaggaggagactacaaggataggcccaggagtaatggagtccaaagagaaacgagcagtaaacagtctcagcatggaaaatgccaaccaagaaaatgaagaaaaggagcaagttgctaataaaggggagcccttggccctccctttggatgctggtgaatactgtgtgcctagaggaaatcgtaggcggttccgcgttaggcagcccatcctgcagtatagatgggatatgatgcataggcttggagaaccacaggcaaggatgagagaagagaatatggaaaggattggggaggaggtgagacagctgatggaaaagctgagggaaaagcagttgagtcatagtctgcgggcagtcagcactgacccccctcaccatgaccatcatgatgagttttgccttatgccctgaatcctgatggtttccctaaagttattacggaaacagacccctgctttcgaatttacatgttcatgatgtgcccttgttgtaaacctttacctgtcacttgtttacgtgggtctcctattaccagcttctaattgaatattgtgtttttgaaccagtctgtaagatttttgttagcagaagaattttacctattgcatggaaagatgctcattatagtgaagttaataaagcacctttaaaaagc

SEQ ID NO: 4728 - DNA, 2451 bp, Homo Sapiens
  NM_018477
gtcgccgacgcccgagcgccggagccccggccccgccccgcgagcgccgagacttgttggccgcggagactgcgaccctcttctctcagtctgccttactaccatgccgctctacgagggcctggggagcggcggggagaagacggcggtcgtgatcgacctgggagaggcctttaccaagtgtggatttgctggagaaactggtccaagatgtataattcctagtgtgataaaaagagctgggatgcctaagcctgtcagagttgttcagtataatatcaatacagaagaattatattcctacctaaaggaattcatccacatactatatttcaggcatctattggtgaatcccagagaccgccgagttgtgattatcgaatcggtattatgtccttctcacttcagagagacactcactcgtgttcttttcaaatattttgaggttccatctgtcttgcttgctccaagtcatctaatggctcttctgacgcttggaattaattctgccatggtcctagattgtggatatagggaaagcctggtgttacccatatatgaaggaatcccagttctaaattgttggggagcactacccctaggaggaaaagctcttcacaaagagttggaaactcaactattggaacaatgtactgttgacacaagtgttgctaaagaacagagccttccctcagtgatgggttcagttccggaaggtgtcttagaggacattaaagcgcgtacttgctttgtaagtgatctgaagcgaggactaaaaatccaagcagcaaaatttaatattgatgggaataatgagcgtccctccccacccccaaatgttgactatccattagatggagagaagattttacatatccttggatcaatcagagattcagttgtggaaattctttttgaacaagataatgaagagcaatcagttgccactttaatattggattcccttatacagtgtccgatagacaccaggaagcaactagcagagaatttggtagtcataggtggcacttctatgttgccaggatttctccacagattgcttgcagaaataaggtatttggtagaaaaaccaaaatataaaaaagcacttggcactaagacatttcgaattcatactccacctgcaaaagctaattgtgtggcctggttgggaggggctatttttggagcattacaagatatacttgggagccgttctgtttcaaaggaatattataatcagacgggccgtatacctgattggtgttctctcaataacccacctttggaaatgatgtttgatgtcgggaaaactcaaccacctctgatgaagagagcattttccactgagaaatagaagtttgattaaaaatcaaccttgcttcatatcaaatatttaaccaattataagcaaattgtacaaagtatgtaggatgttttgttatagaggactatagtggaagtgaaagcattctgtgtttactctttgcattaatatataattcttttgactttgtttctcttgtgtagtggtaaaatggtagctggtgcttattgagatttgctgtatttatatcaataaagtatagtaaagcagtttgattttggaagtttgttatgtggctttttttttttttttttttttgagacggagtctcgctctgtcacttaggctggagtgcagtggcacaatctctactcattgcaagctccgcctcccgggtttacgccattctgtctcagcctcctgagtagctgggactataggcatacgccaccccgcccggctaattttttgtatatttagtagagacggggtttcaccatgttagccaggatggtctcaatttcctgacctcgtgatccaccctcctcggcctcccaaagtgttgggattacaggcgtgaaccactgtaccagcctatgttgcttgtctttcaaaaagaacagtatttctccacagttcacataacctgttctgggctcattaattgtgtttccagcagttactccatttaaagcataaatagtgttaaccattaccagttatttcaaatactaacatgggtccatttaaaaaaaatatttattttggtacttgggtgtccatattataataatgttgtttttccagaaatatatttgatctttggactgagaatgtttggtaacatagtcaagcatttgttaagccaagtgtggaaatgttcactttttaactttacagtttttttaatgagcaattctacatttctaagaaaaaagatacttcatttttatataaggttacaactgctttataaaaatgtattcacaatgtcattaatctttgcgtttgtgctttatatcttctcagggcagaggttcttgaaatatgtactcaatcatttaacttttattttattttttcatttgtttttaatgaactacctcttgttgaaaaaaaaaaaa

SEQ ID NO: 4729 - DNA, 6042 bp, Homo Sapiens
  NM_018482
ggtcgttttctgatgtgacggctgagacatgagatcttcagcctccaggctctccagtttttcgtcgagagattcactatggaatcggatgccggaccagatctctgtctcggagttcatcgccgagaccaccgaggactacaactcgcccaccacgtccagcttcaccacgcggctgcacaactgcaggaacaccgtcacgctgctggaggaggctctagaccaagatagaacagcccttcagaaagtgaagaagtctgtaaaagcaatatataattctggtcaagatcatgtacaaaatgaagaaaactatgcacaagttcttgataagtttgggagtaattttttaagtcgagacaaccccgaccttggcaccgcgtttgtcaagttttctactcttacaaaggaactgtccacactgctgaaaaatctgctccagggtttgagccacaatgtgatcttcaccttggattctttgttaaaaggagacctaaagggagtcaaaggagatctcaagaagccatttgacaaagcctggaaagattatgagacaaagtttacaaaaattgagaaagagaaaagagagcacgcaaaacaacatgggatgatccgcacagagataacaggagctgagattgcggaagaaatggagaaggaaaggcgcctctttcagctccaaatgtgtgaatatctcattaaagttaatgaaatcaagaccaaaaagggtgtggatctgctgcagaatcttataaagtattaccatgcacagtgcaatttctttcaagatggcttgaaaacagctgataagttgaaacagtacattgaaaaactggctgctgatttatataatataaaacagacccaggatgaagaaaagaaacagctaactgcactccgagacttaataaaatcctctcttcaactggatcagaaagaagattctcagagccggcaaggaggatacagcatgcatcagctccagggcaataaggaatatggcagtgaaaagaaggggtacctgctaaagaaaagtgacgggatccggaaagtatggcagaggaggaagtgttcagtcaagaatgggattctgaccatctcacatgccacatctaacaggcaaccagccaagttgaaccttctcacctgccaagtaaaacctaatgccgaagacaaaaaatcttttgacctgatatcacataatagaacatatcactttcaggcagaagatgagcaggattatgtagcatggatatcagtattgacaaatagcaaagaagaggccctaaccatggccttccgtggagagcagagtgcgggagagaacagcctggaagacctgacaaaagccattattgaggatgtccagcggctcccagggaatgacatttgctgcgattgtggctcatcagaacccacctggctttcaaccaacttgggtattttgacctgtatagaatgttctggcatccatagggaaatgggggttcatatttctcgcattcagtctttggaactagacaaattaggaacttctgaactcttgctggccaagaatgtaggaaacaatagttttaatgatattatggaagcaaatttacccagcccctcaccaaaacccaccccttcaagtgatatgactgtacgaaaagaatatatcactgcaaagtatgtagatcataggttttcaaggaagacctgttcaacttcatcagctaaactaaatgaattgcttgaggccatcaaatccagggatttacttgcactaattcaagtctatgcagaaggggtagagctaatggaaccactgctggaacctgggcaggagcttggggagacagcccttcaccttgccgtccgaactgcagatcagacatctctccatttggttgacttccttgtacaaaactgtgggaacctggataagcagacggccctgggaaacacagttctacactactgtagtatgtacagtaaacctgagtgtttgaagcttttgctcaggagcaagcccactgtggatatagttaaccaggctggagaaactgccctagacatagcaaagagactaaaagctacccagtgtgaagatctgctttcccaggctaaatctggaaagttcaatccacacgtccacgtagaatatgagtggaatcttcgacaggaggagatagatgagagcgatgatgatctggatgacaaaccaagccctatcaagaaagagcgctcacccagacctcagagcttctgccactcctccagcatctccccccaggacaagctggcactgccaggattcagcactccaagggacaaacagcggctctcctatggagccttcaccaaccagatcttcgtttccacaagcacagactcgcccacatcaccaaccacggaggctccccctctgcctcctaggaacgccgggaaaggtccaactggcccaccttcaacactccctctaagcacccagacctctagtggcagctccaccctatccaagaagaggcctcctcccccaccacccggacacaagagaaccctatccgaccctcccagcccactacctcatgggcccccaaacaaaggcgcagttccttggggtaacgatgggggtccatcctcttcaagtaagactacaaacaagtttgagggactatcccagcagtcgagcaccagttctgcaaagactgcccttggcccaagagttcttcctaaactacctcagaaagtggcactaaggaaaacagatcatctctccctagacaaagccaccatcccgcccgaaatctttcagaaatcatcacagttggcagagttgccacaaaagccaccacctggagacctgcccccaaagcccacagaactggcccccaagccccaaattggagatttgccgcctaagccaggagaactgccccccaaaccacagctgggggacctgccacccaaaccccaactctcagacttacctcccaaaccacagatgaaggacctgccccccaaaccacagctgggagacctgctagcaaaatcccagactggagatgtctcacccaaggctcagcaaccctctgaggtcacactgaagtcacacccattggatctatccccaaatgtgcagtccagagacgccatccaaaagcaagcatctgaagactccaacgacctcacgcctactctgccagagacgcccgtaccactgcccagaaaaatcaatacggggaaaaataaagtgaggcgagtgaagaccatttatgactgccaggcagacaacgatgacgagctcacattcatcgagggagaagtgattatcgtcacaggggaagaggaccaggagtggtggattggccacatcgaaggacagcctgaaaggaagggggtctttccagtgtcctttgttcatatcctgtctgactagcaaaacgcagaaccttaagattgtccacatccttcatgcaagactgctgccttcatgtaaccctgggcacagtgtgtatatagctgctgttacagagtaagaaactcatggaagggccacctcaggagggggatataatgtgtgttgtaaatatcctgtggttttctgccttcaccagtatgagggtagcctcggacccggcgcgccttactggtttgccaaagccatccttggcatctagcacttacatctctctatgctgttctacaagcaaacaaacaaaaataggagtataggaactgctggctttgcaaatagaagtggtctccagcaaccgttgaaaggcatagaattgactctgttcctaacaatgcagtattctcaattgtgttactgaaaatgcaacattagcaaagaggtgggttctgttttccaggtgaaacttttagctccatgacagaccagcctgtagttatctgtgtacacagtttacagctacaaaaacctactttggtatttattacagaaaagtgctcagttaaatgtaagtgttattccttcagcaaaatattcactgacccaaaactctttatggcattttacaatgcacacagcctcatgcaagtttagacaagtggatttatactgtcttatgagtgcccgcccctgatatattacctcattatgcaaaaataacatatctttcatgactattttgacaaaagtttaaaacacatatgaagttcaaatttcaggaaccaaggactgccagaaaatattagcctctacattacgcatgcatttagaagcttacctgaaatctgccttttataaaggaatagtatggataagtggaattgtacattttttaaacttgattgccattaaagcagaaattataaggttgcaacaatatttgtttctaatcactggctttctcaagagtatggattgacatattgtgttatgaatgcacatctctcagatgtgttgaagcatccattgcatccattttttattattttcttagttttgttcttggacaaatttaaacttttaaaagattattcaagatgaatttaaaagtcaacccttcacacagtttccctactgtatgtagaatccaggtgctgaaaccaagtgtttcttttcccatgctctttgttaaaccccaattatagataatttttccagtcttaagctctgtccaccttcaagtcaattcataaccaagtttttgaacgctgctatgaattgcactgtgaaaagcactcttccctctcagttttcttttcatcccagccatgtttatcagatccttaagaacattgtatttcagtcttttacatcagtctgaattttggaaaagaatgcaatagttgtactccacagtcagtggaactgttccctgagtccgaggctcatgtgtcattctggcactacatttgcttaaattgctattttggcaacagcacagaaaactaatatttttaagcagagaatcttggcaatgagtgagagatgttaatttcacagaagcacaactcccaacccaacccttaggaaaagccctcttccatcgttacagtgctcagtgaatattaatttagttctgcttaagtggttgctatacaaactttgaatagccacctaataaataaaccttgcatgacaaacctgcaaaatattttatcagctgttattggaaagtgattttaagcaattgcttcctcagtgtcagggcacatgtgaatttccacaccaaacagagcatgaggaaccagttgacatgctgggttgtgactggcagctttagcagcctcggtactgaagccacaccagtgtccggatggaagtctgcatctgaggttgctcagtgtcccggtcattcatttacacattttaacttgcattaaagagctgttcttttctgtggcctagactcttttcactgatctcaaaataaactggtttttttcaaaaaaaaaaaaaaaacaaaaacaaaaaaaaaacacaaaagctgcatgtctaaaattacatggagttagtgtctattctttttccccttttgcagcaacttacacagcatttttaacaccttttttttctagtttttttgttcggttttgttttccatcaggaatttgagttctctctaacccagcttactgtgggacataggaaaactcagtagaaatacctttggtgatcttgttgagtttaagtctgatcttgatcttaaactcagtaagccactatctgcaattttgtacattatatagtattttgaagatatggaaccttatgaaaaaaaaatagcaaattagttctttttcccccagaggggaaagttatgttctgcaaatagtgtgtgtcttattttactgttgaacagcaattgctatttatttttttattgcctagaacttcaacatgttgtataggaatcctgtagtgccactagttaaatgccgaattctcatctggatgttaccatcaaacatcagtacacttgtcatttcacatgtgtttaatgtgacagtttttcagtactgtatgtgttaatttctactttttttaatatttaaaattgcttttaaataaacatattctcagttgatccc

SEQ ID NO: 4730 - DNA, 3046 bp, Homo Sapiens
  NM_018494
gccggcgggatcccaggcgccgagcgcccgctgagcagccaccctttgcgcgccgcctgcagcgcagcttccccgggcgctgcctggacaggcctgcctgcgtgctgggacatgtctggcctccaaggaccgtcggtgggcgatggctgcaacggtggaggggccagagctggaggcagctgctgccgcaggagatgcttcagaggattcggacgcagggtccagggcgctgcctttcctgggcggcaaccggctgagcttggacctgtaccccgggggctgccagcagctgctgcacctgtgtgtccagcagcctctgcagctgctgcaggtggaattcttgcgtctgagcactcacgaggaccctcagctgctggaggccaccctggcccagctgcctcagagcctgtcctgcctccgctccctggtcctcaaagggtcgatctgggacctcggaccctggctctgagggccacatccgcctccccccttcccaggagggcaacgccgggacacactgggtgcctgtctccggggtgccctgaccaacctgcccgctggtctgagtggcctggcccatctggcccacctggacctgagcttcaacagcctggagacactgccggcctgtgtcctgcagatgcgaggtctgggtgcgctcttgctgtctcacaactgcctctctgagctgcctgaggctctgggggccctccccgccctcaccttcctcacagtgacacacaaccgcctgcagacgctgcccccagcactgggggccctatccaccctgcagcgcctcgatctctctcagaatctgctggacacgctacctcctgagattggaggcctgggcagcctcctggagctcaacctggcctccaaccggctgcagagcctcccagcctctctggcgggacttcggtccttgcggctccttgtcctgcacagcaacctcctggcctctgtgccagctgacttggcccgccttccactcctcacccggctcgacctgagggacaaccagctccgggacctgccccctgagctgctagacgccccctttgtgcgcctgcaggggaaccccctgggtgaggcctcgccagacgccccgagttcaccagtggcagccctcattccagaaatgcccagactgttcctgacctcagatttggacagctttcctgtgacccctcaaggctgctcagtgaccctggcctgtggcgtccgcctgcagttcccagcgggagccaccgccacccccatcaccatccgctatcggctgctgctgccggagccaggcctcgtccccctgggtcctcatgacgccctgctcagccatgtgctggagctgcagccccatggggtggccttccagcaggatgtggggctgtggctgctcttcaccccaccgcaggcccggcgctgccgtgaagtggtggtcaggacccggaatgacaacagctggggtgacctggagacctacctggaggaagaggcaccccagcggctctgggctcactgccaggtgccccacttctcctggttccttgtggtttcccgccctgtgtccaatgcctgcctggtgccaccggaggggacactgctgtgctcctcgggtcatcctggggtcaaagtcatcttcccccctggggccactgaggagcctcgtcgagtctccatgcaggtggtgcgcatggctggccgagagctgcaggccctcctgggagaaccagaggctgcagtgagccccctgctgtgcctgtcacagagcggtccccccagcttcctccaaccggtcaccgtgcagctgcctctgccctctggcatcacaggcctcagtctggaccgctcccgcctgcacctgttgtactgggcccctcctgcagccacctgggatgacatcacagctcaggtggtcctggagctcacccacctgtactggctctggtacaccaccaagaactgtgtgggaggcctggctcggaaggcctgggagcggctgcggctgcaccgtgtgaacctcatcgctctgcagcggcgccgggaccctgagcaggtcctgctgcagtgcctgccccgaaacaaggtggacgccacccttcggcggctgctggagcggtaccggggccccgagccctctgacacggtggagatgttcgagggcgaagagttctttgcggccttcgagcgcggcatcgacgtggatgctgaccgccctgactgtgtggagggcagaatctgctttgtcttctactcgcacctgaagaatgtgaaggaggtatacgtgaccaccactctggaccgggaggctcaggctgtgcggggccaggtgtccttctaccgtggcgcggtgcctgtgcgggtgcccgaggaggctgaggctgcccggcagaggaagggcgcagacgccctgtggatggccactctgcccatcaagctgccgagacttcgagggtccgaggggccacggcggggggctggcctctccttggcacccttgaatctgggagatgccgagaccggctttctgacgcagagcaacctgctgagtgtggctgggcgtctgggtctggactggccagccgtggccctgcacctgggggtgtcctaccgggaggtgcagcgcatccggcacgagttccgggatgatctggatgagcagatccgtcacatgctcttctcctgggctgagcgccaggctgggcagccaggggctgtggggctcctggtgcaggccctggagcagagtgaccggcaggacgtggctgaagaggtgcgcgcagtcttggagctcggccgccgcaagtaccaggacagcatccgacgcatgggcttggcccccaaggaccccgctctgcctggctcctcggctccacagcccccagagcctgcccaggcctaggccccacagacttttaggctggcccagatattccccagtggatgggcagagcccccaccttcaagtctctccagtgtgtggggacgggtccctgtgagcaacaaaactgcactgtttctttcacctcaaaaaaaaaaaaaaaaa

SEQ ID NO: 4731 - DNA, 4559 bp, Homo Sapiens
  NM_018518
ggttggaattttggcgggttcagctgtgaacgaagaaggcgtcccggcatcggccaagattctacattgctcatctgggcatctgagcctccttcgaagtttcctgtcacaactgtcctcttgacagcatggatgaggaggaagacaatctgtctctgctgaccgcactgctggaagaaaatgagtcagccttggattgtaattcagaagaaaataacttcttgacgcgggaaaatggcgagcccgacgcatttgatgagctctttgatgccgacggcgacggtgaatcttatacagaagaggctgatgatggagaaacaggagagacaagagacgaaaaggaaaatctggccactctctttggagatatggaggacttaacagatgaagaagaagttcccgcatcacagtcaactgaaaatagggtcctccctgctcctgcccccaggcgagagaaaacgaatgaagagttgcaagaggaattaaggaatttgcaagagcaaatgaaggccttacaagagcagctaaaagtaacaacaattaaacagacagcaagcccagcccgtctgcaaaaatcccctgagaagtctccccggccacctcttaaggagaggagagttcagagaattcaggagtcaacatgcttttctgcggagcttgatgtccctgcgctaccaagaaccaagagggtggctcgaacaccaaaggcttcacctccagatcccaaaagctcatcttcaaggatgacaagtgcaccctcccaacccctacagacgatttctcggaacaaacctagtgggataactagaggtcaaattgtggggaccccaggaagttctggggaaacgactcaacccatctgtgtggaagccttctctggtctgcggctcaggcggcctcgagtatcctccacagaaatgaacaagaaaatgaccggccgaaaactgatcagactgtctcagatcaaggaaaagatggccagagagaagctggaagaaatagattgggtgacatttggggttatattgaagaaggttacgccacagagtgtgaatagtggaaaaaccttcagcatatggaaactgaatgatcttcgtgacctgacacaatgtgtgtccttgttcttatttggagaagttcacaaagcgctctggaagacggagcaggggactgtcgtagggatcctcaatgccaaccccatgaagcccaaggatggttcagaggaggtgtgtttatctatcgatcatcctcagaaggtcttaattatgggtgaagctcttgacctgggaacctgtaaagccaagaagaagaatggagagccgtgcacgcagactgtgaatttgcgtgactgtgagtactgtcagtaccatgtccaggctcagtacaagaagctcagcgcaaagcgtgcggatctgcagtccaccttctctggaggacgaattccaaagaagtttgcccgcagaggcaccagcctcaaagaacggctgtgccaagatggcttttactacggaggggtttcttctgcctcgtatgcagcttcaattgcagcagctgtggctcctaagaagaagattcaaaccactctgagtaatctggttgttaagggcacaaacttgatcatccaggaaacacggcaaaaactcggaataccccagaagagcctgtcttgctctgaggagttcaaggaactgatggacctgccgacgtgtggagccaggaacttaaaacaacatttagccaaagccacagcttcagggattatggggagcccaaaaccagccatcaagtccatctcggcctcagcactcttgaagcaacagaagcagcggatgttggagatgaggagaaggaaatcagaagaaatacagaagcgatttctgcagagctcaagtgaagttgagagcccagctgtgccatcttcatcaagacagccccctgctcagcctccacggacaggatccgagttccccaggctggagggagccccggccacaatgacgcccaagctggggcgaggtgtcttggaaggagatgatgttctcttttatgatgagtcaccaccaccaagaccaaaactgagtgctttagcagaagccaaaaagttagctgctatcaccaaattaagggcaaaaggccaggttcttacaaaaacaaacccaaacagcattaagaagaaacaaaaggaccctcaggacatcctggaggtgaaggaacgtgtagaaaaaaacaccatgttttcttctcaagctgaggatgaattggagcctgccaggaaaaaaaggagagaacaacttgcctatctggaatctgaggaatttcagaaaatcctaaaagcaaaatcaaaacacacaggcatcctgaaagaggccgaggctgagatgcaggagcgctactttgagccactggtgaaaaaagaacaaatggaagaaaagatgagaaacatcagagaagtgaagtgccgtgtcgtgacatgcaagacgtgcgcctatacccacttcaagctgctggagacctgcgtcagtgagcagcatgaataccactggcatgatggtgtgaagaggtttttcaaatgtccctgtggaaacagaagcatctccttggacagactcccgaacaagcactgcagtaactgtggcctctacaaatgggaacgggacggaatgctaaaggaaaagactggtccaaagataggaggagaaactctgttaccaagaggagaagaacatgctaaatttctgaacagccttaaataacccgaacttcagacattttcccacagacttcctggcctcctgtgactctggaaagcaaaggattggctgtgtattgtccattgattcctgattgacgccgtcaaaaacaaatgcttgttaagcccataagctttgcctgcttactttctgccattgggttggtttgataccacatttaacattgacatttaagtggaaaaccaagttatcattgtcttttctaagctcagtgtggatgattgcattacttcattcactgaagtttttgcccaaaaattggaaggtaaacagagagctatgtttctgtatcttttggttatagagtgttcacttctttatcataacaaaattctagtgtttatacgaacacccagaggcaaaagaatttggcttaattctcactccaggtaagtagcttaacttctgggcttcagttttctcatctgtaaaatcaggaagattggactaagtgatcctgaaatgtattttttagcactggatttctacaaataataaaactttcccatctagataatgatgatcacatagtcttgatgtacggacattaaaagccagatttcttcattcaattctgttatctctgttttactctttgaaattgatcaagccactgaatcactttgcatttcagtttatatatatagagagaaagaaggtgtctgctcttacattattgtggagccctgtgatagaaatatgtaaaatctcatattattttttttttaatttttttattttttatgacagggtctcactatgtcaccctggctggagtgcagtagtgcgatcgcggcacactgcagccttggcttccctgggctcaagcagtcctcccacctcagtctcccaaatagctaggactacaggcgtgcgtgaccaagcccagctaatttttgcattttttgtagagatggggttttgccatgttgctcaggctggtctcaaactcctgagcactagcaatccacccacctctgtttccaaaaaaaaaaaaaaaatgaaaggtcaacccctatgcaaattaccacagcaaaggtttcattcaggagattcttccatctgggcaacctggttttccaaatatcatttgacctaagtgaatgttgatactagctaaagattgggtaaattggttgaattattgtattgaagcttgagctgtagctaaaagtaatttaggtttcccctaagatgttattatgttagggacataacacttttgggaggttgttgtgggagatggttgatttaggttttcaaaagctagaaataaaatttacatgccttagatttcataaaattctgctctaattgggtggaaggtgctgtatctaacttgtgttcctcctaaggttatgtcctaataactattcttttaggagtatacttctactttatagaaggttgcttttctttttaattttttctaacaaagaaaagaataaagtatttattaataagaaccagaaagcacttgaaactgatgtttttaatggctcatttagggtagatttatttatctcattaacttaaaacagctatgtgtatgaaataggtcacaacagaacttgaacaccaggttggtgtctgagcaatccctttcttatgggaaaaacaatgttcttgtttgaacagagggtatcattgcagtcagtattcacgtgtatattgttatataagttgtataatatgcttgtaaaggctgagggtgagctgtatctggatgcctttttacaatttgattttaacttttaaaataaatttaaaacataaaaaaaaaaaaaa

SEQ ID NO: 4732 - DNA, 1646 bp, Homo Sapiens
  NM_018530
gtggaatgtcatcagttaaggctattttcatttcttttgtggatcttcagttgcttcaggccatctggatgtatacatgcaggtcacagggaatatgatggcttagcttgggttcagaggcctgacacctcaggctgccaaatgtggaagatttaaatacttgaaccaataccctcctcccaaaaactgaaattggcttctgtttctgagttggtccaggcgcaatgttcagcgtatttgaggaaatcacaagaattgtagttaaggagatggatgctggaggggatatgattgccgttagaagccttgttgatgctgatagattccgctgcttccatctggtgggggagaagagaactttctttggatgccggcactacacaacaggcctcaccctgatggacattctggacacagatggggacaagtggttagatgaactggattctgggctccaaggtcaaaaggctgagtttcaaattctggataatgtagactcaacgggagagttgatagtgagattacccaaagaaataacaatttcaggcagtttccagggcttccaccatcagaaaatcaagatatcggagaaccggatatcccagcagtatctggctacccttgaaaacaggaagctgaagagggaactacccttttcattccgatcaattaatacgagagaaaacctgtatctggtgacagaaactctggagacggtaaaggaggaaaccctgaaaagcgaccggcaatataaattttggagccagatctctcagggccatctcagctataaacacaagggccaaagggaagtgaccatccccccaaatcgggtcctgagctatcgagtaaagcagcttgtcttccccaacaaggagacgatgagaaagtctttgggttcggaggattccagaaacatgaaggagaagttggaggacatggagagtgtcctcaaggacctgacagaggagaagagaaaagatgtgctaaactccctcgctaagtgcctcggcaaggaggatattcggcaggatctagagcaaagagtatctgaggtcctgatttccggggagctacacatggaggacccagacaagcctctcctaagcagcctttttaatgctgctggggtcttggtagaagcgcgtgcaaaagccattctggacttcctggatgccctgctagagctgtctgaagagcagcagtttgtggctgaggccctggagaaggggacccttcctctgttgaaggaccaggtgaaatctgtcatggagcagaactgggatgagctggccagcagtcctcctgacatggactatgaccctgaggcacgaattctctgtgcgctgtatgttgttgtctctatcctgctggagctggctgaggggcctacctctgtctcttcctaactacaaaagccctttctccccacaagcctctgggttttccctttaccagtctgtcctcactgccatcgccactaccatcctgtcaccagtgggacctctttaaaacaagcagccaaccattctttgatgtatcccattcgctccatgttaacatccaaaaccagcctggatttcatacatggacttctgattaaaagtggcaggttgtgcatgttaaaaaaaaaaaaaaaaaaaaaa

SEQ ID NO: 4733 - DNA, 3797 bp, Homo Sapiens
  NM_018553
agtggtgcggccggcaggcagcgatggcggccgtacggggcctgcgggtgtcggtgaaggcggaggccccggcggggccggccctggggctcccgtcccctgaggcggagtccggtgttgaccgtggcgagccggagcccatggaggtggaggagggcgagctggaaatcgtgcctgtgcggcgctcgctcaaggaactgatcccggacacgagcagaagatatgaaaacaaggctggcagcttcatcactggaattgatgtcacctccaaggaagcaattgaaaagaaagagcagcgagccaagcgcttccattttcgatcggaagtaaatcttgcccaaagaaatgtagccttggaccgagacatgatgaagaaagcaatccccaaggtgagactggagacaatctatatttgcggagtagatgagatgagcacccaagatgtcttttcctattttaaagaatatcctccagctcacatcgaatggttggatgatacctcctgtaatgtagtttggctggatgaaatgacagccacacgagcacttatcaatatgagctccctgcctgcacaggataagatcagaagcagggatgccagtgaggacaagtcagctgagaaaaggaaaaaagacaagcaggaagacagttcagatgatgatgaagctgaagaaggagaggttgaagatgagaactcaagtgatgtagagttggatacgttgtctcaggtagaagaggagtctttgttaagaaacgatcttcgtccagctaacaaacttgctaaaggaaataggttattcatgagatttgctacaaaagccccaggtctaggatccatccaggactgagtgtatgacaaaaaggaacttggagcagccagaagaagtcagtattacatgaaatatgggaatccaaattatggaggcatgaaaggaattcttagcaattcatggaagcgaagatatcattcccgtcgtattcagcgggacgtgatcaagaagagagccctgattggggatgacgttggcttgacgtcgtataaacatcgacattctgggctagtgaatgttcccgaggaacccattgaagaggaggaagaggaggaggaggaggaagaggaagaggaagaagaagaccaggacatggatgcagatgacagagtggtggtagagtaccacgaggagctcccggctctcaagcagccccgggagcggagcgcgtctagacgatccagtgccagcagctcagactcagatgaaatggactatgatctagaactgaaaatgatttccacgccttcaccaaagaaaagcatgaaaatgactatgtatgctgacgaagtggaatctcagttgaaaaatattaggaactccatgagggcagatagtgtatcttcaagcaatatcaaaaaccgaattggtaacaaattaccacctgagaaatttgcagatgtccgacatctattagatgagaaacgtcagcactcccgtccacggccaccagtcagcagtactaaatcagatatacgccagcggttaggaaaaagaccacattctccggaaaaggcttttagtagtaaccccgtcgttcggagagagccctcttctgatgtgcatagtaggctaggtgttcccaggcaggatagtaaaggcctctacgccgatactcgggagaagaaatcaggtaatttatggactcgcctaggatctgcacccaagaccaaagaaaagaatacgaagaaagtggatcacagggcgcctggcgctgaggaagacgactctgagctgcaaagggcatggggggctctgattaaggagaaagagcagtctcgccaaaagaagagccggttagataacttaccatctctccagattgaagttagtcgggaaagcagctctggttcagaggcagagtcctgatgcccctggggcctatggcagctgccctaaagcctgacattcttgcacagggtggggcgcgcagtaggaacctcccccgcaggagctggcgccctctcgctcctgctcacacagtcaccctccgctcttgctacttcggcaagacatcttaagaatgtgacacattttcaagggcatctctatctttcgctgcagagttgtagttctgggccctcgattcctttcccaccaccccacaggctttaccctttgagaaaaaggcagccctccagattttgtagacatttttcttaatatttttaacattgtgtcttttaaaagaaatgttttacacagttcatccaaagagcagagaactgaacttctcactattgccttggccctgacagctgttaccagcacccttttcccaagaaaagtcaattcccaggtgcttattggacatccttcgagggggaagaggagggaagcggccagctcacccttccgggaccctagtgtggggcgaatctcacggacctgacctcagaggtgcaccagtgccgcccaggtagataagagctgcagcattgactgtgcttccgttcttccctcggggattgctcatggcatgggcctcttacgtgctgtcagcttgatgtgaagatcaagttcagtgctgtgggatttttaggaacaaaaaactgtgacgtctggatttggggttgatttttgtgctggggtgggattatgggtcaatgttgaagaatttttaagtctgtattatgtttaaaacatgaatgatttgaaagtttaaatttttaatttttatatgtggaaattcttcctgttggctaaaggggaagctcaagtggtgtcgtcttttgtgctgttaaatatatattctattctttggaagaaggcagagagaggagtcttattatttttaaatgctcctagttgtatagtctgtctgttgtacatagagttcagcttgttttttggctccagtaggaaaaaaaatccatccatctgagatggggtcctgttgtttattatcactctagaagttatacattgatatttattctttctgtccccacgttgtggcacctgaagacatcttcaaaattggcagaaaagataatagttataaaaattttagttcatttatttttaaactcctttcagattattttaccattaggaggaggtagattgtttcgtcttcctgtctgatttttgttttgtagtatttaattttgtattcctctgcagttttaagaaacagtgtttttcttcggtttgctggaacatgggcgttagagatggtaataaaccgtggtcctttttgcgatgtcacgactcttcacctgcctgggctgttgtgcacacagtgcagcctggatcctgtcgatctttacttgtggcggagctaatggtcacattgatagttgattacactgtggcacgaattaatgcagaacactgttattaataaaggaagtaaagggctgcaagatttgagagctgcaacaaaaactgtattgtcccatattttgttgattaaccttgctttttctccctccctttagagagattagaggatataaccatgatatatttcagcttcttattaggattctaggaaagagatggttctggtttctctgccagttgagacttaagacatctgagatttctcagcttttctttccctgtgaagcatacagctgagagccaggttcttaggaagggtcagggtttggggagttggtagagtgaggagtgcgggggcctgagaatcggacacctggatgccaacccctggctctgctccatggacctgggcctcagttttcccgtctagcagttgagtgggctgttaccagaattcct

SEQ ID NO: 4734 - DNA, 5163 bp, Homo Sapiens
  NM_018555
atttgcgccgtgtagagttgcatgctgggaaacactgacgggcgcccttccagctgcgtcgaagcttctctggtttcgcattacatttcccagagggccttggggcacagtccaatgaggagcgagccgggtggccggctgaggggcgtgcttcatgctcgcgggatttttaaaaatggtttctcctggatcttatcccaactgcgcctgagaccttgtttcacctcctgatgtgctgggtgtggttaggcctcgagccgggagctatttgcctcccaggaggaagccagggcagggttccgcggggaatggcggtgagggagccactcgggacgcggaggccctaaaatgaagaagcttcggcctgaggcttcgggagcggcgagcagggaagtgggagtgtgtgtgagtgtgtgtgtgtgtgtgtgtgtgtgtgtgtgaataagccagaggctgcctggtggggccccgccgtggcccagtgactgagataattgtcttcgtctgtggggtaatgcgaacaagccccgttcccctaagccgtgatgcatgcggggttgacgcggccgggctctgtccccataaactgtgacacaggtgtgtgtagacgtctatgagggccatagcgccgggctgtaagggcatctgtaggggtgacgcagccgggctgtgtctctgcacctccgttctgtgcgaggtcaatgctggtggggtctgcagaggtggcacggccaggacgggtctccgtgtctctgaaatgtgcctttgcacttctgtcaggttgacagggacaggcagtgtccctctggtgtgagcgtctgtgggtgtgaaagggccagcgagtgtgcggctgtgactggtcgggatcgggcctgggtgcatggccttttgagtgagcacaggtgtgtgcgaccatgtcacctgtctttctagtgtctccgttgcttcctgtgccttggccttccagccatgtggtacctgctagggagcagtggtcccaaagtgacgtgagaggctctacgctattgtgaaaatgaccaagaagaaggcttcacaagtcacgagatggcagttttggagccagaagtgctctccgtgcacactacctggacgacaagaggaagtaacctcaagaatagaattccttttggggaagaaagagctggccttcaggaaaagcatcccggaggaggaagaagaagtgttatatgtcctaaagtaaggtttcaggccagcatccttcagaaaaagcatccccgaggaggaagacgaatcgttaaacatctgaaagggtcaggccagcatccttcagaaaaagcatccccgaggaggaagacgaatcgttaaacatcttaggtcagctctagcctctcggaatttgtcttcttcagtggaaaccccgagaagactgatcagttcttcagttctaaaacaatggcccagggtttggtgacgttcgccgacgtagccatagacttttctcaggaggagtgggcctgtctgaactctgctcagagggacctgtactgggacgtgatgctggagaactacagtaacttggtctcactggatttggagtcagcatatgaaaataagagtttacctacagaaaaaaacattcatgaaataagggcttccaaaaggaattcagatagaagaagtaaatcccttggccgtaactggatatgtgaaggtacgcttgaaagaccacagcgctccagagggaggtatgtcaatcagatgatcatcaattatgtcaaaagacctgctactagagaaggcacccctcctagaacacatcagagacatcataaggagaattcctttgaatgtaaggactgtgggaaggcctttagtcgtggctatcaacttagtcaacatcagaaaatccatactggtgagaaaccttatgaatgtaaagaatgtaagaaggccttccgttggggcaatcagcttactcaacatcaaaaaattcatactggggagaagccctacgaatgtaaagactgtgggaaggcttttcgatggggctcaagcctcgttattcataagaggattcatactggtgaaaaaccctatgaatgtaaagactgtggaaaggcctttcggcgtggtgatgagctcactcagcaccagagattccacactggggagaaagactacgaatgcaaagactgtgggaagacctttagccgtgtgtataaacttattcagcacaagagaattcatagtggggagaagccttacgagtgtaaagactgtgggaaggcttttatttgtggttcaagcctcattcagcataaaagaattcacacaggtgagaaaccctatgaatgtcaagaatgtgggaaggcctttactcgagtcaattaccttactcagcatcagaagatccacaccggtgagaagcctcacgaatgtaaggagtgtgggaaggcctttcgctggggttcgagcctcgttaagcacgagaggatacatacgggcgagaagccgtacaagtgcacagaatgtgggaaggccttcaattgtggctatcacctcactcagcacgagagaatccacacaggcgaaaccccgtataaatgtaaggagtgtgggaaggctttcatttatggatcgagcctcgtgaaacatgagagaattcataccggggtgaaaccctatgggtgtacagaatgtgggaagagctttagtcacggccatcagcttacacaacatcagaaaacgcacagtggggcgaaatcctacgaatgtaaggagtgcgggaaggcatgtaaccacctaaaccatctccgagaacatcagaggatccacaacagttgaagagccttttgaacgcagtagcccgctcgtatctatggtttcgctttccacagtttgttacctgcagtcaactgcagttcaaaaatattaaatggaaaattccagaaataaagaattttaagtctcaaatggtgtgcccttctgagtagcgtgatgaaatctctcgctgtccggctccagccggccggggatgtgagtcatcccttggtccagcacatccacgctgtatacgccacccaccctgctagtgacttagtagccgtcttggtgatcagatcaactatcccagcatcacagtgcctgtgcccaagcagtcctcactttgcttaacagtggccccagagagcaggagtagtgatgctggtgattcggatatgccaaagagaagccacaaagtgcttccttttaaatgaaaaggtgaaagttctcaacttaaaaaagaaaagaaaaaaatcatatactgaggttgctaagatctacatgacaataagatattttgggagagagatacgttcacataattttattacatatattgttacaattgttctattttgttagttactgttggtaatctcttactgtgcctaatttataaattaaactttagatatgtatgtacaggaaaaaatgtagtatatagtatcgtatatatgtacaggaaaaaaacgtactatctgtggtttcaggtgtccactgcgggtcttcaaacgtacccccctcaggtgagaggggactgctgtacaaagaatataggaaggcctctagactacatccattccttcctcaacaggaggaaaattcctggtacagtttaacgtaaggcttcactgatcactgttgtttttgtttttgtttttgtttttttgagacagagtctcactcttgcccaggctggagtgcagtggcacggtcttggctcactgcaacctccacctcccaggttccagcaattctcctgcctcagcctccccagtagctgggattacagacatgcaccaccacacctggctaatttttgtatttttagtagagacagttttcaccatgttgtccaggctggtctcaactcctgacctcaggtgatccacccaccttgccctcccaaagtgctaggattacaggcgtgagccactgcacctagcccactgatcactcttctgcttacagaatatcagaagtcattctagaggcaaatttgaagagtggaaaaatcactttttctgaatgatcttgtttttggtgtagatgtttttattgtgtgggttagtttaatgaatacataaagactaccagtaccattctgtctttactccgtggcatctgtggaataaccctgctaatgtaacacgtgagaaagcctttggtcatgccacccactctaccagttgtccccaccatcccccgccctcctccctgtgagacactgggccaaaggctcactacccctgtgcgttgtccagcacacagacactatgtgcattatttgtacataaggataatcacatctacctgagactgctatcatggaaattaaatgtttggtacatgtaaagtctttgaaagtgtaactggaatattgtgtaattttaataaataataactattgttgtttttatgatcattactaccatttgtgttgccattagtgaatttttacaagaaaactccctgtgggtgcaatgagtctggaaaagaccattgagtcttctagaagaaaacattaagagattattggcacagccgtgggttacgcaatgatttcttagtacacaaaacacagcaaacataaaaagttgttacacttcatcaaaagtacaaagttctgttcatcaaatgatgctgttaagatagggaaaagacaagaaacaggactggaagaagatgtttgctctaaggtacacctgacaaaggaactctcatagaaaatataaagaatccctcaagttgaaaaaaaaatcaatttaaaggggagaaaacttcagcacgtctcaacagaagaccaccaaatggccaataagtaagtgaaaatgtattcaatgtcattgctcctcaaggaactgtagagtaaaaccacaatgtgctgtcactctagacagtcaccaggatgattaaatttaaatcacaataacaaggctgatttcagatgtctcaccacaaagaaggaggataagggagcgaggtgatggatatgttaattagcttgatttaatccttccacattgtatacatgtatcagaacatcacattgtactccatcaatataatacaattattatttgtcaatcaaatattaataaaatcaaagatgagcaggaaaaaaaaaaaaaaaaaaaa

SEQ ID NO: 4735 - DNA, 1720 bp, Homo Sapiens
  NM_018556
agagcagggcctgacatctccccagaacagacgtttgaacagagcaggcttctgaggtctccaaaatgcctgtcccagcctcctggccccatcctcctggtcctttcctgcttctgactctactgctgggacttacagaagtggcaggtgaggaggagctacagatgattcagcctgagaagctcctgttggtcacagttggaaagacagccactctgcactgcactgtgacctccctgcttcccgtgggacccgtcctgtggttcagaggagttggaccaggccgggaattaatctacaatcaaaaagaaggccacttccccagggtaacaacagtttcagacctcacaaagagaaacaacatggacttttccatccgcatcagtagcatcaccccagcagatgtcggcacatactactgtgtgaagtttcgaaaagggagccctgagaacgtggagtttaagtctggaccaggcactgagatggctttgggtgccaaaccctctgcccccgtggtattgggccctgcggcgaggaccacacctgagcatacagtgagtttcacctgtgagtcccatggcttctctcccagagacatcaccctgaaatggttcaaaaatgggaatgagctctcagacttccagaccaacgtggaccccacaggacagagtgtggcctacagcatccgcagcacagccagggtggtactggacccctgggacgttcgctctcaggtcatctgcgaggtggcccatgtcaccttgcagggggaccctcttcgtgggactgccaacttgtctgaggccatccgagttccacccaccttggaggttactcaacagcccatgagggtggggaaccaggtaaacgtcacctgccaggtgaggaagttctacccccagagcctacagctgacctggtcggagaatggaaacgtgtgccagagagaaacagcctcgacccttacagagaacaaggatggtacctacaactggacaagctggttcctggtgaacatatctgaccaaagggatgatgtggtcctcacctgccaggtgaagcatgatgggcagctggcggtcagcaaacgccttgccctagaggtcacagtccaccagaaggaccagagctcagatgctacccctggcccggcatcatcccttactgcgctgctcctcatagctgtcctcctgggccccatctacgtcccctggaagcagaagacctgactctccttccttcctcccctgccacgtgggaccctcatctctgctgcctccttcctttcctgagaggctcagcttgagagaatgagccagtgagaagcttctctagacttggctccaaacatctcccctcccaagacatctgcctgcccacaggctcctgttgctccttcacacagacctggatgccccagagcaaggtcttcattcatggtcctgagcaggtgccatgggattgggctctgggcactgacttaacggcacctccctagaaggcgagaaacatgccaaatctaaacacaccaggactcccatccatcgccttgagactgaccgtaaaccacagacgctctccaggttctcaagagttatcctgccttccagattcctgcctatcccaactccccagccttgttgaggttctctattgcctcttgaatacaaatgcactcccaaagtggttttaagaaaataaaaagattatccttccaaaa

SEQ ID NO: 4736 - DNA, 6265 bp, Homo Sapiens
  NM_018566
ccgcaccgaagcgtcgcgataactgcaaccacccgcaacttctcgcgatgtttggccccgctaaaggtcgccattttggagtccacccggcgcctggtttccccggcggcgtctcccaacaggctgccgggaccaaagctggccccgcgggtgcctggcctgtgggcagccggaccgacacgatgtggcggctccgctgcaaggccaaggacggcacccatgttttgcaggggctgtccagccggacccgggtgcgggaactccagggccaaattgccgccatcaccgggatcgcccccggcggtcagcgaatcctcgtcggataccctcccgagtgcctggatctcagcaatggggataccattctggaagacttgcccatccaatctggtgacatgctgatcattgaagaagaccaaaccaggcccagaagttcacctgcatttactaaacgtggtgcttctagttacgtcagggaaactttgcctgtgcttaccagaaccgtggtcccagcagacaactcttgcctctttactagtgtgtactatgtcgtcgaaggaggagtcttgaatccagcttgtgcccctgagatgagacgcctcatagcacaaattgtagcaagcgatccagacttctatagtgaggcaatactgggaaaaacaaatcaagagtactgtgactggatcaaaagggatgacacttggggaggagcaatagagatatcgattttgtccaagttttaccaatgtgaaatatgtgtagtggatacacagacagtaagaattgatcgttttggggaagatgcaggatataccaaaagggttctgcttatttatgatggcatccactatgatccacttcagcgtaacttccctgatccagatacacctcctctgaccattttctcctctaatgatgatattgttcttgtacaagcactggaattagcagatgaagctagaagaaggagacagtttactgatgtcaaccgcttcaccctgagatgcatggtatgtcagaaaggattaactggacaagcagaagcaagggaacatgccaaggagacaggccataccaactttggagaagtgtgacctatgcatgaatgagggttgaagcctactacctcacacatccagaaggctctgggttttccaataagctatggtaaccctaaagaacaaaggatacaatgcttgaaccatccttttaacttaaaaccactaagacactgaaattccttgttaagattaaaattagtgtgcaagtttacagatgtgtgtctacagtggtaaactgtacatacatgcctctttctgctggagtgacagaataggtgatccttgccacctactgacactgacctgaaggttgagattgagtattataaactagcacccagcagctttaacttgtagaagaaagcatcacattttgggtaatgtggaaggcctcctgtgagtccactgggcatacgattgagattgagtattataaactagcacccagcagctttaacttgtagaagaaagcatcacattttgggtaatgtggaaggcctcctgtgagtccactggacatttaccacagtgtctccagtaactgagtctttttaaaaactctgaatgagttaagtttctaaattatgaattgattcatcaaatgaagatactcagaattgtccaaactgattttatattgcaatttggtagacattataaatgtgtgcttaaccactgataagtacatcacaagcaatttttacagggatgagtctcatccttgagaatgttatcacaaaacaggaactgattgtgccctgtttaagatctctagcatataaaacgtagaatgtatgagggaataggtgcctgagcagcttcctgaagctttaaaagaccgttggcctcgtgttttaatgcaattcatgtattggtctttgtcacattggataacattttaaagttaagcagggtacttttttaattgaaattccttgaaattcgagtcctcagttttttcttcatttgcgtaaagtttatcggggggaatttaattttctcagctttttgttaagagcacttcctccaaaaaatttttttcaagtaataatgctctgctttgggttggtttttgtaagattttttgcacacctaaagagtgtttgcttttgtgctagccttatccctccactaaagttattttaaataatttcacatttctgcaaattagcactttgcttatctgcaatcttttactttgatttttgaagttttaaagcaattggagtaatactgttgaatgaactagtttcacttccaaaatagaaaaaattgtaaatccttgccttatgcagctttctcagaattctgcttcttcctagtactagatgtgtagccatttgcttagtggactaatccgcaaggcacaccctctaaaacttagcttcactacaagatcttccagataaaagttttctacctcttttcttaattattctgatcagggatgctaaattataatttgttatgtattatctcacataatgtgaagaggcttaatgtgaagttttgttattttggtctcttttttattaagtatctcacttagaaattcagtggtatactttaaagcacttggatctttttcagcatatctgcctagcaaatgttttaaaattgacatttatttttagcactttcacttggtgaaggtggccatataaaattaaggaacatttgaacaatataagagaaaagaacttttaaggaacaattcacaaagtttgtttgaaattgtcagatgacatttcttgagtaccttttgtgtgcatagttattttagacaatataagctgttatggtcagcataacttaaaagtgtttagttttctattttactgagccttaaaaatagcactgatgagcttatgatacttaatgtttggcaatcataatgtgttcaaattaatgggattgaaaatctctccacacctgactctcatctgatctggatggttttggttttgtatcttttttacttctcccagaaaatactaaatttaaaactgtaaattaagaatataccactagataacaattatcaaattgagctttatgcatcattactcagaaagcttgccttcctttctttgctacttcaggacacagagttgacatttgcttactacagctttagatctagaagtttattcgtgcaacaaatatttattgagtaatttatactgtgccaggcatgttttgatatgtttctgtcatatgttttgatatgttccaacataagtttctgtcactttatattcagtatatattttctacagtgggtaaatttaacaaatggaaaggaatagaacactgatattttacagaattaaaccccttcattgtaagggctttgtttacatattaagtgtcaagtatttattcaggggatcttatttcattgtattttatctgttatctaggttgtccatttaccggttggacactgatactctgtcaaattcctttcaaaaatgactctttagtctgctgaaatttagcactagtactttagtgttctgatcctggaaaattcaaggtgaagctttatttgtggaccatctgatttaattattgaggattaaaaacctaaacctttgctcattctaaactcaagcttttaagcctcacagaatttacaggggtttgctttttgtttgtttgttttttcattttttactgtgcttattaaactcttggaattagttattaaagggagtaaattctcatcttgggaattttgaaaatctatggacttacaactttcaggaggattaaatgtcttaagttttgtactagagcagaatgaaatctttcctattcattgagtttttgcctgccatagaggaatttttttaaaaattaaaatgacagtttatattagtggcaaagtgaataaagacctcactttcccaccccacccttcttcctttctcttacttttctttggattaaaggtcaggtgtagtactatgaagattcactcctgaataaagtgatttcagaagctaaaatttaacatacctggaaattttgtgatgtgttagccaagtgaagacattagtgtgttccatcttttgctaatggttcatggttgatttcttcattgtttcccatgaaattagcatagtcaagtggtacccttgacgcttgactgctggtcagtttgaccctgtttttaacaactaatgtagtcatgccgcttgattattccatgaagtcccagcaaaataataatgaggaattaactaacattatgttatctatctaatttgtctgtgtccctaaatgcccatgcctaacttgcttctctagtttattccttctgtggagggattaaaacgtgggtgttgcaagttgccctaagctaaacatagttttcttacatctttttgggaaaaaaaatggaatgggaagtatgcaagattaagcaagagtgatttttttttttttttgacaaatcaggtggccttcctaaacatactaagaattatgttctttcatgtgtggagacacatttgtttgcagcactttaaaaaatatatatggaataaaagtttacatgttggccctctagggatctaattaaggacattaaagtacaattcttgagctactaaccatcagctcttcttaatcaaagattgccatcagtgtagagtgtatctattggcacaacattctggtgttttgataacagtagaactcaatttcagtaactattaggagcatggtctgtgccctagcattaaaaatgttacttattattatgtgaatatcttgtattattatacaatgcagtattcaaatttgtccttgtagtgcagagatgactgataatttctaaaagattcgatccttaaaacttgtttccaagcagacttataaggaagctgatttttgagtcagaggccttaaacgtgtcatatacaagtggcatcattttaagtccaaagtgaaacacttgatttgaataagctagtttataaactaaagctgttttcttatgttacagtatttcagcacatttcattccacataaaaagaatattaagtgtccctggttgtgggagagtgtttatttttctcaaaattatctagcattttgcttacagtgctttgaatgtttgacttaaaattattattgatgttgaattgtagggtgctgatttaggtcttgattcatacacatttaaaggaggttggtaaccccctcatggtagagtgaagggagaaaagggccaagaagacaaagtaccactgataaagaagagattgtcaaatagatgcattcctagtcatgaattacccttttccaaacatttttaaagcaatgcctttgtgtcaactcaacccttcttccccatttcttgtcatagaatgtagcatggccataggtgaaaaagcttatcattaaagtatgaaaccatgaattataagcattttgccatgatgcccttttatacatatgtttttaaaagtactaaccaacatataggagtttaggaatggtgaagatataatttgattaagttgtaggtaaacagaaaggatcatcttaggctcagaatttctaatatgattacatgagtctactttataaactggtataggctatgtaattagcccgtaagttacttaaaggaccaggggacctaatttttgtcagttttccagtcacattggtgccattcaggactccagctgtttacaggaaatatgtacttagcagaatagtatttttccttgaaaaaaatttgaattcagcctaaatacagaatgaatatgaatagtttgtgaaaagggttagagaacaacaatattcctatagtttctgtattaatgcagtagagacagaggttcctaacgcaaaaagaaaaccacaagtaaagaccgtcaaattagagctttagaatatgacttgaaaaagtagggatgggcaaaacagcataagaaaatattttttcttaatgcagatggacagtgttttcttgttttaaaaatgttttgcctatttgccagcattttttgaagtaatacactgctgctacctggaagatgtctaacttcattttctacaactcttatgtgattttgccattgtcattaagatgcattgattttatttatgaggtgtatgactttaaatatctaaatgctgtattaagtgacttgtttcaaaggaataaatgaagtgaaaacgt

SEQ ID NO: 4737 - DNA, 2371 bp, Homo Sapiens
  NM_018584
gcctcgcctcggcgccgcggccggcatttctcctcgcagctcgctgcctcctctatccctgcctccctctcccccctctgtttttctcccttccttccctctccgaccctcttcctctccctcccgatcctttccctcctcctctcatctttcccctgtctctccgttctagctcgtcccccaccccaccttttcttctttctcctcctctccttcctctccccctctcctctgtctccttccaccgtctcccctgcctccctgtctttcagtccctgtttttcagccccgtctccctctcggtttctctcccccaccctccctccgggtttcctccccggtgccctccctcctctctccctcccctccccctccgcccctcgcagccccgccgctcgcagctcccagtctgcctccccgaaccggcgccgccgcccgcactcgccgcaggaccggcccgcccggctcccggggtgcgccctcctcggtcccgcgccctccgggctcgcagggacgtctcctccctcccggctcgcggccccgcccggcccggcccccgcccagagccccagcgcgccgaggatgtgagtcctgctcgcctctggcggagcagcagccactcgcgcgcggagccggagcgcagcgcagcgcagccgcgggcgctctccgggccgctcgcgcgagtgccgcgctcttgccctagcggcgtcccccggcctctcgccggcgccaccgccgcagcagcccgcgggccgtccccggccggccgcccccggccccagcgccgctgaccctgtccgccgcgggcggggacgcgggcggaggaggcgccgcggcggagcccccggacgcgaccatgtcggaggtgctgccctacggcgacgagaagctgagcccctacggcgacggcggcgacgtgggccagatcttctcctgccgcctgcaggacaccaacaacttcttcggcgccgggcagaacaagcggccgcccaagctgggccagatcggccggagcaagcgggttgttattgaagatgataggattgatgacgtgctgaaaaatatgaccgacaaggcacctcctggtgtctaactcccccaaagacaatgagttaagggagagaataagaacggcggtaacagttattggcaaaaagcatgaaaagagaaagcactttgaaatttattactagcttgctacccacgatgaaatcaacaacctgtatctggtatcaggccgggagacagatgaggcgagaggaggaggaggaggaggagaaggctctgggctcctctgcaaaaataaaaataaaaaaataaataaaattttaaaaataataaaaattcactatatacacatataaagaaataaaaagaagtctcagttgcagctatttgtcaaaattaatatccatttctttttatatacggtgaatattgcgcaattatagatctggattttgaaccacttaatgaagcggcaacaccaggtgttttgaggtgttggcattcttcgctgatttggctgttcccaatgtttacattatttaatcttgcaaaaatggttctgtgcacttggatgtgaaatgctgtccagttttattttttttatgttgttatccttggatgtacaaaaaattcagaaaatgatctctgtagatattctgttttattttggtcatctttagaagttatcaggaatgtgtttaaaacaagaagagaacttttctaaggaatgatacatagaaaagattttattttaaaatgagttgtaaagcttgtgtttctttgttgctgcaagctatctgcccaagttaatgcaaatggacacattttttatgtcagaaaaacacacacacacacacacacacacacacacacacacgaaaaacaaagaaaaaaatgcttgagctttttctaacttccccttgcagtctgttgtgtgagcagcctgtttatttctctaatattatgtcagtttattctctttaatggactgtaaaaaaatgtaatcacaagagtgccaaatatcttgaaatgccaaaaggcattttagtttcttttctctgtgctctgagtccacgtacaggaatgcttggagtgtcttttctgttatttatagggattctcttaaggcacaccagctgcctgttttgcatggtatttgcaaaaatgcctcttgcgtgaggaaatcttttaccattttttgtttgcaactttggacctcaagaggtttcccttcccttccccgttccctcttttcttaattcaatattctgtatgttgcaccttgaaccagcacacagggctatttctccaatgtacaataaaagaattgttcctgtgtctcaaaaaaaaaaaaaaaaaaaaa

SEQ ID NO: 4738 - DNA, 3745 bp, Homo Sapiens
  NM_018590
cggcggcgggcccaaggcgtgaggcgccgcccgggtgtccccgcggcgcaggaggcggtggagcgcagagcgggcgagcgcgaaaaatcactaccaatataatggattttatatatcagattgctttattctggatatcatggtaacaatacagaaagtatacataatttcccatttctgcaagtagtcatgactgctgaagaaagaaaaacttaaagctacggcagaattattttatggaaattctgattttgtttttaatttttgataactttttactaaaggtatgaacacacaaagagcttattttgttaggcaaatacacattaataagaatgcctagaagaggactgattcttcacacccggacccactggttgctgttgggccttgctttgctctgcagtttggtattatttatgtacctcctggaatgtgccccccagactgatggaaatgcatctcttcctggtgttgttggggaaaattatggtaaagagtattatcaagccctcctacaggaacaagaagaacattatcagaccagggcaaccagtctgaaacgccaaattgcccaactaaaacaagaattacaagaaatgagtgagaagatgcggtcactgcaagaaagaaggaatgtaggggctaatggcataggctatcagagcaacaaagagcaagcacctagtgatcttttagagtttcttcattcccaaattgacaaagctgaagttagcataggggccaaactacccagtgagtatggggtcattccctttgaaagttttaccttaatgaaagtatttcaattggaaatgggtctcactcgccatcctgaagaaaagccagttagaaaagacaaacgagatgaattggtggaagttattgaagcgggcttggaggtcattaataatcctgatgaagatgatgaacaagaagatgaggagggtccccttggagagaaactgatatttaatgaaaatgacttcgtagaaggttattatcgcactgagagagataagggcacacagtatgaactcttttttaagaaagcagaccttacggaatatagacatgtgaccctcttccgcccttttggacctctcatgaaagtgaagagtgagatgattgacatcactagatcaattattaatatcattgtgccacttgctgaaagaactgaagcatttgtacaatttatgcagaacttcagggatgtttgtattcatcaagacaagaagattcatctcacagtggtgtattttggtaaagaaggactgtctaaagtcaagtctatcctagaatctgtcaccagtgagtctaattttcacaattacaccttggtctcattgaatgaagaatttaatcgtggacgaggactaaatgtgggtgcccgagcttgggacaagggagaggtcttgatgtttttctgtgatgttgatatctatttctcagccgaattccttaacagctgccggttaaatgctgagccaggtaagaaggtgttttaccctgtggtgttcagtctttacaatcctgccattgtttatgccaaccaggaagtgccaccacctgtggagcagcagctggttcacaaaaaggattctggcttttggcgagattttggctttggaatgacttgtcagtatcgttcagatttcctgaccattggtggatttgacatggaagtgaaaggttggggtggagaagatgttcatctttatcgaaaatacttacatggtgacctcattgtgattcggactccggttcctggtcttttccacctctggcatgaaaagcgctgtgctgatgagctgacccccgagcagtaccgcatgtgcatccagtctaaagccatgaatgaggcctctcactcccacctgggaatgctggtcttcagggaggaaatagagacgcatcttcataaacaggcatacaggacaaacagtgaagctgttggttgaaatcataattaatgcgttactgtatgaaccacaaaacagcactatttatttagccttacttctacttccagatgcagtgcctcttttggagaagacatgtttatttttcatgttctttctgacattactttagcaattcaacttgatgtgagaagaaaaaacaaatgtttcaacacaaaatctctgttttgtgagaatactgcactatggaataattgacaaattgaaatctcatatttgtcccaaaagttgttttgagttagttctacctggtgcccatgttctgattgtgtgtgggattgcatggtgtcctgattgcatctaggtggagcggatggaatgtgctgggccactgttgggtggagagcagcacattcttacagaggagatggagcgttatgagcatagtatgtggataggtatcttcacctgcccgcccctgagtcagcctccttgacttgatagcttgaagaatccttttccactgaaatagaggataattaattgacacatctgaaatccccaatcaatcaatcaagagaaaggtagaactaaaaactccttaacttactgttgcttacacccctgaaagtctgtttttaagcaaatgggtaatagtagaaaataggttagaatctatggcttgattaaaaatatgttattacattatcatgttcaggattaggattagtagtcagttgctgtaaactattttgaacaaacagaaaagaacacggaaacatttttaacagagcatttaattatgttggaatacaggatcctagctctgtctgggaacattagtttatgtgagccagctctatcagggtcttcccatggtggttcagaatagatgagcatagcatggttttgtttgtttttgctttcaattttctaatttggcatggatccatatgtatttactatcctttttctaatatattaatatatgctacatttgtatttgcattactataatactttgagttgaaaaagagtttcattgtggagagaaaaagcaaatggtatgccacaagatcactctgatttgagaaaagggaggaggggaagatagtctgaatggaaatctgaaatacggaatgttttagagaaatatgtcacttgcatatagaatgttttaattgaggtataaattaatgagacaaagtgaaaaagaaattatattcagataggactgcactacattatttgtcacacatggatctgttaccatcaggtcaattcctagtatgcataaattttttaacccttttaaaagagacctatgttgaaaacccctgaaaattcactgaagaaaaatcattactctttttctcagtaaatcatatcatctgaaatattacaaatttcaaatttctaggtgctatattaattcaatattacaataactcttacctaattattcttacaagttttaagttgtggtagtttagtgatttttttaaaagatgtgtgaaatgttctctgcaaaataattcaggccactgtctccttttatatattattataattatttattatgaagaccagtgaattacgatatttaaagtgagagaacttaattatttgcaaaggtaagttacagcttgttttttgagagaatcaaatgagtttacttttgttcctgttgtttttaactagctttaagtttaaagatggaagctaagcaatggaaatgctatacgtttttgacatttattaaatggtaccaataaagtattttattaccaaaagttaaaaaaaaaaaaaaaaaaaaaaaa

SEQ ID NO: 4739 - DNA, 2918 bp, Homo Sapiens
  NM_018593
gcggccgcctgcgcgctggccgcctgcgcgctgccagcccgcccgcccgccaggggctccgccgccctcgcctcggcctcgttagcccgccaggagccccgcagctcctccgggagcccgctggtaactcgcgtccctcgcgcttctccggcgcctgaggggcccgcctcgggccatggtgctctcccaggaggagccggactccgcgcggggcacgagcgaggcgcagccgctcggccccgcgcccacgggggccgctccgccgcccggcccgggaccctcggacagccccgaggcggctgtcgagaaggtggaggtggagctggcggggccggcgaccgcggagccccatgagccccccgaaccccccgagggcggctggggctggctggtgatgctggcggccatgtggtgcaacgggtcggtgttcggcatccagaacgcttgcggggtgctcttcgtgtccatgctggaaaccttcggctccaaagacgatgacaagatggtctttaagacagcatgggtaggttctctctccatggggatgattttcttttgctgcccaatagtcagcgtcttcacagacctatttggttgtcggaaaacagctgtcgtgggtgctgctgttggatttgttgggctcatgtccagttcttttgtaagttccatcgagcctctgtaccttacctatggaatcatatttgcctgcggctgctcctttgcataccagccttcattggtcattttgggacactatttcaagaagcgccttggactggtgaatggcattgtcactgctggcagcagtgtcttcacaatcctgctgcctttgctcttaagggttctgattgacagcgtgggcctcttttacacattgagggtgctctgcatcttcatgtttgttctctttctggctggctttacttaccgacctcttgctaccagtaccaaagataaagagagtggaggtagcggatcctccctcttttccaggaaaaagttcagtcctccaaaaaaaattttcaattttgccatcttcaaggtgacagcttatgcagtgtgggcagttggaataccacttgcactttttggatactttgtgccttatgttcacttgatgaaacatgtaaatgaaagatttcaagatgaaaaaaataaagaggttgttctcatgtgcattggcgtcacttcaggagttggacgactgctctttggccggattgcagattatgtgcctggtgtgaagaaggtttatctacaggtactctcctttttcttcattggtctgatgtccatgatgattcctctgtgtagcatctttggggccctcattgctgtgtgcctcatcatgggtctcttcgatggatgcttcatttccattatggctcccatagcctttgagttagttggtgcccaggatgtctcccaagcaattggatttctgctcggattcatgtctatacccatgactgttggcccacccattgcagggttacttcgtgacaaactgggctcctatgatgtggcattctacctcgctggagtccctccccttattggaggtgctgtgctttgttttatcccgtggatccatagtaagaagcaaagagagatcagtaaaaccactggaaaagaaaagatggagaaaatgttggaaaaccagaactctctgctgtcaagttcatctggaatgttcaagaaagaatctgactctattatttaatatcttacatacctccaccagactggacttgctttttgaattttaagcaagtttcctttccttttatacaaattgcaaatttcatatttttttaatcacatcctaggaatagcacaataattgggaaatagaacccttatcactagaagaaccattttctgccactaaatatctctgatgtttccatgagtctgagggcagagactctggtatatgaaaacgtctgaaagtcacatattgtgaaaatttgaagctatctcagtaaaaagcagctttggaaactgtgaatgatctttagcttgtacaaatgtttaaaaatacctcaggctatactgaaagggttgcagtttggttaggagtggaaatattttgtttgttaatgatgtcttcagttctggtacctctgttttactttcttatgctctttggaaactttttgcaaaatttaagcctgggttctagataataccagatctacctaaacctcaagtctatgttaaagttgctttcctgctgttaaataagctatgatattaagatattctgacttgctccagtgtcaagggaccttctgggagcaggtgctaacatagtgttcagaatcaatatgtgagatgaaaaggatcccctccaggaggatcctgagctgttcagaaatcatttaagtttacagcgttgttccctttgcgtttgcagtgcgttttactcaagtagccagaaacaccccacgtttctgaatttgtttaaactgtaacaataaagtaaaatagaatgcatgaaagatattctggcgattgtaacttagaatttttctgacttctggatttgttggcactagaacctgatatttaaagtcttactgagcagctatcaagtggcagttacaggcacaaattggtggaggctggaggatggggaggggagcaaaaccctttatatttgtgaagaaaatatctgtagctgatagaaataattgcttaaattggtttatgaaattaatgagtctgaaaaggttaaaagcacttataaaaagaaccaagtcctacatttccagaactttctggcaaaaatttgcactcatattatttatcctatgaacattcccattgtttttttttgctatttatatacagattatcataagaaagctctcagtttgaggacccaaaaaaaaaaaaaaaaaaaaaaaaaaaaa

SEQ ID NO: 4740 - DNA, 7101 bp, Homo Sapiens
  NM_018638
ccagcgtcaggccagccccggcatgctctgcggccgcccgcggtccagctccgacaacaggaattttctccgagagcgggccgggctcagttcagctgctgtccagacccggatcggcaacagtgccgcctccagacgttctcctgccgctcgcccgcccgtcccagcgcccccagccctcccgcgagggcgccccgggacggaaggatccaccagtctgtcggcgcccgccgttctcgtggtcgccgtcgccgtcgtcgtggtggtagtctccgccgtcgcctgggccatggccaattacatccacgtccctcccggctccccggaggtgcccaagctgaacgtcaccgttcaggatcaggaggagcatcgctgccgggagggggccctgagcctcctgcaacacctgcggcctcactgggacccccaggaggtgaccctgcagctcttcacagatggaatcacaaataaacttattggctgttacgtgggaaacaccatggaggatgtagtcctggtgagaatttatggcaataagactgagttattagtcgatcgagatgaggaagtaaagagttttcgagtgttgcaggctcatgggtgtgcaccacaactctactgtaccttcaataatggactatgctatgaatttatacaaggagaagcactggatccaaagcatgtctgcaacccagccattttcaggctaatagctcgtcagcttgctaaaatccatgctattcatgcacacaatggctggatccccaaatctaatctttggctaaagatgggaaagtatttctctctcattcccacaggatttgcagatgaagacattaataaaaggttcctaagtgatatcccaagctctcagattctccaggaagagatgacttggatgaaggagattctttccaacctgggctcacctgttgtgctttgccataatgacctattgtgtaagaatataatctacaatgagaaacaaggtgatgtacagttcattgattatgaatattctggatacaactacctggcatatgatattggaaatcatttcaatgaatttgcaggtgtgagtgatgtagactatagtctgtatccagatagagaactacagagtcagtggctgcgtgcttaccttgaagcctacaaagaatttaagggctttgggactgaagttactgaaaaggaggtagaaatactcttcattcaagtcaatcagtttgcattggcttctcatttcttttggggattgtgggctttgattcaagccaaatactccactattgagtttgatttccttgggtatgcaattgttcgttttaaccagtactttaaaatgaagcctgaggttactgcattaaaagtgcctgagtaaagaagagatttaattattctccagtagctgagcaatgcttgtgaatcttttcttaagaaatcccaaaaagccaatattagttaaaattctgttgtttaatttggttatcttgctttataaattatgcctctaaacaatcaaatctatttttgaaatagactgaatgatgtcaagaaatatacctactgctatccgtatgtggtggattagaaatgtgttaaatctgcaaaaggtataaagatgtcagtttaatttctttgataatttaacctatgttgtatgtgaattatttattataaacttagcacgattctgtgactgtttttctctgtttcacgttcgttgagtgtaagcaatgaaaatgtcccaaataagttttttaagttttactttaataagattaatttcagtaaacattctagttgttcagtgtaacctttttatcttgatgcattgtaagtaaaatgaatcatttactcttgaaatgccagtcattgactgatgtagataatttaggattttcatataaaaatagctgtttaggaaggtgaaatacattcactgtctctgttggtggtacatcttgttgaattcaatattagaaagtatttctttttggggtaatataacttagaattaaatccctgtttctctatgtagtctggcagtataaatataaatatttaccatataatcttggaataagtattagttaatgttaccaaaatctgtattaaataatgttttcaaatgctaaatatggtcgttactattttcagttttaaaaattttatagtatcaaattgtttctaaccaaaaatttccttttacttctagagatgctttatgtttttgattattaaatagtcactagtattgctaatttttgaaacaaatacacaaaatttatcatatgtagaaataagaaaatattgtttaggttaattattttttacctatccagagtcattccttacatttcagtttcatgtttcattcctcacattttagtttcatgttttagtttgattctatgtttttagactgatagcaaatgattacttgatacatgtaagttcagcgttatatgttgaggcagttatataattaaataaggaacacttagggcattgatcttgtacacttaaaatctgacaaatgacaaaatgtgaattaagcataaatagtcatggcaggagggcttttgtttatttctcttgtttttgtttaactgtatttttaattttgtctggtggtaagagggaggtaattattgtatggaaagaagttagatctttcagatagataaataggcttcaggttttgaagtctgctctgtgtagttgagcagtcatggttaactttacttagaaaattagtctgacaagctttgcacttcggtcacataagtgcccatgtacaaagttggcttactggatctgcatattcaaaatatgcaactacaaatttatcctctgagaaatcttctgaggagtctaatgtattccaaatgacttaatattctcagacaaatgctttaaaatacttggattatctcaagatttttgaagctaataaagtaaatagaaacacaggccattttaaatggtaaattctagttacataaatataatcttaaagtatgtttgtatctgtaacagtgttagaccagatttggtttctacctccccaatgttataaatgttcacttttgtttttataaaccatattactgtaagatcaatagaactttgcctagttaagtgaatggaaccaattaaacaactagtagctttttataatgttagtgtgaacttgaaaaattgtttttggtggaatttttgtctgtggttagaacattttcataaaacagataaagaatgtgtaatactcttaattttttttttttttttttttttttttttgctttctgccttctaaagtgcaacagtatatatcttgtagaactgtgggaggagagaagataatttttctaccttactccatattcttacttcaaactattttgaatagaggttcactgagccattgctgatagactgtgcatagctactagctgtcacactattgtaggttttttggagagattcatagggaagtgaatgtaaccaggaataaaggctctcactttagctctgggactatgcagtggatcttgggaacaaaataagatatctaatctattttccccattctggctagattttggttgttgtgatgctcctacttcctgtataggtttttgggatcatggtgcaggctagtaataggattcagaattgcttcccttttatatcgaccatgtaagggattctaaaggagggtaaatctcaaagtgctctgaaatcatccctctaaaatctgtcctgtggtgtgctaagatgtctgttgcctttttatgttaagctaaggaacttgaatgccttacctaataactcaactagtagtaagctcattttgtaaatatgaaaatggctgtaagaagtggcattcatgtatattcaatgttagtcaatagaccatagtggcctggatgctttaacaagccaaattccgcaattttttttccttttttccccttcatacttgtatgatctcacctgaccagtgatttcttttcctcctaaccccatgctaccaccattttctggaaatcaaagagatgtggtagtaaatcatacagtacacacgatcatctgagatcaatatgagcacaaaactcatcaagtaggtctgcctggaatgtatataaaaaatgtaaataaaaatttgtaaattagtgtgaactgtatcttgcatatgagactgtgtattgttttgcattctcttcccttttgtagaaatttttctgtaaggaaatgattcagcttgttggttttagagtaaaaatagccaacagttgtggctacacagtgagatcacaggaactggaaatagggtttgtcggctttggttaatgtcagtactcatttatttagcctctcagtgcttaataagacttttctttattttttagttagccgttaggttttgtgaggttagattcctggaagcagtgaatttatacactgttatattaatagagctccgttctttgagtcatgattccaagctaaaggaaattaaaaatgtaatttaataatttcctatttttagggttgttaatttttttctacaaaaaaaccttgaaattttagatatcccaatgtgaatctaatttccatatatacagaaattagacaaataataagtctttagttcaacttaagcatatctcaaatgacttctctaaatttaaagttgatcatgataggatcataaaagacagaaaagacttaagtaatcttgtaatgacaattatttccatttttgctgaactaaaaatatttaacttcataaatatgttactacagcttccagatttaaagaaaaaaagtttcccccactctcaattaaaagttagaaccctccacttttaaaattatacaaatatttcttttttacattacacagaagccttctgtaccattttacgaatttctgtcttcataatataagtgaaaatactgtcatttcaattttctgctttaaattgtttttaataagcattccaaagtgatacagacttaagcttttaatcaatcagtcattcagttgatagacaaagttagcgatgctttatgctaggaaacttgttgacagtaacctgtgcgactttatgcagaagacaaatgctagtaattattatgcacagaggaaaaatcattttaagtatgtggtaaagcagcttcatctttcaaaattgatttgctctggtttttctttagtccattagattccagaatgtccttttactgggaatttagttatgtattaagataacctgttttcagttctttttgaaaagaagacattatttatattgaaccaccttattttaaaatttttaacttttatataccacttgtgtgattccagtgtcatgtcttgggtttgatgtcgttggacagaaaagtgtatcaattattttaaatgaatttttccccatgtttgaggcttagtctgtaaatgtgttgctgtaacagaaaatacttgggtatgcattacttgaatacttgaaaactgaaattaataagatgtattacataatgaattagatttctctgaacagtttttacactgaaaatcttcatttctggattgcagtttgaaatggaatgaagacctgaattatttgggtagaaaaaattatgatagtgcttataagaactgtaaactgttttaaactattttgtgtttgacgcatcaaacttcaagttttttgtaagtttctctcctgaaattttctttctcttctatactttatgcacttactatactactgatgtaataaaagagcagggttaaaaatattgtatctgtattcattgtgaatcctgtagcttttctagttaacaaaaaatcgctttctaaaatactcttaatcccattgttttggttaacatcttacccatttgttgtatttcaaatgccattaatcattttagtacaacacctatgtttataaaaatttgaaaacattacatattgtatttaaaactaattagtgaagagtaagaaaaaaactagccaacagaattgtaggtgatgcattagttaaatttcaaaactcataataaaggaactttcagagattggttgaaacccagtggtatccctgtaaattagctcctgtgactggaaaagaccccaaaaaggcagtagaggagattagtgtttacttgctgtggttgtggtgtgctgctacttaattataggtagtgacacactgaaattcttatttgtccaataatctgaagtagtttcctatatttatctgtactaaattgactataaattgagtctgcaaagaggaaactttttgactgtactgtatttaggagcctttgtacagcttggtcaaatttccatgatatgaagtatttgagttttaaaatatactgttattaaaaggaaaaagacatggccattattccatgtgcttaaatgataatttccttattcagtttcagaagaaaaagaatgaaattgggtaactgtcattgcgttagctttatgttgaattgggaaattgtggcataaagcttaaattcgtgtttatcaaatgtgaaccatagtagtataatgctgctttgtatataatgtaagtgctacaaatagtctcagcactgaaaatgtattgatacctcttaaatgaatgcaacttttgatgtaggtgttttgctatgcctcagaaaatatctgtctgagaatttgttaatctgtttgataatgaagatacttcctgttttcttgtttcatattttcatgttcaaaatttaagttttacatttttactactgttaatttaaataaaatttgttctgtggataaaatgaggttggcagtgaagaaaattaaaaacagcctcattcatgtaactggttaagtaaaaatacattttcactatgtgttcataaacttttaatgaagctgtttgtctttcagttcaaatataagtgatgtttaggctttatttctgttaataaggctttttaccattgattaaatgaaggaatgtatctttttgaagagatttatattctgtaaataaaaattcgttgtaacaataaagttgagttctaactacagtgtattca

SEQ ID NO: 4741 - DNA, 2093 bp, Homo Sapiens
  NM_018641
cggcggcggctgcgggcgcgaggtgaggggcgcgaggtgagggtcgcgaggttcccagcaggatgccccggctctgcaggaagctgaagtgagaggcccggagagggcccagcccgcccggggcaggatgaccaaggcccggctgttccggctgtggctggtgctggggtcggtgttcatgatcctgctgatcatcgtgtactgggacagcgcaggcgccgcgcacttctacttgcacacgtccttctctaggccgcacacggggccgccgctgcccacgcccgggccggacagggacagggagctcacggccgactccgatgtcgacgagtttctggacaagtttctcagtgctggcgtgaagcagagcgaccttcccagaaaggagacggagcagccgcctgcgccggggagcatggaggagagcgtgagaggctacgactggtccccgcgcgacgcccggcgcagcccagaccagggccggcagcaggcggagcggaggagcgtgctgcggggcttctgcgccaactccagcctggccttccccaccaaggagcgcgcattcgacgacatccccaactcggagctgagccacctgatcgtggacgaccggcacggggccatctactgctacgtgcccaaggtggcctgcaccaactggaagcgcgtgatgatcgtgctgagcggaagcctgctgcaccgcggtgcgccctaccgcgacccgctgcgcatcccgcgcgagcacgtgcacaacgccagcgcgcacctgaccttcaacaagttctggcgccgctacgggaagctctcccgccacctcatgaaggtcaagctcaagaagtacaccaagttcctcttcgtgcgcgaccccttcgtgcgcctgatctccgccttccgcagcaagttcgagctggagaacgaggagttctaccgcaagttcgccgtgcccatgctgcggctgtacgccaaccacaccagcctgcccgcctcggcgcgcgaggccttccgcgctggcctcaaggtgtccttcgccaacttcatccagtacctgctggacccgcacacggagaagctggcgcccttcaacgagcactggcggcaggtgtaccgcctctgccacccgtgccagatcgactacgacttcgtggggaagctggagactctggacgaggacgccgcgcagctgctgcagctactccaggtggaccggcagctccgcttccccccgagctaccggaacaggaccgccagcagctgggaggaggactggttcgccaagatccccctggcctggaggcagcagctgtataaactctacgaggccgactttgttctcttcggctaccccaagcccgaaaacctcctccgagactgaaagctttcgcgttgctttttctcgcgtgcctggaacctgacgcacgcgcactccagtttttttatgacctacgattttgcaatctgggcttcttgttcactccactgcctctatccattgagtactgtatcgatattgttttttaagattaatatatttcaggtatttaatacgaaatgtggaagggaatgctggagtaaaatatcccctctcccctccgcccgcccacccgcccgcccgctcgcccgctcgcccgctcctgtggtttttctgagcgtgcgggcgccgggaggggatgctgaggctgatggagctgcctccagggctagggccactcaccggaggagggcggggcctgcacttgaagtcaggccgcacctgtctgtttttggaagggtagccgacaaatccttccagagggaaagttctttgtttaagtgttgtacttgaaaaggtcaatcttcagggcttcctgtttgaagtcaagtcagaggtaaaccggtcagttacagaagcaggatttctaggatttctaactccagctgttcccatactgtctagtttaaattatggctgttaaggccgggcgggtgactcaggcaggtaatcccagaactttgggaggcccagacagaaggatcgcttgaggtcaggaatttgagacctggccaacatggtgaaaccctgtctctactaaaaaaaaaaaaaaaaaaaaaaaaaa

SEQ ID NO: 4742 - DNA, 552 bp, Homo Sapiens
  NM_018648
aggaaattgacgaacacgtgacgcggtcgggcggaccactgcagactgagcggtggaccgaattgggaccgctggcttataagcgatcatgtttctccagtattacctcaacgagcagggagatcgagtctatacgctgaagaaatttgacccgatgggacaacagacctgctcagcccatcctgctcggttctccccagatgacaaatactctcgacaccgaatcaccatcaagaaacgcttcaaggtgctcatgacccagcaaccgcgccctgtcctctgagggtcccttaaactgatgtcttttctgccacctgttacccctcggagactccgtaaccaaactcttcggactgtgagccctgatgcctttttgccagccatactctttggcatccagtctctcgtggcgattgattatgcttgtgtgaggcaatcatggtggcatcacccataaagggaacacatttgacttttttttctcatattttaaattactacaagattattaaagataaaatgatttgaaaaactcaaaaaaaaaaaaaaaaa

SEQ ID NO: 4743 - DNA, 2181 bp, Homo Sapiens
  NM_018649
cctcatgttagcgagtggccctcggctcgtctcgcagatcggccaagtacgcggaggccgcgcggtttcaccattaatactcctgaaggacaatagctcatcaagccccaccgaaagccccggacccgtcgcggagcctgggctggcgggggatgaggctgagcaactcctcctagaggtggttatgtggagaaggagcaatcccttctccctcctcctcctccccccgctactatccgcggcccagagaactgccgcttgccgccattgacacgcacagatagaacccaaagaaaggcaaagagtcctgcccggcaccggcgccgcgtgggccaaacctgcgcccgtggaggggcgcgcagagggcaccgggcgccgggagcaggcggcgcagcaccagcattgtgttagtgccgggaggccactgtgtcagcaagctgagagggaaactgaagcaagatgtcgggccggagtgggaagaagaaaatgtccaagctgtcccgttcagctagggcaggtgtcatctttccagtggggaggctgatgcgttatctgaagaaagggacgttcaagtaccggatcagcgtgggcgcccctgtctacatggcggcagtcattgagtacctggcagcggaaattctagaattggccggcaatgccgcgagggacaacaagaaggcccggatagccccgagacacatcttgctggcagttgccaatgacgaggagctcaaccagctgctaaaaggagtgaccatcgccagtggaggcgtcctgcccagaattcaccccgaactgctggccaaaaagcgagggaccaaaggcaagtcggaaacgatcctctccccacccccagagaaaagaggcaggaaggccacgtcaggcaagaagggggggaagaaatccaaggctgccaaaccacggacgtccaaaaagtccaaaccaaaggacagcgataaagaaggaacttcaaattccacctctgaagatgggccaggggatggattcaccattctgtcttctaagagccttgttctgggacagaagctgtccttaacccagagtgacatcagccatattggctccatgagagtggagggcattgtccacccaaccacagccgaaattgacctcaaagaagatataggtaaagccttggaaaaggctgggggaaaagagttcttggaaacggtaaaggagcttcgcaaatcccaaggccctttggaagtcgccgaagccgccgtcagccaatccagtggactcgcagccaaatttgtcatccactgtcacatccctcagtggggctccgacaaatgtgaagaacagcttgaagagaccatcaaaaactgcctgtcagcggcggaggacaagaagctaaagtccgtcgcgttcccgcctttccccagcggcagaaactgctttcccaaacagactgcggcccaggtgaccctcaaagccatctcagcccactttgatgactcgagcgcgtcctcgctgaagaacgtgtacttcctgctcttcgacagcgagagcatcggcatctacgtgcaggagatggccaagctcgacgccaagtagccgccgcactttccagcagggatcggaggacgacccgagtcccaagagtggggttttgctttttaaaaggagagaggaggggtgatggcaggggagtggagggtggccgggcaggtcctgccggcgcagggagccctctgcccttcacactctcctccaaaagagcctccatctgtaaggaagcaggtctccgcgaggggtttctttccatgtgttttcctcctgttgttttagaacttttttaaaaaaacagacctcgttttagatttatagcattgacttttacacacattcacacaagaaaaaaatcctttcaaaattcttaaatcttctgttcctcctttttccaagggaagagggcaaaaagtggcctgggctctgttggtgtgcgtgttccgtggcggagagaagaaaatgggaaagacatctcactggtgcttttctcttttgttttagtgccccccgcccccatccctataatatctgtaactactcctaaaaaggttttgattcaggcttttttttggtttcattttgtttttttaagaaaaagaaaatgaaaggaaaaaaataaaagatccagtgtctttcttacaacataaa

SEQ ID NO: 4744 - DNA, 3483 bp, Homo Sapiens
  NM_018651
taacgggcagtagagtgtccggcttcggtgccgagtgccaccgcgagtgggccgagacgcggagggaggcgcggccggagctcgggtcgccgacgctggccaggaccgcgcttcttcccggcggcaggcggcgcggtccccgtgactctcagaagccgcccgatgtagagccgcttctttgtctcatacccctgaccattcgtgcgtggcacggagccgggtatctgcgggtacagcgatgaacagggcagacgtggccaggtgagcggcgctgctgaagcctggtttaacacgaaaggccacactaccatcacccctttctccaaccctgaaaaacagttcctgagacctgaactattgaccatcattttaatcggaccaactgcagctgtaacaagcttctctttggggtcacaatgaccactgcaggcaggggaaatttaggcctcatccccaggagcactgctttccagaagcaagaggggcgcctgactgtgaagcaggagccagcaaaccagacctgggggcagggcagcagtctccagaagaactatcctcctgtctgcgaaatcttccggctacacttcaggcaattgtgttaccacgagatgtctgggccgcaggaagcattgagccggcttcgggagctctgccgctggtggctcatgccagaggtgcacaccaaggagcagatcctggagctgctggtgcttgagcagttcctgagcatcctccctggggagctccggacctgggtgcagctgcatcaccctgagagtggtgaggaggctgtggctgtggtggaggatttccagagacacctcagtggatcagaggaggtttcagccccagcacagaaacaggaaatgcattttgaggagacaacagctctgggtacaacaaaggaatctcctcctacctcacccctcagtgggggctcagcccctggagcccacctggagcctccttatgacccagggacacaccacctccccagtggggacttcgctcaatgtacttctccagttcctacccttcctcaagtggggaactcaggagaccaagcaggggcaactgtacttcggatggtcaggccccaggatactgtggcatatgaggacctatctgtagactacactcagaagaaatggaaaagtctcacactcagtcagagagccctgcagtggaacatgatgccagaaaatcaccatagcatggcctccttggcaggtgagaacatgatgaagggttcagagttgactccaaagcaggaattttttaaaggatcagagtcatctaacaggacatcagggggactctttggggtggttcctggggcagcagagactggagatgtttgtgaagatactttcaaggagttagaaggacaaacctcagatgaagaagggagcagactagaaaatgatttcttggaaataacagatgaagataagaaaaaatccacaaaagacagatatgacaaatataaggaagttggggaacatccacctctgtcttccagtcctgttgaacatgaaggagttttaaagggacagaaatcctatcgatgtgatgaatgtggcaaagctttcaatcggagttctcaccttattggccatcagagaatccacactggagagaaaccctatgagtgtaatgagtgtgggaagaccttcaggcaaacctcccagctcattgttcatctcagaacccacacaggggaaaaaccctatgaatgcagtgagtgtggaaaggcctataggcacagctcccatctcattcaacaccagagactccataatggggagaaaccctataaatgtaatgaatgtgcaaaagcctttactcagagttcccgactcactgaccaccagagaacccatactggggagaaaccttatgaatgcaatgagtgtggagaggcattcattcgaagcaaaagtcttgctcgacatcaggtcctgcacactggtaagaaaccttacaaatgcaatgagtgtgggagagcattctgttccaatagaaatctcattgaccatcagagaatccacactggggagaagccttatgagtgtagtgaatgtggcaaagccttcagtcggagtaaatgtcttattcgacatcagagcctccatactggggaaaagccatacaaatgtagtgaatgtgggaaagccttcaatcagaactctcaactcattgagcatgagcgaattcatactggagaaaaaccttttgaatgtagcgagtgtggtaaggcatttggtctgagtaaatgtcttattcggcaccagagacttcacacgggtgaaaagccctataaatgcaatgagtgtggaaaatccttcaatcaaaactcacaccttattatacaccagagaattcacactggtgagaaaccctatgaatgtaatgagtgtgggaaggtattcagttatagctccagccttatggtacatcagagaacccatactggggaaaaaccctataaatgcaatgattgtgggaaagcttttagtgacagctcacagcttattgtacaccagagagtccacaccggagagaaaccttatgaatgtagtgaatgtgggaaagcctttagtcagcgttccacttttaatcaccaccagcgaactcacactggagagaagtcctcaggtctggcttggtcagtttcttaaggtatggttctctgagacagagagcaacgacctttgagttaagctgtctttataagcaggatgctcatagtggtttcccggagccagtagtcacggtggaccattccctacttgcttttccttggatcactaaggtgggagagtaggagtaacttattccagttcttacccattattaggaaggtaaggactacacatgtcattgaattgtaggtttcctttttttttctttacttttaaattttaacttttaaaatctatttcatttcttagttatgcatctcataatcagactccatgctttttaaagacagagataatatcttctctattctattctacttcctccatttcaccatttatacaaagtcattcaaaaaggctgattcatgccttcctgcctcttggctatggccctccccatctactctttaaactttaatctataacttttcatcagttttgttccctatctagaaaacattttcttctgtttgctaatctttgtccctcacaatttttgaaatccatctcatcactgaaatactttcttcttcaagtacttttttatttttcttcaacttctcttgatttgacctcagtgctttgaattcactggtgctacaatatgtaactgtggttaattgccttgtaaattttgcgtgtctgtatacttttataccaacttattgtaggctctttgaggtcaggtatgtatttctttcccatatagatagtattttgtacataccagttgttaaataaataatttttaaaatctcaaaaaaaaaaaaaaaaaaaa

SEQ ID NO: 4745 - DNA, 5300 bp, Homo Sapiens
  NM_018657
ggcttcaggagagaggcccgcggtgctgtgctgccgggcctcggcgcagagccccggcagagcgccagacgctgactgccggcaccagaatgctcgcgatgaggaagacaggcggagcgctgcgagctagcgagccctcagctctcgtatccatgacgcctgctgcttcgggggacccctggcatgctggggagtgggtctctgtggtacatcctgtaccgccctggccggcgccggacccccatggccccagaacctcccgcactgccacgggaagacagagccggacgtgacgccaccgtggaaggaagggaggggcggagcgtggctcggtgacgtcctcccaagatggcggagacagagtgaagaaactgtgttccccccttgggttgctatcgatcaagggtaaaattccattctgatatcaaaatgcagtattcgcaccactgtgagcaccttttagagagactgaacaaacagcgggaagcaggttttctctgtgactgtaccatagtgattggggaattccagtttaaagctcataggaatgtgctggcctcctttagtgagtattttggtgcgatctacagaagcacttctgagaacaatgtctttcttgatcagagtcaggtgaaggctgatggatttcagaaactgttggagtttatatacacaggaactttaaatcttgacagttggaatgttaaagaaattcatcaggctgctgactatctcaaagtggaagaggtggtcactaaatgcaaaataaagatggaagattttgcttttattgctaatccttcttctacagagatatctagtattactggaaacattgaattgaatcaacagacttgtcttcttactctgcgagattataataatcgagagaaatcagaagtatctacagatttgattcaggcaaatcctaaacaaggcgcgttagcgaaaaagtcatctcaaacgaaaaagaagaagaaggctttcaactccccgaaaacagggcagaataaaacagtgcaatatcccagtgacatcttagagaatgcatctgttgaattattcctagatgcaaataaactgcccacacctgtagtagaacaagttgcacaaataaatgataattcagaactcgagttgacatcagttgtggaaaatacttttccagcacaagatattgtgcacactgttacagtgaaacggaaacgtggaaaatcacagccaaactgtgctctgaaagaacactctatgtctaatatagccagcgtcaagagtccttatgaggcggagaactccggggaagagctggatcagaggtattccaaggccaagccaatgtgtaacacatgtgggaaagtgttttcagaagccagcagtttgagaaggcacatgagaatacataaaggagtcaaaccttacgtctgccacttatgtggaaaggcatttacccaatgtaaccagctgaaaacgcatgtaagaactcatacaggtgagaagccatacaaatgtgaattgtgtgataaaggatttgctcagaaatgtcagctagtcttccatagtcgcatgcatcatggtgaagaaaaaccctataaatgtgatgtatgcaacttacagtttgcaacttctagcaatctcaagattcatgcaaggaagcatagtggagagaagccatatgtctgtgataggtgtggacagagatttgctcaagccagcacactgacctatcatgtccgtaggcatactggagaaaagccttatgtatgtgatacctgtgggaaggcatttgctgtctctagttctcttatcactcattctcgaaaacatacaggtgaaaaaccatacatatgtggtatttgtgggaaaagttttatttcctcaggagagctcaacaaacactttcggtcccatacaggagaaagaccatttatctgcgaattatgtggaaattcttacacagatattaaaaatttaaagaagcacaaaacaaaagtccattctggtgcagataaaactctagactccagtgcagaggatcatactttgagtgaacaggattccatacaaaaaagtcctttatcagaaactatggatgtgaagccttctgatatgactttaccattagctcttccacttgggactgaggaccatcacatgcttctgcctgtcacggatactcagtctcctacatcagatacattgttgaggtcaactgtgaatgggtattcagaaccacagttgatttttttacaacaattatactgactttgtaaggaatatggaattgctaagatatcattggtagcaaacatctctggtaaggtgcatatattcatattaaattcccattcatttgagttgtgaccattatttttcattcactgaagtaaaagcacctgatgctgcatcacaactgcaatgtttgtttttatttttggctttatgtctatactccacagagagctttttaagtaatgaattatgtagcactattttgggtggatgagttttattttcttttaaagctgccttaattccatttttattttgcattttagaattgcccttcatttactaaatcagccagttaatgtgattcagttgtgacctgtgggattttaaaattttcctgccctcataatttaagcaaaatccacgatagtatcagcccaagagtgtgttgctatttgtaagccccatggatcaatacataaactatgcataaaaataaaatttcatattttcgctcgtaaaaatttaggcgctgaataagaattgtgctatttctctattaatatattgttagaaataacttttctaatgaaacaaaaatgtttctcaaaatctagaaaagtgcatataaatttttgttcatttagaactgagtattctggagaaaaccaatggtcagcacttttggtttgagttatctgagattgtattttcaaaatgaattttaagtagatatttggtgtttttatcttgtcaaagacagtttcaaaatttgattcagtttatgttttattccgttctaaaatattggagatgaggaaaatgtacttgagttttgaaatattttggtaagcctctcttactcctgttatgcactttttaaaataaatactgaattccagaaagaattttctagatataaacttaatgcatactagaaatcacttggcttctaaatttggtacattatattgcataaagagttaagaaattaacctcaattataagtaaacattttgagttaccagaaagccaactatagttaaatattttatatctgagttttctataagtttggggtttgttaattttataaattaaaccacaacttttggtggtggttgtagtttcacaatggtccttttccttccaaatgaatgtagaaaattcgttattatcctgatatttgcaccactcatccccatgccacttttcccacatattaatttatttcactgcctgatctttggatatgaaattatgagttccacaaagtcaatttttatagtgccaatcaaacagcatggtgatattctttttctttttttttccccccacaaggctgttgttcagtgtgagatgacatcatttcttatttctgccatgctgtggcttttttgtgttctgcttttaaactacacctgtagtacagttaatatgttttttattggtattgatttctttaattcattaattttctctatttgggacccaagtcataagaaccaattagaggacataataaaaacacttaatgcttgtagtctgtagagatcttcaccatttcacagcacacacattattttcataataaattgccactggtgggacatgggactgacttatttgaatagagtttgaaataccacctttgtatgatgcaaacaatatttgattattttatctaagaaatctatgcatgtgtatcaagttaaaatagtgggtttaaatacaatttacaaagcattagaatgttacctaatctcttctgggttaaatgtgataggaatgtattggaatgtgaagaaattatagaaaattaaaagactcagcctctttaggaagtttgctaaaatggagaggttatgtttaatttatttatatcttcgttaatccaagcatctaatgaacaaaaaactgctacagtgacgtcataattctataagggcaatagttgccaaatttcctctggtattattagcattctgcctttgcatagattagccttcaaatttattatttttagtattatttgatacgattgaagtggctaagattgattgagcttttcttgatcacattttctgcttcttagctaaagtaattttatttaaattgacatggcttgagttgtcatcattttctgctcttctagaatgatgtgtagagaaaacttgaagatactatcccttctttggcattcttctcttaatgctatgctattatttatcataatatgcatatatttagttgtatctggtatcattctaacactcataactaccattttagttaagtccaactttatatttgttacaatgcagtgttttgggaaaggtctattagtaattatttaagtattacatatttttatggaagtctttagaaggtgaagatcttactgagaaactattttctaaataaatttaattttcttttgtatttgtatcagatcatgcctactgtatgttagattttagactattttaaaagaaaccgtagattatataaaaatttttttgctgtttttaaatggcatttgtcttatgtttaatttcacaggatgattttgatagacaaattttagaaaaccttttttcaaaggtaatggttctatcagtttcattccaacagtagctaatttctgtgtttcagtcctacagaaattgtgtgagtagttgaaataatgtacatgtactagtttttttaagtattctaaatagttctaacatttaatgcatatcagaaacatgcttaagaaataacaatatccaggcccaccccacctattgaatcagacagttcccagggcatatatatgctggggaagccccataggtgattttaatgtataccaaacatgtagagtctcactctgttgcccaggctggagtgcaatgacgtgatctcagctaactgcaacctctgcctcctggattcaagcaattctccggcctcagcctcctgagtagctggtactacaggtgcgcgccaccacacctgactaatttttgttagagatggggtttcattctgttggccaggctggtctcgaactcctgacctcaggt

SEQ ID NO: 4746 - DNA, 4807 bp, Homo Sapiens
  NM_018660
aagtgcgcatgtgcgcgaggagtcgctcgggcacttattgagcgccgactgtctacgggcggccgggggtgatgggcagaggcttcagtgtccccttcgcctccgcaggagaggagaggcagcagcatggcgagtgtcctgtcccgacgccttggaaagcggtccctcctgggagcccgggtgttgggacccagtgcctcggaggggccctcggctgccccaccctcggagccactgctagaaggggccgctccccagcctttcaccacctctgatgacaccccctgccaggagcagcccaaggaagtccttaaggctcccagcacctcgggccttcagcaggtggcctttcagcctgggcagaaggtttatgtgtggtacgggggtcaagagtgcacaggactggtggagcagcacagctggatggagggtcaggtgaccgtctggctgctggagcagaagctgcaggtctgctgcagggtggaggaggtgtggctggcagagctgcagggcccctgtccccaggcaccacccctggagcccggagcccaggccctggcctacaggcccgtctccaggaacatcgatgtcccaaagaggaagtcggacgcagtggaaatggatgagatgatggcggccatggtgctgacgtccctgtcctgcagccctgttgtacagagtcctcccgggaccgaggccaacttctctgcttcccgtgcggcctgcgacccatggaaggagagtggtgacatctcggacagcggcagcagcactaccagcggtcactggagtgggagcagtggtgtctccaccccctcgcccccccacccccaggccagccccaagtatttgggggatgcttttggttctccccaaactgatcatggctttgagaccgatcctgaccctttcctgctggacgaaccagctccacgaaaaagaaagaactctgtgaaggtgatgtacaagtgcctgtggccaaactgtggcaaagttctgcgctccattgtgggcatcaaacgacacgtcaaagccctccatctgggggacacagtggactctgatcagttcaagcgggaggaggatttctactacacagaggtgcagctgaaggaggaatctgctgctgctgctgctgctgctgccgcaggcaccccagtccctgggactcccacctccgagccagctcccacccccagcatgactggcctgcctctgtctgctcttccaccacctctgcacaaagcccagtcctccggcccagaacatcctggcccggagtcctccctgccctcaggggctctcagcaagtcagctcctgggtccttctggcacattcaggcagatcatgcataccaggctctgccatccttccagatcccagtctcaccacacatctacaccagtgtcagctgggctgctgccccctccgccgcctgctctctctctccggtccggagccggtcgctaagcttcagcgagccccagcagccagcacctgcgatgaaatctcatctgatcgtcacttctccaccccgggcccagagtggtgccaggaaagcccgaggggaggctaagaagtgccgcaaggtgtatggcatcgagcaccgggaccagtggtgcacggcctgccggtggaagaaggcctgccagcgctttctggactgagctgtgctgcaggttctactctgttcctggccctgccggcagccactgacaagaggccagtgtgtcaccagccctcagcagaaaccgaaagagaaagaacggaaacacggagtttgggctctgttggctaaggtgtaacacttaaagcaattttctcccattgtgcgaacattttattttttaaaaaaaagaaacaaaaatatttttccccctaaaataggagagagccaaaactgaccaaggctattcagcagtgaaccagtgaccaaagaattaattaccctccgtttcccacatccccactctctaggggattagcttgtgcgtgtcaaaagaaggaacagctcgttctgcttcctgctgagtcggtgaattctttgctttctaaactcttccagaaaggactgtgagcaagatgaatttacttttcttaaaaaaaaaaaaaaaaaaaaaaaaaaagagtttctggctgatgggtgactcagagtgcaggactgcctggccgtggggcagaggggtttgcccttctcggagggtacctcctgttccctgtctgagcatcctgcatggaagtcaaaggaaatccctttcttggtgacgacttaaatctgggttccctcagacattgggttgcaccccaacaaatattaaatggcttcttcttaaagcccagagaaagaggttttttaaaagactgtcgccaaatagctgagccaaaaggctgatcagaattcactttttggaatgtggcagttaaacactaccttgatcattctctcctctttcctcgaggaactcctggagggtttgagcgtctggaaactctctgctctgacccgaggaagcaccctcctgacgccgccttcctccggttattgaaaggacgcctcagaaatgctttgttttcttttacgatgtattcagaagcctttactgattaaagttttcttttatttgggtggccgggagagacccagggaggttctggaggttcctttctgtctcctggccccaccagggatttccccatttctgtttgctgcctgaaagcaggatgaggaaggccaaggagagtccttgcacccgtgagcgtcaggatgaggaaatgacaggaggaagacgtgggtttgggttagtggctgctggcgttttggcccttggtgtttctggagcctccagggatctaggggagcctgggctgcgtgcatgtcgataagcagagctgttcttggggagaaggagggaggtctcgggagtgtagcaccatgccaaccagccctgcgcgaagacagagtgagccacgcccggatggcagggcatgtttctgttttggtgtctcactttcctcccagcgtgacttatttggggattcctcagggcctactggaatgtgactgcccactgcccagctgcctcgggtacaagtcctggccctatgtcccagctgtcaggggctcagggaatcctacccagccacctgtcctgggatggagtgtcagcatccaccccttggttgtcatcgaggccgccctcccagtcctgggtgaagatatttgggccaccagggctcccttggccccttcacgtaggaaatagacacgtgctttttaatgcaggacactttgagtgttacaaaatctgtagacctggcagtagggtcatgatgttgggaagggtgtagtgccctaggttggtgacagaagggacagacacttgtgcacaggtgtctttggtgatggggtttttttttttataacttagtaaaaaaaaaaaaatgtatgtggaattctgtctcttggtaaagctcaaagccaggctagcctgaggtggcgcagggctctccttcctgtcccttcgatctccttgagaattaagagctggcagctgctgatggtgtttcccaacccccctcacttcccaagacaacccccagcttcaggtcctcatggggaggggagggcacgttcttgacacatgggaacttcgctcaggagggcctccccttcccctctccctcagagttttcactgccgtctcgtctttagaaagctgtttgaattccccccgcccccagtttggaccgtgtagatataactggatatacggatttttctctttgtgcaggcttcttatgccgttggtatacagggcaggaaagagaggaataaagggagagagcagtgtggaaaccacggtggttttgctttgttcttactaggttttggtgccaccttccctgcctgcgcttgtgccccctctcctccttggcactggcggcctccttgcctcccttccacccgtgctgccatcccgtgcctgtcgtgttggttcttcacacgtgctctgttctcggggttgttccattcatgccttcttggagggtgagggtggcttgggaaccgacccagtgatcatgcctactttcttctttgtatctccctccttcccagcccacccgggcagcagactctgatggaaggaaggtgccgtaggtgggcttttagaaactaacgggactggttttcaaagcagttatcttgggaaactgtttattccagcgatgtgacttttttcagaatatttcttggaatcatattcagagtctggggctgtgtgttgagcagccttaaggatgctagacactcatttagtgcccagggagtccagcgaatgacgtctgtggccaagcgaggtctcaggtgcaaagcaaaaggaccatttaaagtaaaatagcttggattcaatcatgtgacttttaaattggctcagaaagcaattttgtaatttcagagagtgttttgagccatggccacgttgtcattgtgagtctatagcttgactccttggagaacaatattcatttggttgtggagactgatttgctgggagaaatctgtcctgttactttctggtcatcccaggttctgacttttaccaggggcaaaaaaaaaaaaagcaagagggagataaatcccatctgtgagtttgtcttattggcgcctttttcctcagctgtcttccaagtattatttttactgttaaaaaattttttaaaaatgtgaaatgtaatgtttttacagcaacaatatgaaatatattttataaggaataaaatggtaccttgtctgatttaaaaaaa

SEQ ID NO: 4747 - DNA, 992 bp, Homo Sapiens
  NM_018664
ggggcagacgtgggacgggaaggacggctgccgggactggcgcgcggggacactgggccgacgcgtggagtagcggggagagcgggaagcctgagggggcggggccggcgcgaggccgtgggtgcggcacgaggatgccggcggcgggacagcgcccgtaggcagccccacgggcagggcgcgcgggcggggcggggcgggccgggccagaggagcgcccggcatgtcgcaagggctcccggccgccggcagcgtcctgcagaggagcgtcgcggcgcccgggaaccagccgcagccgcagccgcagcagcagagccctgaggatgatgacaggaaggtccgaaggagagaaaaaaaccgagttgctgctcagagaagtcggaagaagcagacccagaaggctgacaagctccatgaggaatatgagagcctggagcaagaaaacaccatgctgcggagagagatcgggaagctgacagaggagctgaagcacctgacagaggcactgaaggagcacgagaagatgtgcccgctgctgctctgccctatgaactttgtgccagtgcctccccggccggaccctgtggccggctgcttgccccgatgaagccggggacactcctctgcccagcaaggagccttggtcattttcatacctgggaggaaggcttttccttcacaattgtatacagggggcacctgtggccaggcctcctcctgggagctccaggaccagccagctgtgttccctgcagactgggctcagcccgacatccaacaggcgccaaactcacagagcccttgtgcagatccagcatggaggccaccctcaggagtgacttctcatccaccctggcagctagtaggttctgctgttatgcagagccatttcctctagaatttggataataaagatgcttattgtctctcccttctccagttctgggaatttacaggcacaatacacttccttttcctggaaaaaaaaaaaa

SEQ ID NO: 4748 - DNA, 2639 bp, Homo Sapiens
  NM_018668
gagatctaggaagtcgcttctttttctggtagaaggcggggttctcctcgtacgctgcggagtctctgcggggtgtagaccggaatcctgctgacgggcagagtggatcagggagggagggtcgagacacggtggctgcaggtctgagacaaggctgctccgaggtagtagctctcttgcctggaggtggccattcattcctggagtgctgctgaggagcgagggcccatctggggtctctggaagtcggtgcccaggcctgaaggatagccccccttgcgcttccctgggctgcggccggccttctcagaacgaagggcgtccttccaccccgcggcgcaggtgaccgctgccatggcttttccccatcggccggacgcccctgagctgcctgacttctccatgctgaagaggctggctcgagaccagctcatctatctgctggagcagcttcctggaaaaaaggatttattcattgaggcagatctcatgagccctttggatcgaattgccaatgtctccatcctgaagcaacacgaagtagacaagctatacaaggtggagaacaagccagccctcagctccaatgaacaattgtgcttcttggtcagaccccgcatcaagaatatgcgatacattgccagtcttgtcaatgctgacaaattggctggccgaactcgcaaatacaaagtgatcttcagccctcaaaagttctatgcgtgtgagatggtgcttgaggaagagggaatctatggagatgtgagctgtgatgaatgggccttctctttgctgcctcttgatgtggatctgctgagcatggaactaccagaatttttcagggattactttctggaaggagatcagcgttggatcaacactgtagctcaggccttacaccttctcagcactctctatggaccctttccaaactgctatggaattggcaggtgcgccaagatggcatatgaattgtggaggaacctggaggaggaggaggatggcgaaaccaagggccgaaggccagagattggacatatctttctcttggacagagatgtggactttgtgacagcactttgctcccaagtggtttatgagggcctagtagatgacaccttccgcatcaagtgtgggagtgtcgactttggcccagaagtcacatcctctgacaagagcctgaaggtgctactcaatgccgaggacaaggtgtttaatgagattcggaacgagcacttctccaatgtctttggcttcttgagccagaaggcccggaacttgcaggcccagtatgatcgccggagaggcatggacattaagcagatgaagaatttcgtgtcccaggagctcaagggcctgaaacaggagcaccgcctgctgagtctccatattggggcctgtgaatccatcatgaagaagaaaaccaagcaggatttccaggagctaatcaagactgagcatgcactgctagaggggttcaacatccgggagagcaccagctacattgaggaacacatagaccggcaggtgtcgcctatagaaagcctgcgcctcatgtgccttttgtccatcactgagaatggtttgatccccaaggattaccgatctctgaaaacacagtatctgcagagctatggccctgagcacctgctaaccttctccaatctgcgaagagctgggctcctaacggagcaggcccccggggacaccctcacagccgtggagagtaaagtgagcaagctggtgaccgacaaggctgcaggaaagattactgatgccttcagttctctggccaagaggagcaattttcgtgccatcagcaaaaagctgaatttgatcccacgtgtggacggcgagtatgatctgaaagtgccccgagacatggcttacgtcttcggtggtgcttatgtgcccctgagctgccgaatcattgagcaggtgctagagcggcgaagctggcagggccttgatgaggtggtacggctgctcaactgcagtgactttgcattcacagatatgactaaggaagacaaggcttccagtgagtccctgcgcctcatcttggtggtgttcttgggtggttgtacattctctgagatctcagccctccggttcctgggcagagagaaaggctacaggttcattttcctgacgacagcagtcacaaacagcgctcgccttatggaggccatgagtgaggtgaaagcctgatgtttttcccggccagtgttgacatcttccctgaacacattcctcagtgagatgcaggcatctggcacccagctgctataaccaagtgtccaccaactacctgctaagagccgggagcatggaacgtgttgggatttagagaacattatctgagaaaagagttcacttcctgctcccaggatatttctcttttctgtttatgaagtacaacccatgctgctaagatgcgagcaggaagaggcatcctttgctaaatcctgtttgaatgtcattgtaaataaagcctctgctctcagatgtaatacgttggtcgttctggacacgcacttccatctttattagtgaaagcccattggagcttgctacaggggcttcctgtgcttcttggcctggactttgtagtggctccaggcctggtctggttcttccct

SEQ ID NO: 4749 - DNA, 9249 bp, Homo Sapiens
  NM_018672
tttttatatttttagtagagacagggtttcaccatgttggtcaggctggtctcaaactcctgacttcgtgatctgcccaccttggcctcccaaagtgctgggattacaggcgtgagccaccgcacccggtcagctattttctacatgcttcatttgcagtgtaatattggattgtatgagactttgggttttgtgttaatacctacagaaaatgttgatattttctcttagcaggctgtcaaccaggttaggttcaggtcataagtttctacccacattctttgaactgtagttgtcattttagtttatttttcaaaaacttttgcagtacctttttggtctgtcttgtgtgtgccttgcagtgaacagtctggatttggacagtggtctgtctgttagttcagtttctcaagcctttgtcacactaataggattggatttatgtatgtccagcttgggaattattacaggaattaaaaacaactttttagagtgctttcctgagctctctttctatttgttcccccttctactttttgcttccctgtggctgctgtttctatcctccagccagagagctagtgtttattttctccattgtgttacacacttgtgcagctgcaaccaccatatccagggcccaatggtaggaggtagagaagaaaagcaaaagggattggcctcatcctcttacaacgatagttccattgaatagagagaaaggttttcctgcctcagagtgttggctgcactaggcttttgttactgtagtctggccctgttaccatgggattgcttgcatgtggggatacaggagaattcagaaaagaaaaaaagatttgctatttctacattctccctgagcattaagacttcccttgcccattcctcaattcaaagctaaggcttcttctggagctgcctctgtgggcggttcgggagataccaaaggagaaaaagtaccactgttgatatggtggtatttcaaattctggtctaccctatttcacatgccttgtttacttttcagagctgacagattgctgctccatgcattctgtccagtttcctaagagagacagcttggagtatgcttaatccatcttacctgggactgaaacagctgcttattttgccgttaaaaattacatgcagtttactgcgtggctccgggtttgtttgtttgtttttcctctttaataggtttattcagaaaacatgtccactgcaattagggaggtaggagtttggagacagaccagaacacttctactgaagaattacttaattaaatgcagaaccaaaaagagtagtgttcaggaaattctttttccactattttttttattttggttaatattaattagcatgatgcatccaaataagaaatatgaagaagtgcctaatatagaactcaatcctatggacaagtttactctttctaatctaattcttggatatactccagtgactaatattacaagcagcatcatgcagaaagtgtctactgatcatctacctgatgtcataattactgaagaatatacaaatgaaaaagaaatgttaacatccagtctctctaagccgagcaactttgtaggtgtggttttcaaagactccatgtcctatgaacttcgtttttttcctgatatgattccagtatcttctatttatatggattcaagagctggctgttcaaaatcatgtgaggctgctcagtactggtcctcaggtttcacagttttacaagcatccatagatgctgccattatacagttgaagaccaatgtttctctttggaaggagctggagtcaactaaagctgttattatgggagaaactgctgttgtagaaatagatacctttccccgaggagtaattttaatatacctagttatagcattttcaccttttggatactttttggcaattcatatcgtagcagaaaaagaaaaaaaaataaaagaatttttaaagataatgggacttcatgatactgccttttggctttcctgggttcttctatatacaagtttaatttttcttatgtcccttcttatggcagtcattgcgacagcttctttgttatttcctcaaagtagcagcattgtgatatttctgctttttttcctttatggattatcatctgtattttttgctttaatgctgacacctctttttaaaaaatcaaaacatgtgggaatagttgaattttttgttactgtggcttttggatttattggccttatgataatcctcatagaaagttttcccaaatcgttagtgtggcttttcagtcctttctgtcactgtacttttgtgattggtattgcacaggtcatgcatttagaagattttaatgaaggtgcttcattttcaaatttgactgcaggcccatatcctctaattattacaattatcatgctcacacttaatagtatattctatgtcctcttggctgtctatcttgatcaagtcattccaggggaatttggcttacggagatcatctttatattttctgaagccttcatattggtcaaagagcaaaagaaattatgaggagttatcagagggcaatgttaatggaaatattagttttagtgaaattattgagccagtttcttcagaatttgtaggaaaagaagccataagaattagtggtattcagaagacatacagaaagaagggtgaaaatgtggaggctttgagaaatttgtcatttgacatatatgagggtcagattactgccttacttggccacagtggaacaggaaagagtacattgatgaatattctttgtggactctgcccaccttctgatgggtttgcatctatatatggacacagagtctcagaaatagatgaaatgtttgaagcaagaaaaatgattggcatttgtccacagttagatatacactttgatgttttgacagtagaagaaaatttatcaattttggcttcaatcaaagggataccagccaacaatataatacaagaagtgcagaaggttttactagatttagacatgcagactatcaaagataaccaagctaaaaaattaagtggtggtcaaaaaagaaagctgtcattaggaattgctgttcttgggaacccaaagatactgctgctagatgaaccaacagctggaatggacccctgttctcgacatattgtatggaatcttttaaaatacagaaaagccaatcgggtgacagtgttcagtactcatttcatggatgaagctgacattcttgcagataggaaagctgtgatatcacaaggaatgctgaaatgtgttggttcttcaatgttcctcaaaagtaaatgggggatcggctaccgcctgagcatgtacatagacaaatattgtgccacagaatctctttcttcactggttaaacaacatatacctggagctactttattacaacagaatgaccaacaacttgtgtatagcttgcctttcaaggacatggacaaattttcaggtttgttttctgccctagacagtcattcaaatttgggtgtcatttcttatggtgtttccatgacgactttggaagacgtatttttaaagctagaagttgaagcagaaattgaccaagcagattatagtgtatttactcagcagccactggaggaagaaatggattcaaaatcttttgatgaaatggaacagagcttacttattctttctgaaaccaaggctgctctagtgagcaccatgagcctttggaaacaacagatgtatacaatagcaaagtttcatttctttaccttgaaacgtgaaagtaaatcagtgagatcagtgttgcttctgcttttaatttttttcacagttcagatttttatgtttttggttcatcactcttttaaaaatgctgtggttcccatcaaacttgttccagacttatattttctaaaacctggagacaaaccacataaatacaaaacaagtctgcttcttcaaaattctgctgactcagatatcagtgatcttattagctttttcacaagccagaacataatggtgacgatgattaatgacagtgactatgtatccgtggctccccatagtgcggctttaaatgtgatgcattcagaaaaggactatgtttttgcagctgttttcaacagtactatggtttattctttacctatattagtgaatatcattagtaactactatctttatcatttaaatgtgactgaaaccatccagatctggagtaccccattctttcaagaaattactgatatagtttttaaaattgagctgtattttcaagcagctttgcttggaatcattgttactgcaatgccaccttactttgccatggaaaatgcagagaatcataagatcaaagcttatactcaacttaaactttcaggtcttttgccatctgcatattggattggacaagctgttgttgatatccccttattttttatcattcttattttgatgctaggaagcttattggcatttcattatggattatatttttatactgtaaagttccttgctgtggttttttgccttattggttatgttccatcagttattctgttcacttatattgcttctttcacctttaagaaaattttaaataccaaagaattttggtcatttatctattctgtggcagcgttggcttgtattgcaatcactgaaataactttctttatgggatacacaattgcaactattcttcattatgccttttgtatcatcattccaatctatccacttctaggttgcctgatttctttcataaagatttcttggaagaatgtacgaaaaaatgtggacacctataatccatgggataggctttcagtagctgttatatcgccttacctgcagtgtgtactgtggattttcctcttacaatactatgagaaaaaatatggaggcagatcaataagaaaagatccctttttcagaaacctttcaacgaagtctaaaaataggaagcttccagaaccaccagacaatgaggatgaagatgaagatgtcaaagctgaaagactaaaggtcaaagagctgatgggttgccagtgttgtgaggagaaaccatccattatggtcagcaatttgcataaagaatatgatgacaagaaagattttcttctttcaagaaaagtaaagaaagtggcaactaaatacatctctttctgtgtgaaaaaaggagagatcttaggactattgggtccaaatggtgctggcaaaagcacaattattaatattctggttggtgatattgaaccaacttcaggccaggtatttttaggagattattcttcagagacaagtgaagatgatgattcactgaagtgtatgggttactgtcctcagataaaccctttgtggccagatactacattgcaggaacattttgaaatttatggagctgtcaaaggaatgagtgcaagtgacatgaaagaagtcataagtcgaataacacatgcacttgatttaaaagaacatcttcagaagactgtaaagaaactacctgcaggaatcaaacgaaagttgtgttttgctctaagtatgctagggaatcctcagattactttgctagatgaaccatctacaggtatggatcccaaagccaaacagcacatgtggcgagcaattcgaactgcatttaaaaacagaaagcgggctgctattctgaccactcactatatggaggaggcagaggctgtctgtgatcgagtagctatcatggtgtctgggcagttaagatgtatcggaacagtacaacatctaaagagtaaatttggaaaaggctactttttggaaattaaattgaaggactggatagaaaacctagaagtagaccgccttcaaagagaaattcagtatattttcccaaatgcaagccgtcaggaaagtttttcttctattttggcttataaaattcctaaggaagatgttcagtccctttcacaatctttttttaagctggaagaagctaaacatgcttttgccattgaagaatatagcttttctcaagcaacattggaacaggtttttgtagaactcactaaagaacaagaggaggaagataatagttgtggaactttaaacagcacactttggtgggaacgaacacaagaagatagagtagtattttgaatttgtattgttcggtctgcttactgggacttctttctttttcacttaattttaactttggtttaaaaagttttttattggaatggtaactggagaaccaagaacgcacttgaaatttttctaagctccttaattgaaatgctgtggttgtgtgttttgcttttctttaaataaaacgtatgtataattaagtgaagctgcatgtttgtattgaagtatattgaactatatagtttgtatgtcatctttttcaccattcagaaacagtgcttctgaatttgtgatttaaaggaattgtaatagaatagttttatttttaagttatctttaagtttatgccatcttcttaaataagtacgtaatgttccaatctaaataaaaaactaattcataactaatgcatagaaaagatacataaagcaatgtgaaagtttcttgcttctcctttttaatttctaaaaaagccactttgaatggaagttgtcatccgtaaaagctgaagtgtaagcactaggaaatctcaatatagagatttgaggaaagttatatccactaggtggcagtcattgatcataataagtgaaatgagcccttgttctagtacatgattttaggcttaggtaattaggtatgtgaaattacatttctttaatttaaagtaaaattcagaaggttttagttattataattaaaggaagactgtgtgtagaatcttacgtaatagtctgattctttgactctgtggctagaatgacagttatctatggaggtggtagaattaagccataccttttccttcatcactcttggaacatataaattttttgtcatcttccttgcaaagggcacatttaattttgttcttgaataaaatattttattgggtatttgtttttattggtaaactttagtgaatctcttctataaaattgtaagtagatcagtgtgtagatttatttagtaacttacctcattgactttggaacatggtaggatatgaataaactctttcaagggttaaattaagaattgtaagtgcagtgcgcctatttctttttaataagaaccagaatttcatttttgatagagttaaaggcatggctaatattttcttagaaatacttccttgtacaacccatgtattggctcaaggtataaaatagtgtaaataatgctagttgacattacatttcaaccaaatgaaagtattaacttcataaaacaaatatattgagagtgtgattattgtattagacaacaacaacagcaatgacagaaggatttggtactgaattactttaaataagcaaaacctttcagtggcattattcattctttaatgtaggcaaaatttaatgaacttttagctttattgtgtaataagacatctgtgattttaggctctagcagtggatttaaaagtgttctttctcggtacaaagtacgtggctgatattttcccccattgctgggggcagttgctatacactttcctaaagtatatataatgttcacataaatacccagggacctcttttttgggatgtgcttttgtaattatgtgtaaccttgaatacttaagtttagtaaaagcaacaaaattatatctatagtttactaaggcagtcacgaaaaagcatagttttttttagaacctgaccatcctaagaaagttatgtcatctgaagatagagcatgactaatgaagaaaattacctgcttttgcacgtagatttggtaactttcactttacatttgtgaatgtgtaattggtgcaaagtaaattttttttcctgcaaagtgaaagttgagtagtcacaatcatgttatttattttgttcatttagttactttgcttttaatgtatatgaatacatgctcttgtaaacaattttaaaagacattcaaatttttttttagtttttatatactcagaatatattttggttgttaaattaaattatgttccctttttcacagtaacaaaatctgactcaggagaaatataacttaattcttaggaaaacaagggtaagtgagctggaaagcaaaggaggcaaaaagtgaaatatatttatttacagtgtacagttcatgtttatgaacatactaattttaaaatgtcttaaattactgatctcaaaacttttttctatgtcagtacagataaataaataaatatacatattaggcaaaagcaacatcaccaaccttatatttcccattcatggtcaaattttcaaaggaaagtaaaagctgagctttactgagtgagtgtttactgactaataaggcaagaaaaaacatgatgagtgtactttacatcttacttttgtgggctcttaatttttttctctagtttgttttcagtaaagacagtgggttttctttaaaataatttttttcttttaaatttgcacaaattatcttaggtcagtattttggttttaatcattaaaacatttttagagtaatgtaatttaacaaatattttaagtgattatgtttccagaaatggattctttggagagaactcggatgactatcagttttggccctgtaagatcgtggagatctgtaagatagatacttatataacttacataaaatatatataatatattacttatataacttatataactagctattattttatataactaactataatatgacaaatcctttgctagtagtactaacaacgttttataggagcacaattaattttacttaggataagtgttgttattattgtttttattgttgttctgttagttactcaaaacttcattctaattgtgccctgagtttgttaaaataccatactgtatttttgtgtaacatgtaaataggcattaatttttgagaaatagaaatgtttatccttaatgtatttttaatttgctaacattgattttttattttctttcctgaaatagcttatttcctaaaatgaaagaatttattctcagatgaataatttttatatcagctattcttatcaggtaaaagtttaattattttttatttataatatatgtaagcaattctcaatgctgctctttaagaaaaataaatatgattatattaataataagc
